United States Patent Application Publication US 2013/0309769 A1 - sequence listing, part 3

SEQ ID NO: 1813 - DNA, 1772 bp, Homo sapiens; identical to SEQ ID NO: 532

SEQ ID NO: 1814 - DNA, 2759 bp, Homo sapiens; identical to SEQ ID NO: 539

SEQ ID NO: 1815 - DNA, 4675 bp, Homo sapiens; identical to SEQ ID NO: 560

SEQ ID NO: 1816 - DNA, 2756 bp, Homo sapiens; identical to SEQ ID NO: 1528

SEQ ID NO: 1817 - DNA, 2792 bp, Homo sapiens; identical to SEQ ID NO: 619

SEQ ID NO: 1818 - DNA, 5816 bp, Homo sapiens; identical to SEQ ID NO: 1489

SEQ ID NO: 1819 - DNA, 6333 bp, Homo sapiens; identical to SEQ ID NO: 546

SEQ ID NO: 1820 - DNA, 2010 bp, Homo sapiens; identical to SEQ ID NO: 537

SEQ ID NO: 1821 - DNA, 7335 bp, Homo sapiens; identical to SEQ ID NO: 558

SEQ ID NO: 1822 - DNA, 1529 bp, Homo sapiens; identical to SEQ ID NO: 551

SEQ ID NO: 1823 - DNA, 5480 bp, Homo sapiens; identical to SEQ ID NO: 574

SEQ ID NO: 1824 - DNA, 4644 bp, Homo sapiens; identical to SEQ ID NO: 553

SEQ ID NO: 1825 - DNA, 802 bp, Homo sapiens; identical to SEQ ID NO: 605

SEQ ID NO: 1826 - DNA, 5270 bp, Homo sapiens; identical to SEQ ID NO: 564

SEQ ID NO: 1827 - DNA, 938 bp, Homo sapiens; identical to SEQ ID NO: 584

SEQ ID NO: 1828 - DNA, 619 bp, Homo sapiens; identical to SEQ ID NO: 658

SEQ ID NO: 1829 - DNA, 1834 bp, Homo sapiens; identical to SEQ ID NO: 1485

SEQ ID NO: 1830 - DNA, 5460 bp, Homo sapiens; identical to SEQ ID NO: 1499

SEQ ID NO: 1831 - DNA, 3067 bp, Homo sapiens; identical to SEQ ID NO: 530

SEQ ID NO: 1832 - DNA, 6330 bp, Homo sapiens; identical to SEQ ID NO: 616

SEQ ID NO: 1833 - DNA, 9127 bp, Homo sapiens; identical to SEQ ID NO: 591

SEQ ID NO: 1834 - DNA, 4478 bp, Homo sapiens; identical to SEQ ID NO: 548

SEQ ID NO: 1835 - DNA, 4870 bp, Homo sapiens; identical to SEQ ID NO: 586

SEQ ID NO: 1836 - DNA, 32759 bp, Homo sapiens
gagcagtcgtgcattcccagcctcgcctcgggtgtagggattgcatagaaaagcaaaactacacagtcttgactgtgtagttttgtttttaggattagaggctcaccgattcatgtcggagatggtcagaaaaaccaactctccataggacgtcgtttcagaagcaaccttgggcttagtcccaccctttttaggcactcttgagaaatcagagtgcctagaaagatgacaactcaagcaccgacgtttacgcagccgttacaaagcgttgtggtactggagggtagtaccgcaacctttgaggctcacattagtggttttccagttcctgaggtgagctggtttagggatggccaggtgatttccacttccactctgcccggcgtgcagatctcctttagcgatggccgcgctaaactgacgatccccgccgtgactaaagccaacagtggacgatattccctgaaagccaccaatggatctggacaagcgactagtactgctgagcttctcgtgaaagctgagacagcaccacccaacttcgttcaacgactgcagagcatgaccgtgagacaaggaagccaagtgagactccaagtgagagtgactggaatccctacacctgtggtgaagttctaccgggatggagccgaaatccagagctcccttgatttccaaatttcacaagaaggcgacctctacagcttactgattgcagaagcataccctgaggactcagggacctattcagtaaatgccaccaatagcgttggaagagctacttcgactgctgaattactggttcaaggtgaagaagaagtacctgctaaaaagacaaagacaattgtttcgactgctcagatctcagaatcaagacaaacccgaattgaaaagaagattgaagcccactttgatgccagatcaattgcaacagttgagatggtcatagatggtgccgctgggcaacagctgccacataaaacacctcccaggattcctccgaagccaaagtcaagatccccaacaccaccgtctattgctgccaaagcacagctggctcggcagcagtccccatcgcccataagacactccccttccccggtcagacacgtgcgggcaccgaccccatctccggtcaggtccgtgtctccagcagcaagaatctccacatcccccatcaggtctgttaggtctccattgctcatgcgtaagactcaggcatccaccgtggccacaggtcctgaagtgcctcccccttggaagcaagagggctacgtggcctcctcatctgaggctgagatgagagagacaacgctgacaacctctactcagatcaggacagaagagagatgggaagggagatacggtgtccaggagcaagtgaccatcagtggtgctgcgggtgctgccgccagtgtgtcggccagtgctagctacgcagcagaggctgttgccactggtgctaaagaggtgaaacaagatgctgacaaaagtgcagctgttgcgactgttgttgctgccgttgatatggccagagtgagagaaccagtgatcagcgctgtagagcagactgctcagaggacaaccacgactgctgtgcacatccaacctgctcaagaacaggtaagaaaggaagcggagaagactgctgtaactaaggtagtagtggccgccgataaagccaaggaacaagaattaaaatcaagaaccaaagaagtaattaccacaaagcaagagcagatgcacgtaactcatgagcagataagaaaagaaactgaaaaaacatttgtaccaaaggtagtaatttccgcagctaaagccaaagaacaagaaactagaatttctgaagaaattactaagaaacagaaacaagtaactcaagaagcaataagacaggaaactgagataactgctgcatccatggtggtagttgccactgcaaagtccacaaaactagaaacagtcccgggagctcaagaagaaactaccacacaacaagatcaaatgcacctaagttatgaaaagataatgaaggaaactaggaaaacagttgtacctaaagtcatagttgccacacccaaagtcaaagaacaagatttagtatcaagaggtagagaaggcattactaccaaaagagaacaagtgcaaataactcaggagaagatgagaaaggaagccgagaaaactgccttgtctacaatagcagttgctactgctaaagccaaagaacaagaaacaatactgagaactagagaaactatggctactagacaagaacaaatccaagttacccatggaaaggtggacgttggaaaaaaggctgaagctgtagcaacagttgttgctgcagtagaccaggcccgagtcagagagcccagagagcctgggcatcttgaagaatcctatgctcagcagaccactttggagtacggatataaggaacgcatttccgccgcaaaggtagctgagcctccccaacgtccagcctcagaaccccacgttgtccctaaagcagtcaagcctagagtaatccaggctccttctgagactcatatcaaaactactgatcaaaagggaatgcacatatcatcacagatcaagaaaactacagatctaacaacggaaagattagtccatgtggataaacgcccccgcacagctagccctcactttactgtttcaaaaatttctgttcctaagacagaacatggatatgaggcatcaatagccggtagtgctattgccacattacaaaaagagttgtcagccacatcttctgctcagaagatcaccaaatcggtgaaggctcctactgtgaagcccagtgagactagagtaagggcagagcccacacccttgccacagttccccttcgctgacacaccagatacttacaagagtgaagctggcgttgaggtgaaaaaggaagtaggggtgagcatcactggcaccaccgtccgtgaagagcgctttgaagtactgcacggacgcgaagccaaggtaacagaaacagcaagagtaccagcacctgttgaaattcctgttactccaccaactttggtctcgggcttaaaaaatgtgactgtcatagaaggtgaatctgtcaccttggagtgccacatctctggatacccatccccgacagtgacatggtacagggaagactaccaaatcgaaagttccattgacttccagataaccttccagagtggaattgctcgtcttatgattcgcgaagcatttgcggaagacagcgggcgatttacttgcagtgctgtaaatgaggctggaaccgtcagcacatcctgctatctggctgtgcaggtgtcagaagaatttgaaaaggaaaccacagccgtgactgagaaatttactacagaagagaaacgctttgttgagtcaagagatgtggttatgactgatactagcctcacagaggaacaagcagggcctggagaacctgccgcgccttactttattacaaaaccagtggtccagaaactggtggaaggtgggagcgtggtgtttggatgccaagttggcggcaacccaaagccccatgtatactggaaaaaatctggtgttcctctaaccactggatacagatacaaagtgagttacaacaaacaaaccggtgaatgcaagctggtgatttctatgacttttgctgatgatgctggagaatacactattgttgttcgcaataagcatggagaaacttctgcatctgcttccttgcttgaagaagctgattatgagttactgatgaagtcccagcaagaaatgctttatcagacacaagtgactgcatttgttcaagaacctaaagttggagaaacagcacctggatttgtatactctgagtatgaaaaagagtatgaaaaagaacaagccttaattaggaagaaaatggccaaagatactgtagtggtcagaacttatgtagaagatcaggaattccatatttcttcctttgaagagagacttattaaagaaattgaatatagaataataaagactacattagaagaacttcttgaagaagatggagaagaaaagatggcagttgacatttctgaatctgaagctgttgaatcaggatttgattcaagaatcaagaattatagaattcttgaggggatgggtgtcacttttcattgcaagatgtctggatatccattaccaaagattgcttggtacaaagatggcaagcgcatcaaacatggagaaagataccaaatggactttctacaagatggcagagctagtctgcgtatacctgttgttcttccagaagatgaaggaatctacactgcatttgccagcaatattaaaggaaatgcaatttgctcagggaaattgtatgtggagcctgctgcaccacttggagctccgacttacattcccacactagagccagtgagcagaatcagatctctctctccacgttcagtgagcaggtctcctatacgcatgtctcctgcacggatgtcacctgcaaggatgtctcctgcacggatgtcccctgcaagaatgtcccctggacgtaggctggaggagacagatgagtcacaacttgagagactatataaaccagtctttgtgttaaaacctgtttctttcaaatgtttagaagggcaaactgccagatttgacttaaaggttgttggtagacctatgccagagacgttctggtttcatgatggccagcaaattgtcaatgactatacccataaagtagtcattaaagaagatggtactcaatcactaattattgtccctgccacacccagtgattctggggaatggactgtggttgcccaaaacagggcaggcagatcttcaatttcagtgattttaactgtggaagctgtggaacatcaggtaaaaccgatgtttgtagaaaaactgaaaaatgtcaatataaaggaaggttcccgacttgaaatgaaagtcagagctacgggtaaccccaaccctgacattgtatggttgaaaaacagtgacatcattgtgcctcataaatatcccaaaatcagaattgaaggaaccaagggagaagctgcccttaaaatcgattccactgtcagccaagattctgcctggtatactgcgactgctattaataaagctggcagagacactacaagatgcaaagtaaatgttgaagttgagtttgcagagcctgagccagagagaaagttaatcatcccacgggggacatatagagcaaaggagattgcagccccagaactggagcccctccatttgcgatatggccaagagcaatgggaagaaggtgatctctatgacaaagagaaacaacagaaaccatttttcaagaaaaaactcacttccttaagacttaagcgctttgggcctgcccactttgaatgcaggctaacacccattggtgacccaacgatggtggtggagtggctccatgatggaaagccacttgaagcagccaacaggctccgtatgatcaatgaatttgggtactgcagccttgattatggcgttgcatattctagagacagtggtatcattacttgcagagccactaacaaatatggaacagatcacacatctgctacccttattgttaaagatgagaaaagtcttgtggaagaatcccaattgcctgaggggaggaaaggcttacagagaattgaagaattagagagaatggctcatgaaggtgcacttacaggtgtaacaacagatcagaaagaaaagcaaaagccagacattgtcttgtacccagagccagttagagtacttgaaggggagactgcaaggttccgctgcagggtaacaggctaccctcagcccaaagtcaactggtacctcaatggacagctcatccgcaaaagcaaaaggttcagagttcgctatgatggtatccattacctggacatcgtggactgcaaatcatatgacacaggtgaagtgaaggtcaccgcggaaaatcctgaaggtgtgatagagcataaagtgaagcttgagattcaacagagggaagattttaggtctgtccttaggagagctcctgaaccaaggcctgagtttcacgtacatgaaccaggaaagcttcagtttgaagtacaaaaagtggatagacctgttgacaccactgaaaccaaagaagttgtgaagttgaaaagggctgaaagaattacccatgaaaaagtgcctgaagagtcggaagagctgcgcagtaaattcaagcgcagaacagaagagggctattatgaagccattaccgctgtggagctcaagtctcgaaagaaggatgaatcctatgaggaactcctcaggaagacaaaagatgaacttctccactggaccaaagagttaactgaagaggaaaagaaagctcttgccgaagaaggcaaaatcacgattccaacttttaaacctgacaagattgaactaagtcctagtatggaggctccaaaaatcttcgaaagaatccagagccaaacagtgggccaaggatctgatgcacacttccgggtcagagtcgtggggaaaccagaccccgaatgtgaatggtacaaaaatggtgtcaaaattgaacggtctgaccggatctactggtactggcccgaagacaatgtttgtgaattggtcataagagatgtgactgctgaggactctgccagcatcatggtaaaagccatcaacatagctggagaaacctccagtcacgcattcttacttgtccaagccaagcaattgatcactttcacacaggaattacaagatgttgttgctaaggaaaaagacactatggcaacctttgaatgtgaaacttcagaaccatttgtcaaagtgaaatggtataaagatggtatggaggttcatgagggagataaatacaggatgcactctgacagaaaggttcacttcctctccatactgaccattgatacgtctgatgctgaagattacagctgtgtacttgtggaagatgaaaatgtcaaaacgactgctaaacttattgttgaaggtgcagttgttgagtttgtgaaagaacttcaggacatagaagttccagaatcatattcaggagaattagagtgcattgtatccccagaaaatatagaaggaaaatggtatcataatgatgtggagcttaaatccaatggcaaatatacaattacatctcgtcgtggacgtcagaacctcacggtcaaggatgtaaccaaggaggaccagggagaatacagctttgtcatcgacgggaaaaagacaacctgtaaattaaagatgaaaccccgccccattgctatcctacaaggacttagtgaccaaaaagtctgtgagggtgacattgttcagcttgaagttaaagtctccttggaaagtgtggaaggcgtctggatgaaagacggccaagaagtgcagcccagtgacagggttcacattgtgatagacaaacaatctcatatgctgctcattgaagacatgactaaggaagatgctggaaattactctttcaccattccagcccttggcctctccaccagtgggcgtgtctctgtctatagtgtggacgtgataacacctctaaaagatgttaatgtgattgaaggcaccaaggctgtgcttgaatgtaaggtgtcagtccctgatgtgacttctgttaagtggtacttaaatgatgaacaaatcaagcctgatgaccgtgtacaggccattgtgaaaggtactaaacagcgactagtcattaaccgaactcatgcttcagacgaaggaccttacaagctgatagttggcagagttgaaaccaactgtaatctctctgtagaaaaaattaaaattatcagaggtcttcgtgaccttacctgtacagaaactcaaaatgtggtgtttgaggttgagctgtcccactctggaattgatgtcctgtggaattttaaggacaaggaaatcaagcccagttctaaatataaaattgaagcacatggaaaaatatataaattgacagttctaaatatgatgaaagatgatgaaggaaaatacacattttacgcgggagaaaatatgacatctggaaaacttactgtggcaggtggggccatctccaagccactcacagatcagaccgtagctgaatcccaggaagctgtgtttgaatgtgaagttgccaacccagattccaaaggcgaatggttgagggatggcaaacacctaccactgactaacaacatcagaagtgagtctgatggccacaaaaggagacttatcattgctgccaccaaattagatgacattggagaatatacctacaaggtggccacctccaaaacatctgccaaactcaaagttgaagctgtcaaaattaagaagactctgaagaacctcacagtgacagaaacacaggatgctgttttcactgtcgagcttacacaccctaatgtcaaaggtgtccagtggatcaaaaatggagttgtgctggaatccaatgaaaagtatgctatctctgtcaaaggaacaatttactctctgaggattaaaaactgtgccatcgtggatgagtctgtttatggcttcaggcttggaaggcttggagccagtgccagactgcacgtggagactgtcaagatcattaaaaagccaaaggatgtgacagccttggaaaatgccactgttgcctttgaagttagtgtttcccatgacactgttccagtaaaatggttccataagagtgtggaaattaagccaagtgacaaacacagactggtctcagaaaggaaagtccacaagctgatgctgcagaacatctccccctcagatgctggggaatacacagctgtggtcgggcaattggaatgcaaagcaaaactgtttgtggagacattacatattacaaaaaccatgaaaaatatcgaggtgcctgagaccaaaactgcctcttttgagtgtgaggtgtcccacttcaatgtcccttccatgtggctgaagaatggtgtggaaattgagatgagtgaaaagttcaagatagttgtgcagggaaaactccatcagctgatcatcatgaacaccagcacagaggactcggcagaatacacatttgtctgtggcaatgaccaagtcagtgccaccctgacagtcaccccaatcatgattacttccatgctgaaagacatcaacgctgaagaaaaagacactattacttttgaggtgacagtgaactatgaaggcatctcttacaaatggttaaagaatggtgtggaaatcaaatcaactgacaagtgccagatgagaaccaaaaagctcacacactcactgaacatcaggaatgttcactttggggatgctgctgactacacctttgtggctggaaaagcaacatcaacagccacactttatgtggaagctcgtcatatagaatttaggaaacacattaaggacattaaggtactggagaagaagcgagccatgtttgaatgtgaagtttctgaacctgacatcactgtacagtggatgaaagatgaccaggaactgcagatcacagacagaataaagattcagaaggagaaatatgtccaccgccttctgatcccatccacccggatgtctgatgctgggaagtacacagtggtggcaggaggcaacgtgtcaactgcaaaactctttgtagaaggcagagatgttcgcatccgaagtattaaaaaggaggttcaggtcattgagaaacagcgtgctgttgttgaatttgaggtcaatgaagacgatgttgatgcccactggtataaagatggcattgaaatcaatttccaagttcaagaacgacacaaatatgtagtggaaagaagaatccaccgaatgtttatctctgagaccagacagagcgatgcaggagaatacacctttgtggcaggaaggaacaggagttctgtcactctctatgtcaatgctcctgaaccgccccaagttctgcaggagctccagcctgtcactgtgcagtctggcaagcctgcccgcttctgtgccgtgatatccggaagaccacagcccaaaatttcctggtacaaggaagagcagctgctttccactggcttcaagtgcaaatttcttcatgatgggcaagaatacacgcttttgctaattgaagccttcccagaggatgcggcagtctatacctgtgaagccaagaatgactatggtgttgccacaacatcagcttcactctcagtggaagttccagaagttgtgtctcctgatcaggaaatgcctgtttatccacctgccatcatcaccccgcttcaggacactgtcacttctgaagggcagccagcccgttttcaatgccgggtttctggaacagatctaaaagtgtcgtggtacagcaaagacaagaaaatcaagccatctcggttctttagaatgactcaatttgaagacacttatcaactggaaattgccgaagcttatccagaagatgaaggaacttacacgtttgttgctagtaatgctgtaggccaagtatcaagcacagccaacctgagtctggaagctcctgaatcaattttgcatgagaggattgaacaagagattgagatggaaatgaaagctgccccagtgatcaagaggaaaatcgaacccctggaagtagcactgggccacctagccaaattcacctgtgagatccaaagtgctcccaatgtccggttccagtggtttaaagctggccgagaaatttatgagagtgacaagtgttctattcgatcttcaaagtatatctccagccttgaaatcctgagaacccaggtggttgactgcggcgagtatacatgcaaagcttccaatgagtatggcagtgtcagctgtacagccacactaactgtgacagaggcatatccaccaacctttctctccagacctaagtcccttacaacttttgtgggtaaggcagccaagttcatctgcacagtgacagggactcctgtgatagaaaccatttggcagaaagatggtgctgcactctcaccttcacctaactggaggatttccgacgcagaaaacaaacacattttagaactctcaaaccttaccattcaagatagaggagtttattcttgtaaggcttccaacaagtttggagcagacatctgccaagcagagttgatcatcattgataagccacatttcattaaagaattagagcctgtgcagtccgctatcaataagaaggtccaccttgagtgccaagtagatgaagacagaaaagtcacagttacgtggagcaaagatgggcaaaaactccccccagggaaagattataagatctgttttgaagataaaatagcaacacttgagattcctttggccaaactgaaagattcaggaacctatgtctgtacagcttcaaatgaggctggaagcagctcctgctcagccacagtcactgtcagagagccaccatccttcgtgaagaaggtggatccctcttatttaatgctcccaggtgaatcagcacgcctccattgcaagctgaaaggctcacctgtgatccaggttacttggtttaaaaataacaaagaactcagtgaaagtaacacagtccgaatgtattttgtcaattctgaggctatacttgatattacggatgtaaaagttgaagacagtgggagttactcatgtgaagcagtgaatgacgtcggcagtgatagctgcagtactgaaatagttatcaaagaacctccttctttcatcaaaactcttgagcctgcagacatagtgagaggaacaaatgctctacttcagtgtgaagtctcaggcactggaccatttgaaattagctggttcaaagacaagaaacaaattcgaagtagtaaaaaatacagattgttttctcagaagtctcttgtgtgtctggagatcttttcgtttaatagtgcagatgttggtgaatatgaatgtgttgttgctaatgaagtcggcaagtgtggctgcatggcaacccacttactcaaagaacctccaacctttgtaaagaaagtagatgatttgattgcactaggaggacaaaccgttaccctgcaagctgctgtgagagggtcagagcccatttctgtcacatggatgaaaggtcaagaggtcatcagagaagacggaaaaatcaaaatgagcttttccaatggtgttgcagtcttgataatccctgatgttcagattagttttggaggcaaatacacgtgcctggctgaaaatgaagctggaagccaaacatctgttggggaattaatagttaaagaacctgccaaaatcattgagcgagcagaactgatccaggtgacagcaggagatcccgccacactggagtacacagtggcaggcacgccagaactgaagcccaaatggtacaaagatgggagacccttggtcgccagtaaaaaataccgaataagttttaaaaacaatgttgcccagctcaaattttattcagctgagctgcacgacagtggccaatacacatttgagatttccaatgaagtgggcagcagctcctgtgagactacattcactgtattagatcgagacattgctccattttttaccaaacccttgcgcaacgtggatagtgttgttaatggtacctgcagactggactgcaaaattgcaggctccctccccatgagggtgtcctggtttaaggatggcaaagaaatagctgcttctgacagatacaggatagcatttgtggaaggcacagcctctttggagatcatcagagtagacatgaatgatgcagggaatttcacttgtcgagccacaaattccgtgggaagcaaagacagcagtggagccctgattgtgcaagaaccacccagttttgtaactaaacccggctcaaaggatgttctgcctggctcagcagtctgcctgaagagcactttccaaggatctactcctctcacaatcagatggtttaagggcaacaaagagctggtttctggtggaagctgctatattaccaaagaagctttagagagttccctggaactctatttagtaaaaacctctgattcgggcacgtacacatgtaaagtcagcaatgtcgctggaggggtggaatgcagtgcaaacttgtttgtaaaagaacctgccacatttgttgaaaagttagagccatcacagctgttaaagaagggagatgccacccagctagcctgcaaagtaactggtacccctccaattaaaataacatggtttgcaaatgatagagaaattaaggagagcagcaaacacagaatgtcttttgtggagtctactgcagttctaagactgacagatgttggcatcgaagacagtggtgaatatatgtgtgaggcccaaaatgaggctggcagtgaccactgcagtagcattgtaatagtcaaagagtcaccttattttaccaaggaatttaagccaattgaagtcttaaaggagtacgatgtcatgttgctggctgaggtggcaggcactcctccctttgagatcacttggttcaaagataacacaatcctgcgaagtggtagaaagtataagactttcattcaggatcatctggttagcctgcagatcctcaagtttgtagctgcagatgctggcgaataccagtgtcgggtgaccaatgaggtgggcagcagcatctgcagtgccagggtgactttaagagaacccccatccttcataaagaagatcgagagtaccagctccctccggggaggcacagctgccttccaggccactctgaagggctccttgccaattacggtgacttggctaaaagacagcgatgaaatcactgaagacgataatataagaatgacctttgagaacaatgtggccagtttgtacctcagtggcattgaagtcaagcatgatgggaaatatgtctgtcaggccaaaaatgatgcaggaatacaaagatgttctgcattactctcagtaaaagaacctgcaacaatcaccgaggaagctgtgtctatagatgtcacccaaggagacccagccactttgcaggttaaattttcagggactaaggagattacagccaaatggtttaaagatggccaagaactgaccctgggctcaaaatataaaatcagtgtcactgatacagtctcaatactgaagattatttctacagaaaagaaagatagtggagaatatactttcgaggtccaaaatgatgttgggaggagcagctgcaaggctagaattaatgtattagatcttatcatacctccttcattcaccaaaaagctgaagaaaatggacagcattaaaggttctttcattgatttagaatgtatagtggctgggtcacatcccataagcatccagtggttcaaagatgaccaagaaatatcagctagtgaaaagtacaaattctcttttcatgacaatactgccttcttggaaatcagccagctggaaggtacagacagtgggacatacacttgttctgccacaaataaggcagggcacaaccaatgcagtgggcatctgacagtcaaagaacccccttactttgtggaaaagccacagtcacaagatgtcaatcccaacacaagggtacagttaaaggctcttgtgggtggcactgcacccatgacaataaagtggtttaaagataacaaagagttacactcaggagcagcccgctcagtttggaaggatgacacctctaccagtctagagctctttgcagccaaagctaccgattctggaacctacatttgccaactaagcaatgatgttggcacagcaaccagcaaagccactctctttgtaaaagaacctcctcaattcattaagaagcccagtccagtcttagtgctgaggaatggacagtcaacaacatttgaatgccaaataacaggcactcctaaaatccgagtgtcttggtatctagacgggaatgaaataacagccattcagaaacatggcatttccttcattgatggtttagccactttccagatttctggtgccagggtagaaaatagtgggacttatgtgtgtgaagctcgaaatgacgcaggcacggcgagctgcagcattgaactcaaagtgaaagaaccccccacctttatcagagagctgaagcctgtggaggtagtaaaatatagtgacgtggagctggagtgtgaagttacgggaacacctccgtttgaagtcacttggctgaagaataacagggaaattcgaagcagcaaaaaatacacattgaccgacagagtgtctgtgtttaacctccatataaccaagtgtgacccttcagacactggggaataccagtgcattgtatccaatgaaggcggcagctgctcatgcagtactagagttgccctgaaagaaccaccatcattcattaagaagatagaaaataccactactgttttgaaaagttctgccacctttcagagtaccgtggcaggttctcctcctatttctataacctggctaaaggatgatcagattcttgatgaagatgataatgtctatatttcatttgtggacagtgtggccacacttcaaatcagaagtgtggataatggacacagtgggagatatacctgtcaagccaagaatgagtcaggagttgagaggtgttatgctttccttttagtacaagaaccagctcaaatcgtagagaaagctaaatcagttgatgttacggagaaagatcccatgaccttggaatgtgttgtggctggaacaccagaactcaaagtgaaatggcttaaagacgggaaacaaatagttcccagtagatacttttcaatgagttttgaaaataacgtggccagttttagaattcagtcagtaatgaagcaggacagcggtcagtacactttcaaggtggaaaatgacttcggaagcagtagctgtgatgcctacttaagagtgctagatcaaaatattcctccatcattcaccaaaaaattaaccaaaatggataaagttctgggctcttctattcatatggagtgcaaggtgtctggttcacttcccattagtgctcagtggtttaaggatggaaaagaaatatctacaagtgcaaaatacagacttgtgtgccatgagagatctgtgtctctggaagttaataatctggaattagaagatactgcaaattacacatgcaaagtgtcaaatgtagcaggagatgatgcatgcagtggcatcttaactgtgaaagaaccaccaagcttcctagtgaaacctgggcgacagcaagccatacctgattctacagtggaatttaaggcaatactaaaaggaacaccaccatttaaaataaaatggtttaaggatgatgtggaacttgtctcaggtcctaaatgtttcattggcttggaagggtcgactagcttcttaaatctctactcagtggatgcttctaagactggacagtatacttgccatgttaccaatgatgttggtagcgactcttgtactacgatgttgcttgtgacagaaccaccaaagtttgtaaagaaattagaagcctccaaaattgtgaaagcaggtgactcttcacgacttgaatgcaagatagctggatccccagaaatcagagttgtgtggttccgaaatgaacatgaacttccagccagtgataagtacagaatgactttcattgactcagtggccgtcatacagatgaacaatctcagtactgaggacagtggagatttcatttgtgaggctcagaatcccgctggcagcacaagctgcagtaccaaggttatagtaaaagagccacctgtttttagcagcttccctcctatagtagaaacccttaaaaatgctgaagtcagtcttgaatgtgaactttcgggaacaccaccgtttgaggtggtatggtacaaagacaagcggcaactcagaagcagcaagaaatacaagattgcatccaaaaacttccacacaagtattcacattctcaatgtggacacttcagacatcggtgaataccactgcaaagcacagaatgaagtgggaagtgatacttgtgtttgtactgtaaaattgaaagaaccaccaagatttgtctccaaactgaacagcctcactgttgtagccggagagcctgctgaattacaagcatccatagaaggcgcccagcctatttttgtccagtggcttaaagagaaggaagaagtgattagagaaagtgaaaacatcaggattacatttgtggaaaatgttgcaactctacagtttgcaaaagcagagccagctaatgctggaaagtatatctgccaaatcaagaatgatggtggaatgagggagaacatggccacactgatggtcttagagcccgcagtcattgttgagaaggcaggaccgatgacggtgactgtaggagaaacgtgcactctggagtgtaaggtggctggcactccggaactctctgttgaatggtacaaggatggaaagctgttgaccagcagccaaaaacacaaatttagcttctacaacaaaatctcttccttaaggattctctcagttgaaaggcaagatgcaggcacatacactttccaggttcaaaataatgttgggaaaagcagctgcacagctgtggttgatgtttcagaccgagcagttcctccctctttcacacgaagactgaaaaatactggtggggtgttaggtgcttcttgcatcttggaatgcaaagtagctggatcatcacctatttcagttgcctggtttcatgagaaaaccaagattgtcagtggagcaaagtaccaaaccacattttcagataatgtctgcacattgcagttgaattctctggattcctcagatatgggcaattacacatgcgtggctgctaatgtcgctgggtctgatgaatgtcgtgcagtgctaactgtacaagaaccaccctcttttgtgaaagaacctgaacctttggaagtactaccaggcaaaaatgtaaccttcacaagcgttattagaggaacccctccattcaaagtcaactggttcagaggtgccagagaactagtgaaaggagaccggtgcaacatctattttgaagacactgtggcagaactggaattatttaatattgacatatctcagagtggggaatacacctgtgtggtttctaacaacgctggccaagcatcttgcactacccgtctctttgtgaaagaaccagctgcatttttgaagagattaagtgatcattctgtagaaccagggaagtccataattctggagagcacctacactggaacacttccaatttctgtcacttggaaaaaggatggttttaacataactacctctgaaaaatgtaacatagtcacaacagagaaaacttgtatcctggaaattctgaatagcacaaaaagagatgcagggcagtattcctgcgagattgaaaatgaggcaggaagggatgtttgtggagctctggtatctacattagaaccgccttattttgttacggaactggaacctctggaggcagcagttggagattcggtttctttacaatgccaagttgctgggacaccagaaattacagtgtcttggtacaaaggagataccaaattacggccaactcctgaatacaggacctactttacaaacaatgtggccacacttgtttttaataaagtgaacatcaatgacagtggagagtacacatgcaaagcagaaaatagtataggaactgcttcttctaagactgtgttcagaattcaagagcgccaactcccaccttcttttgcaagacaattaaaggacattgaacaaactgtggggttacctgttacactcacttgtcgattaaatggctctgcacccatccaagtgtgctggtatagagatggagtacttttaagagacgatgaaaatctacagacttcatttgtagataatgtggcaactttaaaaattttgcaaactgacttgagtcactctggccagtactcttgctcagcttccaacccacttggaacagcatcttctagtgctagactcacagcaagagaacccaagaaatctcccttctttgacatcaagcctgtatctatagatgttattgctggagaaagtgctgattttgagtgtcatgttactggtgctcaaccgatgcgaatcacttggtcaaaagataacaaggagatccgtcctggaggaaactatacaatcacatgtgtgggaaacactcctcatttgagaattcttaaagtaggcaaaggagactctggtcaatatacttgccaagcaaccaatgatgttggcaaagacatgtgctcagctcagctcagtgtaaaagaacctccaaagtttgttaagaaattagaagcttcaaaagttgcaaagcagggagaatccattcaactggaatgtaaaataagtggctccccagaaatcaaagtttcatggttccgaaatgacagcgaacttcatgaaagttggaaatacaacatgtcattcattaattctgtggcattgcttacgatcaatgaagctagtgctgaagacagcggggactacatttgtgaggctcataatggtgttggtgacgccagctgcagcacagcgttgacagtgaaagcacctcctgttttcacccagaagccttctccagtaggagctcttaaaggttctgatgtgattctccaatgtgaaatttcgggaactcccccatttgaagtagtatgggttaaagatcgaaagcaggttagaaacagcaagaaatttaaaatcacttcaaaacattttgatacaagtcttcatatccttaatcttgaagcctccgatgtcggggaatatcactgcaaagctactaatgaggtgggaagtgacacgtgttcttgctctgtcaagttcaaagaacctccacgattcgtgaaaaagctaagtgacacctcaacccttattggggatgctgttgagttacgggccatagtggagggcttccagccaatttctgttgtctggctgaaagatagaggtgaagtcatcagagagagtgaaaataccaggatttcattcattgataacattgcaaccctccagctggggagtccagaagcatctaattctggaaaatatatatgccaaatcaaaaacgatgctggaatgagagaatgctctgcagtcttgactgtactagaaccagcaagaatcatagagaagcccgaacccatgactgtcactactggaaatccttttgcattagagtgtgtagtgactggaacaccagaactctcagccaagtggttcaaagatggaagagaattgtctgcagacagcaaacatcacattacattcatcaataaagtggcttcccttaaaatcccctgtgccgaaatgagtgacaaaggattatatagctttgaagtgaaaaacagtgttggcaaaagtaactgcactgtatccgtccatgtttctgatcggattgtgcctccttccttcatccgcaagctgaaagacgtgaatgccatcctgggggcctcagttgttttggagtgccgagtctctggctcagccccgatttcagttggctggtttcaggatggaaatgagattgttagtgggcccaaatgtcagtccagcttttcggaaaacgtctgtactttgaatctgagcttgttggagccctccgacacaggcatatacacgtgtgtggctgccaatgtagctggttccgatgagtgctcagcagtcctgactgtgcaagaaccaccatcttttgaacaaacccctgattctgtggaagttttgcctggaatgagcctcacattcaccagtgtcatcagaggcacccctcctttcaaggtcaagtggtttaaaggcagcagggaactggtgcctggggagtcatgcaacatctctctggaagattttgtcacagaactggagttgtttgaggtgcagccattagaaagtggagactattcttgcctcgttacaaatgatgctggcagtgcttcctgtaccacacatctttttgtgaaagaaccagccacctttgtgaaaagattggctgatttcagtgttgagacaggaagccccatagttctcgaggccacatacactggcacacctccaatctcagtgagctggataaaggacgagtatcttatttcacaatctgagagatgcagtattactatgacagaaaaatctaccatactggaaattcttgagagcacaatagaggattatgcacagtacagctgcctgatagaaaatgaggctggtcaagatatctgtgaagctctggtgtctgtcttagaaccaccgtactttattgaacctctggaacatgtggaagcagtcattggagaacctgcaactttacagtgtaaagtggatggaactccagaaattagaatttcttggtataaagaacacacaaagctacgatcagctcctgcatataaaatgcaattcaaaaataacgttgcttccttagtaatcaacaaagtggatcacagtgatgtgggagagtattcatgcaaggcagacaacagtgtgggggcagtcgcttcttcagctgtgcttgttatcaaagcgcgcaaacttccacctttctttgcaagaaaactgaaagacgttcatgagactctaggcttcccagttgcatttgaatgccgcatcaatggctcagaacctcttcaagtgtcttggtacaaggatggggttcttttgaaagatgatgctaatttgcagacatcttttgttcataatgtagcaactcttcagattttacaaactgaccagagccacatagggcagtataattgctctgcttctaatcctcttgggactgcttcatccagtgccaagctcattctctcagagcatgaagtgcctcctttctttgatctaaagcctgtatcagtagatcttgctcttggagaaagtggtacttttaaatgtcatgtaactgggactgcaccaatcaaaatcacttgggccaaagataaccgagagattcgccctggaggcaactacaagatgactttggtagaaaatactgccactctgacagttctcaaagtaggcaaaggcgatgccgggcagtacacctgctatgcaagcaacatcgctggaaaagactcttgttctgctcagctgggtgtacaagaaccacccaggttcattaagaagctagaaccttcaagaattgtgaaacaggatgaattcacaaggtatgaatgcaaaatcggtgggtctccagaaatcaaagttttatggtataaggacgagactgaaattcaagagagcagtaaattcagaatgtcattcgttgactcggtggctgtgctggaaatgcacaatctcagtgttgaagacagtggagactacacctgtgaggcccacaatgcagcaggcagtgccagcagcagcacatccttaaaagttaaagaaccacccattttccgcaaaaagcctcatcctatagagacactgaaaggagctgatgttcaccttgaatgtgagcttcagggcactcccccatttcacgtttcttggtataaagacaagagagaacttaggagcggcaagaagtacaagataatgtctgagaacttcctaaccagtatccacatcctgaatgtcgatgctgcagacattggggaatatcagtgtaaagccacaaatgatgtgggaagcgacacttgcgttggttccatcgctctcaaagcaccaccaagatttgtgaagaagctcagtgacatatctactgtcgttggtaaagaagttcagctgcagactaccattgaaggcgctgaacccatttcagtggtgtggttcaaagataagggagaaatcgttagagaaagtgacaacatatggatttcttattcagaaaacattgcaaccttacagttttcaagagtggaaccagccaatgctggaaaatacacttgtcagatcaaaaacgatgctgggatgcaagagtgcttcgccacgctatccgttctcgagcctgcaacaattgtagaaaagccagaatccataaaagttaccacgggagacacctgtaccttggagtgtacagtagctggcacccctgaactcagtactaagtggtttaaggatggaaaagagctaacaagtgacaacaaatacaaaataagcttcttcaacaaagtatccggccttaagatcatcaatgtagcaccgagtgacagtggggtatacagttttgaggtgcagaaccctgttggcaaagacagctgcacagcttcattgcaggtttcagaccgaaccgttcctccttcattcacaagaaaattgaaagagacaaatggtctatccggctcctcagttgtaatggagtgtaaagtctatgggtcacctccaatctctgtctcctggttccatgaaggaaatgagatcagtagtggaaggaaataccagaccaccctgacagataatacttgtgctttaactgtgaacatgctggaagaatcagacagtggtgactacacatgtatagctactaatatggctggttctgatgaatgtagtgctcctttgactgtgagagaaccaccatcttttgttcagaaacctgatcccatggatgttttaactgggaccaatgtaactttcacaagtatcgtaaaaggaacacctcctttcagtgttagctggttcaaaggtagcagtgaactagtaccaggtgacagatgcaacgtgtctttggaggattcagttgctgaactggagttgttcgatgtagatacatcacaaagtggagaatatacttgcatagttagcaatgaagctggcaaggcttcttgtacaacacatctctacataaaagccccagccaaatttgtgaagaggctgaatgattacagcatagagaaaggaaaacccctgatcctagagggtacattcactggaactcctcccatttcggttacctggaagaaaaatggcataaatgtaactccttctcagaggtgtaatataactacgactgaaaaatcggcaatcctggaaattccaagtagcacagtagaggatgcaggacaatacaactgctacattgaaaatgcctctggaaaagattcctgttcagcacaaatactcatactagaaccaccgtattttgtcaagcagttggagccggttaaggtgtctgttggagattctgcctctctacaatgccagcttgctggaacccctgaaattggggtatcctggtataaaggagatacaaaattgagacccactacgacttacaaaatgcattttaggaataatgttgctacactggttttcaaccaggttgatattaatgatagtggagaatatatctgcaaagctgaaaacagcgtgggagaagtttctgcatcaactttccttaccgttcaagagcaaaaacttccaccatcattttctcgacaattgagagatgttcaagaaacagttggactgccagttgtttttgattgtgccataagtggatcagaacctatctccgtgtcttggtataaagacggcaagccattgaaagacagcccaaatgtacaaacatcatttttagacaatacagccacactcaatatttttaaaactgaccggagccttgcaggccagtattcctgcacagctacaaaccctataggctctgcttcttccagtgccaggctcattctcacagaggggaagaacccacccttctttgacatccgtcttgcccctgtggatgctgtggtgggagaaagtgctgactttgagtgccacgtcacgggcacacaaccgataaaggtcagctgggccaaagacagcagagaaatacgaagtggcggaaagtaccagattagttatctggaaaacagcgcccacctgacagtcctcaaagtagacaaaggagattctggacaatatacctgctatgctgtgaatgaagtgggaaaagactcttgcacagctcagctgaatataaaagagcggctcatcccaccaagtttcactaaaagactctcagagacagtagaagaaacagaagggaattctttcaaacttgagggacgtgtggctggttcccaacctataactgttgcctggtacaaaaataatatagagatacaaccaacttctaactgtgaaataacattcaagaacaacacgttagtgctgcaagtcaggaaagcaggcatgaacgacgctggtttgtacacatgcaaagtgtccaatgatgcaggctctgctctgtgcacgtcttcaatcgtcatcaaagaacctaagaagccacctgtatttgatcagcaccttactccagtaacagtgagtgaaggagaatacgtgcagctcagctgccatgtccagggatctgagccaattaggatccagtggttgaaggctggcagggaaataaagccttcagacagatgcagcttcagctttgctagtgggacagctgtactggaactcagagatgtggctaaagcagattcgggagattatgtgtgtaaagcttcaaatgtggctggaagtgacactaccaaatcaaaagtgaccattaaagacaaaccagctgtggccccagcaaccaagaaagctgcggtagatggaagactcttttttgtgtcagaacctcagagtatcagagtcgtagaaaaaaccactgcgaccttcattgcaaaagttggaggtgacccaatcccaaatgttaaatggacaaaagggaagtggagacagctgaaccaaggaggtcgtgttttcatccaccaaaaaggcgatgaagcaaaactggagattagggacaccacaaaaactgattctgggttataccgatgcgtggcatttaacgaacatggtgaaattgaaagtaatgttaacttacaggtggatgaaaggaagaaacaagagaaaattgaaggcgatcttagagcaatgctgaaaaagactccaatcttaaagaaaggagctggagaagaagaggaaattgatatcatggaacttctcaaaaatgttgatcctaaagaatatgaaaaatatgcccgcatgtatggaatcactgacttccgaggtcttcttcaagcatttgaactgctcaagcaaagccaagaagaagagacacatagactggaaattgaggaaatagagaggtcagagagggacgaaaaggaatttgaggaacttgtatcatttattcagcaaagactgtcacagacagagcctgtcactctgatcaaggacattgaaaatcagacagttttgaaagataatgatgctgtctttgaaattgacattaaaattaattatccagaaatcaagctttcgtggtacaaaggaactgaaaaactggaacccagtgataaatttgaaataagcattgatggtgaccgacatacactcagagtcaaaaactgtcaacttaaagaccagggcaattatcgattggtttgtggtccacacatcgctagcgctaaactaactgtaattgagcctgcatgggaacggcatcttcaggatgtgactctgaaagaaggccagacttgcaccatgacatgccaattttctgtaccaaatgtaaaatctgaatggttcagaaatggcagaatccttaaaccccaaggtagacataaaacagaagtggaacacaaagtccataaattgaccattgcagatgttcgagcagaagaccagggtcagtacacctgcaaatatgaagaccttgaaacttcagcagaactcagaatcgaagctgaaccaattcagtttacaaagcgcatacagaacatcgtggtgagtgagcatcagtctgccacctttgagtgtgaagtgtcctttgatgatgccattgtaacatggtacaaaggaccaacagaactgacagagagccagaaatacaacttcaggaatgatggccgctgccattatatgaccatccacaatgtgaccccagacgatgaaggtgtctactcggtcatcgctcggctggagccaagaggtgaagcaagaagcacggcagagctgtacctaacgacgaaagaaatcaaacttgagctgaagcctcctgatattcctgactccagagttccaatcccaaccatgcctatcagagcagtgccaccagaagaaatccctcctgtggttgctcctcctatcccccttttgctaccaacacccgaagaaaagaaaccaccaccaaaacgtattgaagttaccaaaaaggctgtgaagaaagatgccaaaaaagttgttgcaaagcccaaagagatgacaccacgtgaagagattgtcaagaagcctccacctcctactaccttaattccagcaaaagctcctgaaatcattgatgtatcctctaaagctgaagaagtaaaaataatgactataaccagaaagaaagaggttcagaaagaaaaagaagctgtgtatgagaaaaagcaagcagtccacaaggagaagagagtcttcattgaatctttcgaagaaccttatgacgaactggaggtagaaccatacacagagccatttgaacaaccttattatgaagaaccagatgaagactatgaagagattaaggtagaagctaaaaaagaagttcacgaggaatgggaagaagattttgaagaagggcaagaatactatgaaagggaagaaggctatgacgaaggggaggaagagtgggaagaggcttaccaagaaagggaagtaattcaagttcaaaaggaggtctatgaagaatcacatgagagaaaagttccagccaaagtacctgaaaagaaagcaccaccacctcctaaagttataaagaagccagtaattgaaaaaattgaaaagacttctcgaagaatggaggaagaaaaagttcaagtcaccaaagtacctgaagtttcaaagaagattgttccacaaaaaccttcccggactccagtacaggaagaagttattgaagtgaaagtaccagctgtgcatacaaagaagatggttatttcagaagaaaagatgttctttgcttctcacacagaggaggaggtgtcagtcacagtccccgaggtacaaaaggaaattgttactgaagagaaaattcacgttgccatttccaaaagggttgaaccaccacctaaagtccctgagctacctgagaaaccagctccagaagaagtggcccctgttcctatccctaaaaaagtggagcccccagcaccaaaagttcctgaggttcccaagaaacccgtgccagaggagaaaaagccagttcctgtgcctaagaaggaacctgctgctcccccaaaagtcccagaggtgccaaagaaacctgtccctgaagaaaagattcccgttcctgttgcaaagaaaaaggaagctcccccagctaaagttcctgaagtacagaagggagttgtgacagaagaaaaaataaccattgtaactcaaagagaggaatctccaccaccagcagtgccagaaataccaaagaagaaagttcctgaagaaaggaaacctgttcctcggaaggaggaagaagttccaccaccaccaaaagtgccagctctgcctaagaaacccgtcccagaggagaaagttgcagtgccagttcctgtcgctaagaaagctcctcctccccgagctgaagtctctaagaaaactgttgtagaagaaaagagatttgttgctgaagaaaaactatccttcgcagttcctcaaagagtggaagtcacgcggcacgaagtatctgcagaggaggaatggagttactcagaagaggaggaaggtgtgtccatttcagtttatagagaagaagaaagagaggaggaggaagaagcagaggttacagaatatgaagtgatggaagagcctgaggaatatgttgtggaagaaaagctgcacattatttctaagagagtggaagctgagccagctgaagtgacagagaggcaggagaagaaaattgtactgaaaccaaaaattcctgctaaaatagaggagcctccaccggctaaagttcctgaagcacctaagaaaattgtgccagaaaagaaagttcctgctccagttcctaaaaaggaaaaggtgcccccacctaaagtgccagaagagccaaagaaaccagttccagaaaaaaaggttcctccaaaagtcattaagatggaagaacctctcccagccaaagtgactgagaggcacatgcaaattacccaggaagaaaaagttcttgttgctgtaactaaaaaagaggcgcctccaaaagcaagagtgccagaggaaccgaagagagctgtcccagaagaaaaagttctgaaactcaaacctaaaagagaggaggaaccaccagctaaagtgactgaattcagaaaaagagtggttaaagaagaaaaagtatcaattgaagctccaaaaagagaacctcaacccatcaaagaagtaactataatggaagagaaagaaagggcttataccctagaagaagaagctgtttcagtacaacgggaagaagaatatgaggaatatgaagaatatgattataaagaatttgaggagtatgaaccaacagaagaatatgaccaatatgaagaatacgaggagcgggagtatgaacgatatgaagagcatgaagaatacatcacagaaccagagaagcctatccctgtaaagcctgtcccagaagaaccagttcccacaaaaccaaaggccccaccggctaaagtgctgaagaaagctgtccctgaagaaaaagtaccagtgcccattcctaagaaactcaaacctccaccacccaaagtgcctgaagaaccaaagaaagtttttgaggaaaaaatacgtatttcaattaccaaacgtgaaaaagagcaggtgactgaacccgctgctaaagtgcccatgaagcccaagagggttgtcgcagaagaaaaagtacctgtccctagaaaagaagtagcaccacctgttagagtgccagaagtgcctaaagaacttgaaccagaagaggttgcctttgaagaggaagttgtaacccatgtagaagaatatcttgtagaagaagaagaagagtacattcatgaagaagaggagttcataactgaggaagaagtggtgccagtgataccagtcaaagtgcctgaggtacccaggaaacctgttccagaagagaagaaacctgttcctgttcccaagaagaaggaagctccaccggcaaaagtgcctgaggttcctaagaagccagaggagaaagttcctgtgcttattcctaaaaaggagaagcctccgccagcaaaagttcctgaagtgcccaagaaacctgtgccagaggagaaagtaccagtaccagttcctaaaaaggtggaagctccacctgccaaagtgccagaggtacccaagaagcctgtgcctgagaagaaggtgccagttcctgctcctaagaaagtggaggctccacctgcaaaagtgccagaggtgcccaagaagctcatcccagaagaaaagaaaccaacacctgttccgaaaaaagtggaagcaccaccacccaaagtgccaaagaaacgtgaaccagttccagttcctgtagctctacctcaggaagaggaagttctatttgaagaagaaattgttcctgaagaggaagttctacctgaggaagaggaagttctacctgaggaagaggaagttctacctgaagaagaggaagttctacctgaagaagaggaaattccacctgaggaagaggaagttcctcccgaagaagaatatgtacctgaggaagaagaatttgtacctgaagaagaagtccttccagaagttaaacctaaggtgccagtacctgcaccagtgcctgaaattaagaagaaagtgacagagaagaaagtggtcattcccaagaaagaggaggctccccctgccaaagttcctgaggtgcctaagaaggtggaagaaaaacgaatcattctccctaaagaagaggaagttctaccagttgaagtgactgaggagcctgaagaagagcctatttcagaagaagaaatcccagaagaaccacctagcatagaggaagttgaagaggtggcaccacctagagtgcctgaagtgattaagaaagcagtacctgaagcacctactcctgttcctaaaaaagtggaggcaccaccagctaaagtgtcaaagaaaattcctgaggaaaaagtacctgttcctgttcagaaaaaagaggcacccccagccaaagtgcctgaagtaccaaagaaagtcccagaaaagaaagtccttgtgcctaaaaaggaagctgttcccccagctaaagggagaactgtccttgaagaaaaagtatcagttgccttccgccaagaagtagtagtaaaagaaagactagaattagaagtagtagaagcagaagtggaagaaattccggaagaagaagagttccatgaagttgaagaatattttgaagaaggcgagtttcatgaagtagaagaattcatcaaattagaacaacatagagttgaagaagaacacagagttgaaaaagttcatagggtaatagaagtttttgaggctgaagaagtggaagtatttgaaaaaccaaaagctccacctaaagggcctgagatatctgagaaaatcatccctccaaaaaaaccgcccactaaagttgttcctcgaaaagagccaccagctaaagtaccggaggtgcctaagaaaattgtggtagaagaaaaagtacgtgttcctgaagagcccagagttccaccaactaaagtgcctgaagtgctgccaccgaaggaagtggtcccagaaaagaaagtaccggtgcctcctgccaaaaagccagaagctccacctcctaaagtgcctgaggctcccaaagaagttgttcctgaaaagaaagtgccagtgcctcctcctaaaaagcctgaagtgccacccacaaaagtcccagaggtgccaaaggcagctgtcccagaaaagaaggtgcctgaagctattcctcccaaaccggaaagtcctccccctgaagtgccagaggctccgaaagaagttgttcctgaaaagaaagtgccagcggctcctcctaaaaagcctgaagtcacacctgttaaagtgcctgaggctcccaaagaagttgttcctgaaaagaaagtgccagtgcctcctcctaaaaagcctgaagtgccacccacaaaagtcccagaggtgccaaaggtagctgtcccagaaaagaaggtgcctgaagctattcctcccaaaccggaaagtcctccccctgaagtgttcgaggagcctgaggaagttgccctagaagagcctcctgctgaagttgtggaagagccagagccagcggcgcctccacaagtgaccgtaccacctaagaaacctgtcccagaaaagaaagcacctgctgtcgttgccaaaaaacctgaactaccaccagtgaaagtgcccgaggtgcccaaggaggttgttcctgaaaagaaggtgcctctggtggttcccaaaaagccagaagccccacctgctaaagtgcctgaagttccaaaagaagttgttccagaaaagaaagtagctgttcccaaaaagccagaagtcccaccagcaaaagtgccagaagtgccaaagaaacctgtcttggaagagaaaccagctgttcctgttccagaaagagcggagtctcctcccccagaagtatatgaagaacctgaggaaattgctcctgaagaggaaattgctcctgaagaggaaaagccagttcctgttgcagaagaggaggaaccagaggttccacctccagcagtgcctgaagagcccaagaa

SEQ ID NO: 1837 - DNA, 2187 bp, Homo sapiens; identical to SEQ ID NO: 1507

SEQ ID NO: 1838 - DNA, 2428 bp, Homo sapiens; identical to SEQ ID NO: 567

SEQ ID NO: 1839 - DNA, 4057 bp, Homo sapiens; identical to SEQ ID NO: 534

SEQ ID NO: 1840 - DNA, 2232 bp, Homo sapiens; identical to SEQ ID NO: 540

SEQ ID NO: 1841 - DNA, 2120 bp, Homo sapiens; identical to SEQ ID NO: 588

SEQ ID NO: 1842 - DNA, 2402 bp, Homo sapiens; identical to SEQ ID NO: 651

SEQ ID NO: 1843 - DNA, 831 bp, Homo sapiens; identical to SEQ ID NO: 657

SEQ ID NO: 1844 - DNA, 708 bp, Homo sapiens; identical to SEQ ID NO: 1508

SEQ ID NO: 1845 - DNA, 5426 bp, Homo sapiens; identical to SEQ ID NO: 1490

SEQ ID NO: 1846 - DNA, 4633 bp, Homo sapiens; identical to SEQ ID NO: 611

SEQ ID NO: 1847 - DNA, 2209 bp, Homo sapiens; identical to SEQ ID NO: 637

SEQ ID NO: 1848 - DNA, 10640 bp, Homo sapiens; identical to SEQ ID NO: 581

SEQ ID NO: 1849 - DNA, 6584 bp, Homo sapiens; identical to SEQ ID NO: 562

SEQ ID NO: 1850 - DNA, 2445 bp, Homo sapiens
gcttcatgaatgcacacagtcacgtcgcagaagtgcccacccagcttctgcccattgagggtctcaagcagagagcgtgagaagttctgcagatgtatgtggcgcacagcctctacagccgccgactccgactcctcttcaggcaccaggcctggccgtggccgccttctcaccgactccaaggcagcacttccgggcgcttctctttatttttatacagttttattgagatataatttacatgctatccagcccatctatttcaagtgtaccatgcaaggggtttgtatatattcacagagttgtgtatccatcaccatcgttttagaacattcatcactccagaagaaactacctacccatcagcagccactgcccatttccctgatctgccccgccctaggaaatccgtaatcactttcagtctatggatttgcctattctagaccattcatataaatgaagtcacacaacactgggtcttatgtgactggcttctatcaaagtttgcaaggttcatttatgttcatgggctgaccccacattggacaccgctgcatccatgtccatcacacaacacagctgccgtttcttctgcctgcttatgggaaagtcccctcttctcctccgttttcttctcttcctgccctatcacaccgtgcacttctccctttccttaaagaaccaccatcaactttaggaggagggaaaggggtggctctggcaggaaaagccagaatcccctctagccagcagagagagagaggaatggctgcatgttttctcccccagtccaaggcactgggtcttggctgggttgaaggttccaagctgctctcctgctgtgtcggtgagttctggtcaacctgcaacctcctgatatggccattgcagttcatcgagtcttcagggactccccatggcctggagtactttgccttgcttacacgggagaggagaatggatttatagagaacatcatctaaatccaacttgaccattgtgtggccacacttgctagattgctatagtctaaatctagcattgtagaaagacgggggagcttggagctgcacaaacccaggtctggaactggctccttaccttggaaggtgaatgatcctgccaggactcttagcctccctgggtctcaatttctttatctgtttcatgggaatgaggatctctgctgggtggttgggtgatgtgggggctgtgtgaaaacagcttgtcaatacaagccaaaatagaaatatttctccacagagtatgaaggtcaaatgagagaatacatttaaattaaatggaaaattaaaatggtaaaaaatgcaaagctgtattgaaagttccgagcttctctataaggagctttttgactatgtaagaatcctgtactcgttccccctaaatataaaaaaaaagttgaaggaggcagaagggagagtgatgcacgatgggcaaggacttcacctgctgttgctggctttgaggatggaggaaggaggccacaaacctagaagctggagcccctagaagctagaaaaggcagggacccgattctttccttgagcctccagaagggacacagccccgccagcaccttgactttagcctggtgagatcctcttaggacttttggcaatcagaactataagacagaaatggaagccactgagtctgtagctgtttgttgcagcagcaatagaaaactaatgcagggcccaagaaatcactggtgatgagatcgggaaagtgggctcaggaggtctggatctgtgatgagatggggaaagtgggctcaagaggtctggatctgtggtgagatgggggaagtgggctcaggaggtctggatctgtgatgagatggggaaagtgggctcaggaggtctggatctgtgatgagatggggaaagtgggctcaggaggtctggatctgtgatgagatgggggaagtgggctcaggaggtctggatctgtgatgagatgggggaagtgggctcaggaggtctggatctgtgatgagatgggggaagtgggctcaggaggtctggatctgtgatgagatggggaaagtgggctcaggaggtctggatctgtgatgagatgggggaagtgggctcaggaggtctggatctgtgatgagatggggaaagtgggctcaggaggtctggatctgtgatgagatcgggaaagtgggctcaagaggtctggatctgtggtgagatgggggaagtgggctcaggaggtctggatctgtgatgagatggggaaagtgggctcaggaggtctggatctgtgatgagatgggggaagtgggctcaggaggtctggatctggggtggggatctggagtggaaggggaattcatttgttcattgtctatccttttgtattgattgaattttttatatatatatgtgaattttcacaataaaatttttttcc

SEQ ID NO: 1851 - DNA, 1718 bp, Homo sapiens; identical to SEQ ID NO: 589

SEQ ID NO: 1852 - DNA, 3582 bp, Homo sapiens; identical to SEQ ID NO: 543

SEQ ID NO: 1853 - DNA, 4821 bp, Homo sapiens; identical to SEQ ID NO: 550

SEQ ID NO: 1854 - DNA, 5542 bp, Homo sapiens; identical to SEQ ID NO: 673

SEQ ID NO: 1855 - DNA, 1256 bp, Homo sapiens; identical to SEQ ID NO: 696

SEQ ID NO: 1856 - DNA, 14121 bp, Homo sapiens; identical to SEQ ID NO: 587

SEQ ID NO: 1857 - DNA, 694 bp, Homo sapiens
gcctccgaggagaccatggcctggcccctgtgcaccctgctgctcctgctggccacccaggctgtggccctggcctggagcccccaggaggaggacaggataatcgagggtggcatctatgatgcagacctcaatgatgagcgggtacagcgtgcccttcactttgtcatcagcgagtataacaaggccactgaagatgagtactacagacgcctgctgcgggtgctacgagccagggagcagatcgtgggcggggtgaattacttcttcgacatagaggtgggccgaaccatatgtaccaagtcccagcccaacttggacacctgtgccttccatgaacagccagaactgcagaagaaacagttgtgctctttccagatctacgaagttccctgggaggacagaatgtccctggtgaattccaggtgtcaagaagcctagggatctgtgccagggagtcacactgaccacctcctactcccaccccttgtagtgctcccacccctggactggtggcccccaccctgtgggaggtctccccatgcacctgcagcaggagaagacagagaaggctgcaggaggcctttgttgctcagcaggggactctgccctccctccttccttttgcttctcatagccctggtacatggtacacacacccccacctcctgcaattaaacagtagcatcacctc

SEQ ID NO: 1858 - DNA, 1992 bp, Homo sapiens; identical to SEQ ID NO: 124

SEQ ID NO: 1859 - DNA, 508 bp, Homo sapiens; identical to SEQ ID NO: 608

SEQ ID NO: 1860 - DNA, 2468 bp, Homo sapiens; identical to SEQ ID NO: 578

SEQ ID NO: 1861 - DNA, 1805 bp, Homo sapiens; identical to SEQ ID NO: 583

SEQ ID NO: 1862 - DNA, 6629 bp, Homo sapiens; identical to SEQ ID NO: 531

SEQ ID NO: 1863 - DNA, 3572 bp, Homo sapiens; identical to SEQ ID NO: 1482

SEQ ID NO: 1864 - DNA, 5625 bp, Homo sapiens; identical to SEQ ID NO: 659

SEQ ID NO: 1865 - DNA, 2165 bp, Homo sapiens
gcggccgccccggcggctcctggaaccccggttcgcggcgatgccagccaccccagcgaagccgccgcagttcagtgcttggataatttgaaagtacaatagttggtttccctgtccacccgccccacttcgcttgccatcacagcacgcctatcggatgtgagaggagaagtcccgctgctcgggcactgtctatatacgcctaacacctacatatattttaaaaacattaaatataattaacaatcaaaagaaagaggagaaaggaagggaagcattactgggttactatgcacttgcgactgatttcttggctttttatcattttgaactttatggaatacatcggcagccaaaacgcctcccggggaaggcgccagcgaagaatgcatcctaacgttagtcaaggctgccaaggaggctgtgcaacatgctcagattacaatggatgtttgtcatgtaagcccagactattttttgctctggaaagaattggcatgaagcagattggagtatgtctctcttcatgtccaagtggatattatggaactcgatatccagatataaataagtgtacaaaatgcaaagctgactgtgatacctgtttcaacaaaaatttctgcacaaaatgtaaaagtggattttacttacaccttggaaagtgccttgacaattgcccagaagggttggaagccaacaaccatactatggagtgtgtcagtattgtgcactgtgaggtcagtgaatggaatccttggagtccatgcacgaagaagggaaaaacatgtggcttcaaaagagggactgaaacacgggtccgagaaataatacagcatccttcagcaaagggtaacctgtgtcccccaacaaatgagacaagaaagtgtacagtgcaaaggaagaagtgtcagaagggagaacgaggaaaaaaaggaagggagaggaaaagaaaaaaacctaataaaggagaaagtaaagaagcaatacctgacagcaaaagtctggaatccagcaaagaaatcccagagcaacgagaaaacaaacagcagcagaagaagcgaaaagtccaagataaacagaaatcggtatcagtcagcactgtacactagagggttccatgagattattgtagactcatgatgctgctatctcaaccagatgcccaggacaggtgctctagccattaggaccacaaatggacatgtcagttattgctctgtctaaacaacattcccagtagttgctatattcttcatacaagcatagttaacaacaaagagccaaaagatcaaagaagggatactttcagatggttgtcttgtgtgcttctctgcatttttaaaagacaagacattcttgtacatattatcaataggctataagatgtaacaacgaaatgatgacatctggagaagaaacatcttttccttataaaaatgtgttttcaagctgttgttttaagaagcaaaagatagttctgcaaattcaaagatacagtatcccttcaaaacaaataggagttcagggaagagaaacatccttcaaaggacagtgttgttttgaccgggagatctagagagtgctcagaattagggcctggcatttggaatcacaggatttatcatcacagaaacaactgttttaagattagttccatcactctcatcctgtatttttataagaaacacaagagtgcataccagaattgaatataccatatgggattggagaaagacaaatgtggaagaaatcatagagctggagactacttttgtgctttacaaaactgtgaaggattgtggtcacctggaacaggtctccaatctatgttagcactatgtggctcagcctctgttaccccttggattatatatcaacctgtaaacatgtgcctgtaacttacttccaaaaacaaaatcatacttattagaagaaaattctgattttatagaaaaaaaatagagcaaggagaatataacatgtttgcaaagtcatgtgttttctttctcaatgagggaaaaacaattttattacctgcttaatggtccacctggaactaaaagggatactattttctaacaaggtatatctagtaggggagaaagccaccacaataaatatatttgttaatagtttttcaaaaaaaaaaaaaaaaaaaaaaaaaa

SEQ ID NO: 1866 - DNA, 3870 bp, Homo sapiens
gaggaggccgggcgcgcccggaaaagtggtttgcctgacggcgagaggcagaggtgccctcggtgatagaggaaacatggccgagtatacgcggctgcacaacgccttggcgctaatccgcctccgaaacccgccggtcaacgcgatcagtacgactttactccgtgacataaaagaaggactacagaaagctgtaatagaccatacaataaaagccattgtgatttgtggagcagagggcaaattttctgcaggtgctgatattcgtggcttcagtgctcctaggacatttggccttacactgggacatgtagtagatgaaatacagagaaatgagaagcccgtggtggcagcaatccaaggcatggctttcggagggggactagagctggccctgggctgtcactataggattgcccacgcagaggctcaagttggcttaccagaagttacactgggacttctccctggtgcaagaggaacccagcttctccccagactcactggagttcctgctgcacttgacttaattacctcaggaagacgtattttagcagatgaagcactcaagctgggcattctagataaagttgtaaactcagacccggttgaagaagcaatcagatttgctcagagagtttcagatcaacctctagaatcccgtagactctgcaacaagccaattcagagcttgcccaacatggacagcatttttagtgaggccctcttgaagatgcggaggcagcaccctgggtgtcttgcacaggaggcttgtgtccgtgcagtccaggctgctgtgcagtatccctatgaagtgggcatcaagaaggaggaggagctgtttctatatcttttgcaatcagggcaggctagagccctgcaatatgctttcttcgctgaaaggaaagcaaataagtggtcaactccctccggagcatcgtggaaaacagcatcagcgcggcctgtctcctcagttggtgttgttggcttgggaacaatgggccgaggcattgtcatttcttttgcaagggccaggattcctgtgattgctgtagactcggacaaaaaccagctagcaactgcaaacaagatgataacctctgtcttggaaaaagaagcctccaaaatgcaacagagcggccacccttggtcaggaccaaaacccaggttaacttcatctgtgaaggagcttggtggtgtagatttagtcattgaagcagtatttgaggaaatgagcctgaagaagcaggtctttgctgaactctcagctgtgtgcaaaccagaagcatttttgtgcactaatacttcagccctggatgttgatgagattgcttcttccactgatcgtcctcacttggtcattggcacccacttcttttcgccagctcatgtcatgaagttgttagaggttattcccagccaatactcttcccccactaccattgccactgttatgaacttatcaaaaaagattaaaaagattggagtcgttgtaggcaactgttttggatttgtggggaatcgaatgttgaatccttactacaatcaggcatatttcttgttagaagaaggcagcaaaccagaggaggtagatcaggtgctggaagagtttggttttaaaatgggaccttttagagtgtctgatcttgctgggttggatgtgggctggaaatctagaaaggggcaaggtcttactggacctacattgcttccaggaactcctgcccgaaaaaggggtaataggaggtactgcccaattcctgatgtgctctgtgaattaggacgatttggccagaagacaggtaagggttggtatcaatatgacaagccattgggtaggattcacaaacctgatccctggctttccaaattcctatcacggtatagaaaaacccatcacattgaaccacgtaccattagccaggatgagatccttgaacgctgcttatattcacttatcaatgaagcattccgtatcttgggagaagggatagctgctagcccagagcacattgatgttgtctatttacatggatatggatggccaaggcacaagggcgggcccatgttctatgcttccacagttgggttgcccacagttctagagaaattgcagaaatattacaggcagaaccctgatattccccaactggagccaagtgactatctaaaaaaactggcttctcagggaaaccctcccctgaaagaatggcaaagcttggcaggctcccctagcagtaaattgtgattcagtcttccagattatgcctcacatgctagcatcaggtaatgctgactgaatttcagtgaaattaaatcaaaaatccaaagtaagattgttctgaaatacaaagcaaaataaataatcattagaatcttctgtgtaacgactctaatggtcaaatctttaggaatgtgcttcctatgcctctgaatctgtccttatcagataaattcaatgcatgaacttgtgtgaatataataccataatagctaatgaaagaggctcaggcataagttgagattctcaaatgcttttatcattggataaatgtgtcatcaattaataaatgataaatgcagctaagtcatacattcattttgactcctttcaatgtcacacacatagtattgatcagaaatcttatgaatcatacatacactcaacaaacattaaagttgtaggaaaaagacagttggaaattggtaagggaactgagtacttcaaaccagcacagggaacttaggttagtgtggcaagcctttcctcttctggtctttcctcttctgtttatggagaaataatagaaagtagtaagtcgttaacttagtgtaagaagggtcttagagaacatctaaccttctaggatttcccaattctgtgatagagtaatgacaccagttttcctgtcatgacaagcctctgtgatgttacatatggaaatggttgaatcttgaaaaatctaaaattgttgcaaaacatattttgtatgattttgttgtaagagttcttctctttttactttttgccttgtgtagttaaaaattaaggggctggtcaatacaaaaacttgtacacaaatatttatagcagaattattcataatggccaaaagctgaatacaacccaaatgtctatgaactaatgaatagataaaccaaatctggtatatccatacaatggactatattattcagccataaaaagaaataaagggccaggcacagtggctcacacctgtaatcccagcactttgggaggctgaggcaggaggattgtttgaggccagaaatttgagaccagcctgggcaacatagcaaaaccctgtctctacaaaaaatactttccgtacattagtggttgcctaaggctagaattgggggtgatgaatggggagtacaggattcatctaatgggtacaggatttctttatggttcatgaaaatggtctaaacttattgtggtaatggtcacataacaatatattaaaaaccattgagttgtatattttaagtgggtgaattatatggtatgtgaattatatctcaataaagttgttagtaaataaatggggctgaagatgttatccttcattgtggtgtaaatgaactttcacaatattttcacctgtgaacccaaataaaatgattaaagttctgatggaaaaatcttgaatggagtataagttttccgttgttaaaaagcaaacaaaaaaccaacaaaaaatccaagtgtgccttgaattgtacagagcacaattattatgtttgaaatgtgtactacttaattttatataatttggtttgtgaaattaaagacatcaataaaaatgattcctgaaagtagtaaaaaaaaaaaaaaaaaaaaaa

SEQ ID NO: 1867 - DNA, 3920 bp, Homo sapiens; identical to SEQ ID NO: 609

SEQ ID NO: 1868 - DNA, 3677 bp, Homo sapiens; identical to SEQ ID NO: 576

SEQ ID NO: 1869 - DNA, 897 bp, Homo sapiens; identical to SEQ ID NO: 580

SEQ ID NO: 1870 - DNA, 2018 bp, Homo sapiens
atcagcccaggatctgaccctggactggctcacactcagttgcctctggccagtgcagggctcagccagggatggcttctagctgacagtgggaggaattaattcatctgaccggaatattcttttctcttctgggctgttggtttttcaagtgcaacaaagattccatacagctccaaggaaggagccaagaaaaacattctgtgccaaagtgagatcctggaagtgaaaccccggaataaagctgaaaaacgggctccagttgggtgccaggaaatgcaggactggaatgtgacttgacttccggcagcgcgcaggtgctcccgggtcacctgctttgaggtccagcctcctgccctgcctcaggtgaccacatgaccactgtggactttgccctgaaaccttctgggaggagaagaggcctgaccttggcgctggggtccagtgggcattgctctggtccgaggctgctgctcttgacctctgctctgcggctgttttccattggagtagaggctcctcctgtcctgtcctgcctgtggagggaagcaaaccttcccctggaccagagagaggagaaagcggagacaggtagcaacgctgtggactggtgatgacaggctcttcagctccctgcaagtgaccgggcctggggaacagggcatggcacaggcacacaggaccccccagcccagggctgcccccagccagccccgtgtgttcaagctggttctcctgggaagtggctccgtgggtaagtccagcttggctcttcggtacgtgaagaacgacttcaagagtatcctgcctacggtgggctgtgcgttcttcacaaaggtggtggatgtgggtgccacctctctgaagcttgagatctgggacacagctggccaggagaagtaccacagcgtctgccacctctacttcaggggtgccaacgctgcgcttctggtgtacgacatcaccaggaaggattccttcctcaaggctcagcagtggctgaaggacctggaggaggagctgcacccaggagaagtcctggtgatgctggtgggcaacaagacggacctcagccaggagcgggaggtgaccttccaggaagggaaggagtttgccgacagccagaagttgctgttcatggaaacttcggccaaactgaaccaccaggtgtcggaggtgttcaatacagtggcccaagagctactgcagagaagcgacgaggagggccaggctctacggggggatgcagctgtggctctgaacaaggggcccgcgaggcaggccaaatgctgcgcccactaggtgcagccactcctgggggctgtggggaagacaccccctgcctgggccatggccagctctaggtggattctgattcactgtcaatgctgggttgctcccgagccctagatgttcctggaagttggccccctttatgaaaaccacttcccacagccagtgggaactgccagaggaagatctggcgtcacatggctcccaggaaagtgctgtgccctatccccactgataccatctgattccccgatgcctgtgcctgttccacctggacggtggccccctcagcctggcagcctctggacagagaggaaggaaggattggaaaagtccccgcagcacagcgacggtgggaagatgccttacgtctgatcttgatgggggcactggcctggagcctgggcccacctgcttctggggggttggggagcaggccagatggaggtggtggtgccaggaagaaatggagcgatgactgactgtggggtgggcccaggatttccacatcttggtgaagttgcccctgggaagggcagctgggggcagtggcgccagttcccttccatggtctcccggctggcaatgtggtgaagctgagtttctgtccaatgagcaggaagattctgagacatttcgcctgagatataagttgtactgcgtatgcagtttttcctccaaaaattaaattgcttttgacaatctgaaaaaaaaaaaaaaaaaaa

SEQ ID NO: 1871 - DNA, 1600 bp, Homo sapiens; identical to SEQ ID NO: 121

SEQ ID NO: 1872 - DNA, 705 bp, Homo sapiens; identical to SEQ ID NO: 614

SEQ ID NO: 1873 - DNA, 2180 bp, Homo sapiens; identical to SEQ ID NO: 533

SEQ ID NO: 1874 - DNA, 2775 bp, Homo sapiens; identical to SEQ ID NO: 556

SEQ ID NO: 1875 - DNA, 897 bp, Homo sapiens; identical to SEQ ID NO: 580

SEQ ID NO: 1876 - DNA, 2350 bp, Homo sapiens; identical to SEQ ID NO: 635

SEQ ID NO: 1877 - DNA, 2096 bp, Homo sapiens; identical to SEQ ID NO: 623

SEQ ID NO: 1878 - DNA, 2207 bp, Homo sapiens; identical to SEQ ID NO: 566

SEQ ID NO: 1879 - DNA, 3419 bp, Homo sapiens
ttggaggcggccggcgcaggggccgcgagaggcttcgtcgccgctgcagctccgggggctcccaggggagcgtgcgcggaacctccaggcccagcaggaccccggctgcggcgaggaggaaggagccagcctagcagcttctgcgcctgtggccgcgggtgtcctggaggcctctcggtgtgacgagtgggggacccgaaggctcgtgcgccacctccaggcctggacgctgccctccgtcttctgcccccaataggtgcgccggaccttcaggccctggggtgaattcagctgctcctacatcagcttccggaaccaccaaaaattcaaattgggattttccggagtaaacaagagcctagagccctttgctcaatgctggatttaatacgtatatatttttaagcgagttggttttttcccctttgatttttgatcttcgcgacagttcctcccacgcatattatcgttgttgccgtcgttttctctccccgcgtggctccttgacctgcgagggagagagaggacaccgaagccgggagctcgcagggaccatgtatcagagcttggccatggccgccaaccacgggccgccccccggtgcctacgaggcgggcggccccggcgccttcatgcacggcgcgggcgccgcgtcctcgccagtctacgtgcccacaccgcgggtgccctcctccgtgctgggcctgtcctacctccagggcggaggcgcgggctctgcgtccggaggcgcctcgggcggcagctccggtggggccgcgtctggtgcggggcccgggacccagcagggcagcccgggatggagccaggcgggagccgacggagccgcttacaccccgccgccggtgtcgccgcgcttctccttcccggggaccaccgggtccctggcggccgccgccgccgctgccgcggcccgggaagctgcggcctacagcagtggcggcggagcggcgggtgcgggcctggcgggccgcgagcagtacgggcgcgccggcttcgcgggctcctactccagcccctacccggcttacatggccgacgtgggcgcgtcctgggccgcagccgccgccgcctccgccggccccttcgacagcccggtcctgcacagcctgcccggccgggccaacccggccgcccgacaccccaatctcgatatgtttgacgacttctcagaaggcagagagtgtgtcaactgtggggctatgtccaccccgctctggaggcgagatgggacgggtcactatctgtgcaacgcctgcggcctctaccacaagatgaacggcatcaaccggccgctcatcaagcctcagcgccggctgtccgcctcccgccgagtgggcctctcctgtgccaactgccagaccaccaccaccacgctgtggcgccgcaatgcggagggcgagcctgtgtgcaatgcctgcggcctctacatgaagctccacggggtccccaggcctcttgcaatgcggaaagaggggatccaaaccagaaaacggaagcccaagaacctgaataaatctaagacaccagcagctccttcaggcagtgagagccttcctcccgccagcggtgcttccagcaactccagcaacgccaccaccagcagcagcgaggagatgcgtcccatcaagacggagcctggcctgtcatctcactacgggcacagcagctccgtgtcccagacgttctcagtcagtgcgatgtctggccatgggccctccatccaccctgtcctctcggccctgaagctctccccacaaggctatgcgtctcccgtcagccagtctccacagaccagctccaagcaggactcttggaacagcctggtcttggccgacagtcacggggacataatcactgcgtaatcttccctcttccctcctcaaattcctgcacggacctgggacttggaggatagcaaagaaggaggccctgggctcccaggggccggcctcctctgcctggtaatgactccagaacaacaactgggaagaaacttgaagtcgacaatctggttaggggaagcgggtgttggattttctcagatgcctttacacgctgatgggactggagggagcccacccttcagcacgagcacactgcatctctcctgtgagttggagacttctttcccaagatgtccttgtcccctgcgttccccactgtggcctagaccgtgggttttgcattgtgtttctagcaccgaggatctgagaacaagcggagggccgggccctgggacccctgctccagcccgaatgacggcatctgtttgccatgtacctggatgcgacgggcccctggggacaggcccttgccccatccatccgcttgaggcatggcaccgccctgcatccctaataccaaatctgactccaaaattgtggggtgtgacatacaagtgactgaacacttcctggggagctacaggggcacttaacccaccacagcacagcctcatcaaaatgcagctggcaacttctcccccaggtgccttccccctgctgccggcctttgctccttcacttccaacatctctcaaaataaaaatccctcttcccgctctgagcgattcagctctgcccgcagcttgtacatgtctctcccctggcaaaacaagagctgggtagtttagccaaacggcaccccctcgagttcactgcagacccttcgttcaccgtgtcacacatagaggggttctgagtaagaacaaaacgttctgctgctcaagccagtctggcaagcactcagcccagcctcgaggtccttctggggagagtgtaagtggacagagtcctggtcagggggcaggagtgtcccaagggctggcccacctgctgtctgtctgctcctcctagcccttggtcagatggcagccagagtccctcaggacctgcagcctcgccccggcagaagtcttttgtccaggaggcaaaaagccagagattctgcaacacgaattcgaagcaaacaaacacaacacaacagaattcctggaaagaagacgactgctaagacacggcaggggggcctggagggagcctccgactctgagctgctccgggatctgccgcgttctcctctgcacattgctgtttctgcccctgatgctggagctcaaggagactccttcctctttctcagcagagctgtagctgactgtggcattactacgcctccccacacgcccagacccctcactccaaaatcctactggctgtagcagagaatacctttgaaccaagattctgttttaatcatcatttacattgttttcttccaaaggccccctcgtataccctccctaacccacaaacctgttaacattgtcttaaggtgaaatggctggaaaatcagtatttaactaataaatttatctgtattcctcttaaaaaaaaaaa

SEQ ID NO: 1880 - DNA, 2600 bp, Homo sapiens
aaatccgagcctcgcgtgggctcctggcccccgacggacaccaccaggcccacggagcccaccatgccgcgcccggcccccgcgcgccgcctcccgggactcctcctgctgctctggccgctgctgctgctgccctccgccgcccccgaccccgtggcccgcccgggcttccggaggctggagacccgaggtcccgggggcagccctggacgccgcccctctcctgcggctcccgacggcgcgcccgcttccgggaccagcgagcctggccgcgcccgcggtgcaggtgtttgcaagagcagacccttggacctggtgtttatcattgatagttctcgtagcgtacggcccctggaattcaccaaagtgaaaacttttgtctcccggataatcgacactctggacattgggccagccgacacgcgggtggcagtggtgaactatgctagcactgtgaagatcgagttccaactccaggcctacacagataagcagtccctgaagcaggccgtgggtcgaatcacacccttgtcaacaggcaccatgtcaggcctagccatccagacagcaatggacgaagccttcacagtggaggcaggggctcgagagccctcttctaacatccctaaggtggccatcattgttacagatgggaggccccaggaccaggtgaatgaggtggcggctcgggcccaagcatctggtattgagctctatgctgtgggcgtggaccgggcagacatggcgtccctcaagatgatggccagtgagcccctagaggagcatgttttctacgtggagacctatggggtcattgagaaactttcctctagattccaggaaaccttctgtgcgctggacccctgtgtgcttggaacacaccagtgccagcacgtctgcatcagtgatggggaaggcaagcaccactgtgagtgtagccaaggatacaccttgaatgccgacaagaaaacgtgttcagctcttgataggtgtgctcttaacacccacggatgtgagcacatctgtgtgaatgacagaagtggctcttatcattgtgagtgctatgaaggttataccttgaatgaagacaggaaaacttgttcagctcaagataaatgtgctttgggtacccatgggtgtcagcacatttgtgtgaatgacagaacagggtcccatcattgtgaatgctatgagggctacactctgaatgcagataaaaaaacatgttcagtccgtgacaagtgtgccctaggctctcatggttgccagcacatttgtgtgagtgatggggccgcatcctaccactgtgattgctatcctggctacaccttaaatgaggacaagaaaacatgttcagccactgaggaagcacgaagacttgtttccactgaagatgcttgtggatgtgaagctacactggcattccaggacaaggtcagctcgtatcttcaaagactgaacactaaacttgatgacattttggagaagttgaaaataaatgaatatggacaaatacatcgttaaattgctccaatttctcacctgaaaatgtggacagcttggtgtacttaatactcatgcattcttttgcacacctgttattgccaatgttcctgctaataatttgccattatctgtattaatgcttgaatattactggataaattgtatgaagatcttctgcagaatcagcatgattcttccaaggaaatacatatgcagatacttattaagagcaaactttagtgtctctaagttatgactgtgaaatgattggtaggaaatagaatgaaaagtttagtgtttctttatctactaattgagccatttaatttttaaatgtttatattagataaccatattcacaatggaaactttaggtctagtttcttttgatagtatttataatataaatcaatcttattactgagagtgcaaattgtacaaggtatttacacatacaacttcatataactgagatgaatgtaattttgaactgtttaacactttttgttttttgcttattttgttggagtattattgaagatgtgatcaatagattgtaatacacatatctaaaaatagttaacacagatcaagtgaacattacattgccatttttaattcattctggtctttgaaagaaatgtactactaaagagcactagttgtgaatttagggtgttaaactttttaccaagtacaaaaatcccaaattcactttattattttgcttcaggatccaagtgacaaagttatatatttataaaattgctataaatcgacaaaatctaatgttgtctttttaatgttagtgatccacctgcctcagcctcccaaagtgctgggattacaggcttgaaagtctaacttttttttacttatatatttgatacatataattcttttggctttgaaacttgcaactttgagaacaaaacagtcctttaaattttgcactgctcaattctgtttttcgtttgcattgtctttaatataataaaagttattacctttacatattatcatgtctatttttgatgactcatcaattttgtctattaaagatatttctttaaattaaaaaaaaaaaaaaaaaa

SEQ ID NO: 1881 - DNA, 1379 bp, Homo sapiens; identical to SEQ ID NO: 572

SEQ ID NO: 1882 - DNA, 2989 bp, Homo sapiens; identical to SEQ ID NO: 595

SEQ ID NO: 1883 - DNA, 4072 bp, Homo sapiens; identical to SEQ ID NO: 628

SEQ ID NO: 1884 - DNA, 2867 bp, Homo sapiens; identical to SEQ ID NO: 603

SEQ ID NO: 1885 - DNA, 2370 bp, Homo sapiens; identical to SEQ ID NO: 563

SEQ ID NO: 1886 - DNA, 1374 bp, Homo sapiens; identical to SEQ ID NO: 542

SEQ ID NO: 1887 - DNA, 2259 bp, Homo sapiens
cgataaagcccccgccgccgcggcagccagcttgcgctgtggggctgcccgggctgcgcggcgtctgcaggcgccaccgctgcctctttccggctgtgaccctcctcgccgccgccgcttggctgcgtcctccgactccccgcgccgccgagaccaggctcccgctccggttgcggccgcaccgccctccgcggccgccccctggggatccagcgagcgcggtcgtccttggtggaaggaaccatgaactggcatctccccctcttcctcttggcctctgtgacgctgccttccatctgctcccacttcaatcctctgtctctcgaggaactaggctccaacacggggatccaggttttcaatcagattgtgaagtcgaggcctcatgacaacatcgtgatctctccccatgggattgcgtcggtcctggggatgcttcagctgggggcggacggcaggaccaagaagcagctcgccatggtgatgagatacggcgtaaatggagttggtaaaatattaaagaagatcaacaaggccatcgtctccaagaagaataaagacattgtgacagtggctaacgccgtgtttgttaagaatgcctctgaaattgaagtgccttttgttacaaggaacaaagatgtgttccagtgtgaggtccggaatgtgaactttgaggatccagcctctgcctgtgattccatcaatgcatgggttaaaaatgaaaccagggatatgattgacaatctgctgtccccagatcttattgatggtgtgctcaccagactggtcctcgtcaacgcagtgtatttcaagggtctgtggaaatcacggttccaacccgagaacacaaagaaacgcactttcgtggcagccgacgggaaatcctatcaagtgccaatgctggcccagctctccgtgttccggtgtgggtcgacaagtgcccccaatgatttatggtacaacttcattgaactgccctaccacggggaaagcatcagcatgctgattgcactgccgactgagagctccactccgctgtctgccatcatcccacacatcagcaccaagaccatagacagctggatgagcatcatggtgcccaagagggtgcaggtgatcctgcccaagttcacagctgtagcacaaacagatttgaaggagccgctgaaagttcttggcattactgacatgtttgattcatcaaaggcaaattttgcaaaaataacaacagggtcagaaaacctccatgtttctcatatcttgcaaaaagcaaaaattgaagtcagtgaagatggaaccaaagcttcagcagcaacaactgcaattctcattgcaagatcatcgcctccctggtttatagtagacagaccttttctgtttttcatccgacataatcctacaggtgctgtgttattcatggggcagataaacaaaccctgaagagtatacaaaagaaaccatgcaaagcaacgactactttgctacgaagaaagactcctttcctgcatctttcatagttctgttaaatatttttgtacatcgcttctttttcaaaactagttcttaggaacagactcgatgcaagtgtttctgttctgggaggtattggagggaaaaaacaagcaggatggctggaacactgtactgaggaatgaatagaaaggcttccagatgtctaaaagattctttaaactactgaactgttacctaggttaacaaccctgttgagtatttgctgtttgtccagttcaggaatttttgttttgttttgtctatatgtgcggcttttcagaagaaatttaatcagtgtgacagaaaaaaaaatgttttatggtagcttttactttttatgaaaaaaaaattatttgccttttaaattcttttcccccatccccctccaaagtcttgatagcaagcgttattttgggggtagaaacggtgaaatctctagcctctttgtgtttttgttgttgttgttgttgttgttttatataatgcatgtattcactaaaataaaatttaaaaaactcctgtcttgctagacaaggttgctgttgtgcagtgtgcctgtcactactggtctgtactccttggatttgcatttttgtattttgtacaaagtaaaaataaactgttatgagtagtaaaaataaagctatttctctgctatttgaaaatacaatagaagaaactgagccttttagacattcgtcagcctcttctaataaacctttgtactatgtaaacatcaggaaattc

SEQ ID NO: 1888 - DNA, 5882 bp, Homo sapiens; identical to SEQ ID NO: 672

SEQ ID NO: 1889 - DNA, 5180 bp, Homo sapiens; identical to SEQ ID NO: 594

SEQ ID NO: 1890 - DNA, 1412 bp, Homo sapiens
caggggttcgagacaagcctgaccaagatggagaaaccccgtctctaccaaaaatacaaaattagccgggtgtggtggcgtctgcctgtaatcccagctactcgggaagcggaggacaatcgcttgaacccagaaggcagaggttgtggtgagccgagatctcgccattgcactccagcctggacaacaacagcgaaacttcatctcaaaacaataataagtttacaacctctgaatatgtaccaaatggagccaggggtggggagtattaggacaagccccgcactgcagagccccccagctctcactcgtggaccaagtgcatgggacacagccattcggaaagctctttcttttggagtgggtctgggtgttctggttttggtttgcttgttttatcattttgtgacattggcgcctattcttcagtttgcatccctgccttgcttgcttgaagctggagcacaaatgtcccgtcaccctgtaacaacacaagtatgcgtcatgcctgcgaggcttagcttgggaagtggaatctccaggaatctccttcggttgtctgtctgccactttacactgttgctcccatttcggtcactgaggccctgtcccttatcctccagggacatggtgctgtcctatgagctctggctcctttgtgacttttacattgctcctccagatagcagtggcagtggcatttgcaaaaaggctatttgagaacaaataagaaaaaatcatcaaagcgaagatgatagtaaaacagccctcatttttcaaagtccattcttttttctggtccgtgcactgccagctcacttctctggctaaaacccgggggcggcgggggtgtgtgtgggggttagttttgcaaaaagtactgatggcaccgctgtgctccaagttaaccagaacacaagaatcgaaaaagcctgtgagatactggtgctcgtgatcgtaagctccaggtcggggggttttcagatgaacacaaaaagggggctgctcccgtcccaagatgagtgataaatgagtcacttctcatactcgcagtcacactcgctccatttcctctgggatgactgtcttccgtcctaccgctgtggctgctgttatttgcctgataaacttctttccctctccctccctctgacacagaaacacacacacacacacacacagacacacacacacacacagcccgctggatctataagcagtttgtaacaggatgcaccagttctaatcacgtttcaagtcaaatgaaccagtcgcagcttcctaataagtgaatggctgacataaggagttaattcagaagcagctcaatactatggacaatactagtggacaatattagcatactgctcgtacaacaaagataccgtagtctctggtgctgcctcttcagg

SEQ ID NO: 1891 - DNA, 5559 bp, Homo sapiens; identical to SEQ ID NO: 592

SEQ ID NO: 1892 - DNA, 6930 bp, Homo sapiens; identical to SEQ ID NO: 1519

SEQ ID NO: 1893 - DNA, 2632 bp, Homo sapiens; identical to SEQ ID NO: 663

SEQ ID NO: 1894 - DNA, 6549 bp, Homo sapiens
gcttggagccgccgcacccgggacggtgcgtagcgctggaagtccggccttccgagagctagctgtccgccgcggcccccgcacgccgggcagccgtccctcgccgcctcgggcgcgccaccatggggccccggctcagcgtctggctgctgctgctgcccgccgcccttctgctccacgaggagcacagccgggccgctgcgaagggtggctgtgctggctctggctgtggcaaatgtgactgccatggagtgaagggacaaaagggtgaaagaggcctcccggggttacaaggtgtcattgggtttcctggaatgcaaggacctgaggggccacagggaccaccaggacaaaagggtgatactggagaaccaggactacctggaacaaaagggacaagaggacctccgggagcatctggctaccctggaaacccaggacttcccggaattcctggccaagacggcccgccaggccccccaggtattccaggatgcaatggcacaaagggggagagagggccgctcgggcctcctggcttgcctggtttcgctggaaatcccggaccaccaggcttaccagggatgaagggtgatccaggtgagatacttggccatgtgcccgggatgctgttgaaaggtgaaagaggatttcccggaatcccagggactccaggcccaccaggactgccagggcttcaaggtcctgttgggcctccaggatttaccggaccaccaggtcccccaggccctcccggccctccaggtgaaaagggacaaatgggcttaagttttcaaggaccaaaaggtgacaagggtgaccaaggggtcagtgggcctccaggagtaccaggacaagctcaagttcaagaaaaaggagacttcgccaccaagggagaaaagggccaaaaaggtgaacctggatttcaggggatgccaggggtcggagagaaaggtgaacccggaaaaccaggacccagaggcaaacccggaaaagatggtgacaaaggggaaaaagggagtcccggttttcctggtgaacccgggtacccaggactcataggccgccagggcccgcagggagaaaagggtgaagcaggtcctcctggcccacctggaattgttataggcacaggacctttgggagaaaaaggagagaggggctaccctggaactccggggccaagaggagagccaggcccaaaaggtttcccaggactaccaggccaacccggacctccaggcctccctgtacctgggcaggctggtgcccctggcttccctggtgaaagaggagaaaaaggtgaccgaggatttcctggtacatctctgccaggaccaagtggaagagatgggctcccgggtcctcctggttcccctgggccccctgggcagcctggctacacaaatggaattgtggaatgtcagcccggacctccaggtgaccagggtcctcctggaattccagggcagccaggatttataggcgaaattggagagaaaggtcaaaaaggagagagttgcctcatctgtgatatagacggatatcgggggcctcccgggccacagggacccccgggagaaataggtttcccagggcagccaggggccaagggcgacagaggtttgcctggcagagatggtgttgcaggagtgccaggccctcaaggtacaccagggctgataggccagccaggagccaagggggagcctggtgagttttatttcgacttgcggctcaaaggtgacaaaggagacccaggctttccaggacagcccggcatgacagggagagcgggttctcctggaagagatggccatccgggtcttcctggccccaagggctcgccgggttctgtaggattgaaaggagagcgtggcccccctggaggagttggattcccaggcagtcgtggtgacaccggcccccctgggcctccaggatatggtcctgctggtcccattggtgacaaaggacaagcaggctttcctggaggccctggatccccaggcctgccaggtccaaagggtgaaccaggaaaaattgttcctttaccaggcccccctggagcagaaggactgccggggtccccaggcttcccaggtccccaaggagaccgaggctttcccggaaccccaggaaggccaggcctgccaggagagaagggcgctgtgggccagccaggcattggatttccagggccccccggccccaaaggtgttgacggcttacctggagacatggggccaccggggactccaggtcgcccgggatttaatggcttacctgggaacccaggtgtgcagggccagaagggagagcctggagttggtctaccgggactcaaaggtttgccaggtcttcccggcattcctggcacacccggggagaaggggagcattggggtaccaggcgttcctggagaacatggagcgatcggaccccctgggcttcaggggatcagaggtgaaccgggacctcctggattgccaggctccgtggggtctccaggagttccaggaataggcccccctggagctaggggtccccctggaggacagggaccaccggggttgtcaggccctcctggaataaaaggagagaagggtttccccggattccctggactggacatgccgggccctaaaggagataaaggggctcaaggactccctggcataacgggacagtcggggctccctggccttcctggacagcagggggctcctgggattcctgggtttccaggttccaagggagaaatgggcgtcatggggacccccgggcagccgggctcaccaggaccagtgggtgctcctggattaccgggtgaaaaaggggaccatggctttccgggctcctcaggacccaggggagaccctggcttgaaaggtgataagggggatgtcggtctccctggcaagcctggctccatggataaggtggacatgggcagcatgaagggccagaaaggagaccaaggagagaaaggacaaattggaccaattggtgagaagggatcccgaggagaccctgggaccccaggagtgcctggaaaggacgggcaggcaggacagcctgggcagccaggacctaaaggtgatccaggtataagtggaaccccaggtgctccaggacttccgggaccaaaaggatctgttggtggaatgggcttgccaggaacacctggagagaaaggtgtgcctggcatccctggcccacaaggttcacctggcttacctggagacaaaggtgcaaaaggagagaaagggcaggcaggcccacctggcataggcatcccagggctgcgaggtgaaaagggagatcaagggatagcgggtttcccaggaagccctggagagaagggagaaaaaggaagcattgggatcccaggaatgccagggtccccaggccttaaagggtctcccgggagtgttggctatccaggaagtcctgggctacctggagaaaaaggtgacaaaggcctcccaggattggatggcatccctggtgtcaaaggagaagcaggtcttcctgggactcctggccccacaggcccagctggccagaaaggggagccaggcagtgatggaatcccggggtcagcaggagagaagggtgaaccaggtctaccaggaagaggattcccagggtttccaggggccaaaggagacaaaggttcaaagggtgaggtgggtttcccaggattagccgggagcccaggaattcctggatccaaaggagagcaaggattcatgggtcctccggggccccagggacagccggggttaccgggatccccaggccatgccacggaggggcccaaaggagaccgcggacctcagggccagcctggcctgccaggacttccgggacccatggggcctccagggcttcctgggattgatggagttaaaggtgacaaaggaaatccaggctggccaggagcacccggtgtcccagggcccaagggagaccctggattccagggcatgcctggtattggtggctctccaggaatcacaggctctaagggtgatatggggcctccaggagttccaggatttcaaggtccaaaaggtcttcctggcctccagggaattaaaggtgatcaaggcgatcaaggcgtcccgggagctaaaggtctcccgggtcctcctggccccccaggtccttacgacatcatcaaaggggagcccgggctccctggtcctgagggccccccagggctgaaagggcttcagggactgccaggcccgaaaggccagcaaggtgttacaggattggtgggtatacctggacctccaggtattcctgggtttgacggtgcccctggccagaaaggagagatgggacctgccgggcctactggtccaagaggatttccaggtccaccaggccccgatgggttgccaggatccatggggcccccaggcaccccatctgttgatcacggcttccttgtgaccaggcatagtcaaacaatagatgacccacagtgtccttctgggaccaaaattctttaccacgggtactctttgctctacgtgcaaggcaatgaacgggcccatggccaggacttgggcacggccggcagctgcctgcgcaagttcagcacaatgcccttcctgttctgcaatattaacaacgtgtgcaactttgcatcacgaaatgactactcgtactggctgtccacccctgagcccatgcccatgtcaatggcacccatcacgggggaaaacataagaccatttattagtaggtgtgctgtgtgtgaggcgcctgccatggtgatggccgtgcacagccagaccattcagatcccaccgtgccccagcgggtggtcctcgctgtggatcggctactcttttgtgatgcacaccagcgctggtgcagaaggctctggccaagccctggcgtcccccggctcctgcctggaggagtttagaagtgcgccattcatcgagtgtcacggccgtgggacctgcaattactacgcaaacgcttacagcttttggctcgccaccatagagaggagcgagatgttcaagaagcctacgccgtccaccttgaaggcaggggagctgcgcacgcacgtcagccgctgccaagtctgtatgagaagaacataatgaagcctgactcagctaatgtcacaacatggtgctacttcttcttctttttgttaacagcaacgaaccctagaaatatatcctgtgtacctcactgtccaatatgaaaaccgtaaagtgccttataggaatttgcgtaactaacacaccctgcttcattgacctctacttgctgaaggagaaaaagacagcgataagctttcaatagtggcataccaaatggcacttttgatgaaataaaatatcaatattttctgcaatccaatgcactgatgtgtgaagtgagaactccatcagaaaaccaaagggtgctaggaggtgtgggtgccttccatactgtttgcccattttcattcttgtattataattaattttctacccccagagataaatgtttgtttatatcactgtctagctgtttcaaaatttaggtcccttggtctgtacaaataatagcaatgtaaaaatggttttttgaacctccaaatggaattacagactcagtagccatatcttccaaccccccagtataaatttctgtctttctgctatgtgtggtactttgcagctgcttttgcagaaatcacaattttcctgtggaataaagatggtccaaaaatagtcaaaaattaaatatatatatatattagtaatttatatagatgtcagcaattaggcagatcaaggtttagtttaacttccactgttaaaataaagcttacatagttttcttcctttgaaagactgtgctgtcctttaacataggtttttaaagactaggatattgaatgtgaaacatccgttttcattgttcacttctaaaccaaaaattatgtgttgccaaaaccaaacccaggttcatgaatatggtgtctattatagtgaaacatgtactttgagcttattgtttttattctgtattaaatattttcagggttttaaacactaatcacaaactgaatgacttgacttcaaaagcaacaaccttaaaggccgtcatttcattagtattcctcattctgcatcctggcttgaaaaacagctctgttgaatcacagtatcagtattttcacacgtaagcacattcgggccatttccgtggtttctcatgagctgtgttcacagacctcagcagggcatcgcatggaccgcaggagggcagattcggaccactaggcctgaaatgacatttcactaaaagtctccaaaacatttctaagactactaaggccttttatgtaatttctttaaatgtgtatttcttaagaattcaaatttgtaataaaactatttgtataaaaattaagcttttattaatttgttgctagtattgccacagacgcattaaaagaaacttactgcacaagctgctaataaatttgtaagctttgcataccttaaaaaaaaaaaaaaaaaa

SEQ ID NO: 1895 - DNA, 817 bp, Homo sapiens; identical to SEQ ID NO: 642

SEQ ID NO: 1896 - DNA, 2348 bp, Homo sapiens; identical to SEQ ID NO: 602

SEQ ID NO: 1897 - DNA, 4284 bp, Homo sapiens; identical to SEQ ID NO: 577

SEQ ID NO: 1898 - DNA, 2132 bp, Homo sapiens
attaacgagtgacagtcttaatgactaacacacctctaacatttcacctctagctcagatgagagagagaatgggacttcttggtactgattgtttttcccatgcctcaattggtttcttttagggagctacaaatttacgtgttcactggtgattgatcttttcatccagcacaatggacagaagtctaaggaacgtccttgtggtttcctttgggttcctgcttctctttacagcctatggaggtctgcagagcctgcagagcagcctgtacagcgaggagggcctgggtgtcacagcgctcagcaccctctatggaggcatgctcctgtcctccatgttcctcccaccgctcctcatcgagaggctgggctgcaaggggaccatcatcctctccatgtgtggctacgtggccttctccgtgggcaacttcttcgccagctggtacactttgatccccacctccatactgctgggactcggggccgccccgctgtggtctgcacagtgcacatacctcacgatcacgggaaacacacatgcagagaaggcgggaaagcgtggcaaagacatggtgaaccagtattttggcatcttcttcctcatattccagtcatccggtgtgtggggcaacttgatctcatcgctggtatttggccagactcccagccaagagacccttccagaagagcagctcacgtcctgtggggccagtgactgcctgatggccaccacaaccaccaacagcacccagaggccctcccagcagctggtctacaccctcctgggcatctacactgggagtggtgtcctggctgtcctgatgatagctgcgttcctccaacccatacgagatgttcagcgggaaagtgaaggagagaagaaatcagtacctttctggtccactttactgtcgactttcaagctatatagagataaacgtctgtgcctcttaattctgctgccgctgtacagtggattgcagcaaggattcctctccagcgaatacacaaggtcctatgtcacctgcaccctgggcatccagttcgtcggctacgtgatgatctgcttctcggccactgacgcgctgtgctccgtgttgtatggaaaggtctcgcagtacacgggcagggctgtgctgtacgtgctgggcgcggtgacccacgtgtcctgcatgattgccctactgctgtggagacctcgtgctgaccatctggcagtgttcttcgtattctctggcctgtggggcgtggcagatgccgtctggcagacacaaaacaatgctctctacggcgttctgtttgagaagagcaaggaagctgccttcgccaattaccgcctgtgggaggccctgggcttcgtcattgccttcgggtacagcatgtttttgtgcgtgcacgtcaagctctacattctgctgggggtcctgagcctgaccatggtggcgtatgggcttgtggagtgcgtggagtccaagaacccgatcagaccccacgctccaggacaggtcaaccaggcagaggatgaagaaatacaaacaaaaatgtgagagcagtgaggtccgaggaggatgaactcagaaagcaccagccagagaattttcttagaagatgcctcaggacatagagcggctcctcatcaccatctcagcacaatttggccattctgaagagatcatgttatttcactcttcatgtattttttttctattctaacaaatttttcgtccaccatcttaacagagatcaagtgtatacatgaaggtatcagttcatttaattttagatgcaaaagaaaaaggtctaacgtacaatcagccaattagaatttgcctgaaatcatagactcaccctagttttattgctgtagttgtttttaagaattggaagcctgcttaaaaaatgtagttgagccccataattttacaaatgggcgaacttttaaacttctaactctacttggatcaaaacctcatacattttacaaaggggtcctgacaagtcagctgactcaacctcacagagtcagggggtgacaaagccagactggggctcaggattcctgaaacgtgtggggtctgcgtttctaaataaagacggttatttaatggaaaaaaaaaaaaaaaaaaaaaa

SEQ ID NO: 1899 - DNA, 1900 bp, Homo sapiens
agccgcggggagcgaggagcgcgcggagccggccatgggcaagtcagcttccaaacagtttcataatgaggtcctgaaggcccacaatgagtaccggcagaagcacggcgtccccccactgaagctctgcaagaacctcaaccgggaggctcaacagtattctgaggccctggccagcacgaggatcctcaagcacagcccggagtccagccgtggccagtgtggggagaaccttgcatgggcatcctatgatcagacaggaaaggaggtggctgatagatggtacagtgaaatcaagaactataacttccagcagcctggcttcacctcggggactggacacttcacggccatggtatggaagaacaccaagaagatgggcgtggggaaggcgtccgcaagtgacgggtcctcctttgtggtggccagatacttcccagcggggaatgttgtcaatgagggcttcttcgaagaaaacgtcctgccgccgaagaagtaacttgttaaatgtaatgggaaggtggcagacttaagaacgtggatatgaagtgcctagaaccaccacaacctggctgtgcgtctgtccctgtgggtgtatgtgcttgtgtgtgtgatgcatgtgagcgtctctggcacacacacttggacatacagttctgtgtgcgctcattcttattacaggagtgagcaaaggaagcatttaccccgatggttacctagaccacgattatttggattggggggaggggggatccgttttttttttttaattttttgttatttctaagcaaacctcttttgtacttttcttacttctaatatccatccctggactttttgtattccaaatgtttgtgatgctgagaagtgaagttcattttatgtgatcttcatgcgtcgtaatctacttttggtagataattaagattattaaaccctcatttaaatgtgacataaaatacagctttaagcacataaatataaagcagcttccatcaggaacatggagcaggcagggactccattttacagaattactgagatttctcagttgtaaaacatgatgtcatcctgcatgcctcctggaattctccaatggggtcgccaaacaacaaatggagaaaaaaagttttacttccttgcattcttctacctttaaatagcaaagtaccactaccaccaccacctcttgcccccttccctcttttcttaaacttctggcatttcagagctcagcaggctacccctggtttctggagagttgggctaggcctgaagctccccctcccccacctctgctaggcagcccaggcctggtctgggagacagcccctcaccctgcctgggctcttggccaagcggccttggatggatgaagtcagagaggtggggtgagggtgagcttactcagggcccccagaggaagccctcagcctctgccctccccccacacagggcgggagcccaggcctgttcctggcagctgtggctgcagctgtgctcctgctccctcctggaatgtgcgacaagcccaaatgttccagggaggcggccggggcagggggcttagaagtgctaatatggttctgtgttttgcctgaaacgataccaggttcccctgaatagcaactttacaaggtccatgtgggagggaccaacccagatgccctgctgagtgtccctgaaaccatggcagctccatctgtcaagatggcaggggccggagtgagggggctgctggcttaacagcaggcatctgggcaggccagtcctcaaagcagctcctgaaggtctgtgttgcactgtcaccagtctcaagctatgcctctaatttcaccagggatattgactaagaagacaataaaatctttttctttgtgtaaaaaaaaaaaaaaaaaaa

SEQ ID NO: 1900 - DNA, 1320 bp, Homo sapiens
tttccctaacttgacccttctttcagtgggagggaactattgagaggaacaaagagcttataaatacattaggacctggaattcggttgtccagccacaaaggtgacagcatttaacaaagcttagagaaacctccaggagactgctaccatggcagagaagcccaagctccactactccaatatacggggcagaatggagtccatccggtggctcctggctgcagctggagtagagtttgaagagaaatttataaaatctgcagaagatttggacaagttaagaaatgatggatatttgatgttccagcaagtgccaatggttgagattgatgggatgaagctggtgcagaccagagccattctcaactacattgccagcaaatacaacctctatgggaaagacataaaggagaaagccctgattgatatgtatatagaaggtatagcagatttgggtgaaatgatccttcttctgccctttagtcaacctgaggaacaagatgccaagcttgccttgatccaagagaaaacaaaaaatcgctacttccctgcctttgaaaaagtcttaaagagccacggacaagactaccttgttggcaacaagctgagccgggctgacattcacctggtggaacttctctactacgtggaagagcttgactctagccttatttccagcttccctctgctgaaggccctgaaaaccagaatcagtaacctgcccacagtgaagaagtttctacagcctggcagcccaaggaagcctcccatggatgagaaatctttagaagaatcaaggaagattttcaggttttaataaaccagccatagaggtcaagaacatgcaagaccagtattctaaagttttgcaacaattaagtgctttacctaagtgttgattgtgcctgttgtgaagctaatgaactctttcaaattatatgctaattaaataatacaactcctattcacccacttagttaaaattgatttcttctcattaggatctgatgtgaattcagttttccaatctcctcctagccaacaattttcttggaattacaaattcagtaaaaatggaaactataaattatgtggtttgtttgacttttccaagaattgccctgtaacatacaatttgtcatacaatctattaaaatgccaatgtaaaaatgcacctctgacattttcaggtatgcacaggagaagagttaccatcctggataatggcataaagacattttcttcttttcctgaacagtcattttatttctgataaaagcattctttctaatgcatttgcaaaacaaaaaaaaaaaaa

SEQ ID NO: 1901 - DNA, 2181 bp, Homo sapiens
cctcatgttagcgagtggccctcggctcgtctcgcagatcggccaagtacgcggaggccgcgcggtttcaccattaatactcctgaaggacaatagctcatcaagccccaccgaaagccccggacccgtcgcggagcctgggctggcgggggatgaggctgagcaactcctcctagaggtggttatgtggagaaggagcaatcccttctccctcctcctcctccccccgctactatccgcggcccagagaactgccgcttgccgccattgacacgcacagatagaacccaaagaaaggcaaagagtcctgcccggcaccggcgccgcgtgggccaaacctgcgcccgtggaggggcgcgcagagggcaccgggcgccgggagcaggcggcgcagcaccagcattgtgttagtgccgggaggccactgtgtcagcaagctgagagggaaactgaagcaagatgtcgggccggagtgggaagaagaaaatgtccaagctgtcccgttcagctagggcaggtgtcatctttccagtggggaggctgatgcgttatctgaagaaagggacgttcaagtaccggatcagcgtgggcgcccctgtctacatggcggcagtcattgagtacctggcagcggaaattctagaattggccggcaatgccgcgagggacaacaagaaggcccggatagccccgagacacatcttgctggcagttgccaatgacgaggagctcaaccagctgctaaaaggagtgaccatcgccagtggaggcgtcctgcccagaattcaccccgaactgctggccaaaaagcgagggaccaaaggcaagtcggaaacgatcctctccccacccccagagaaaagaggcaggaaggccacgtcaggcaagaagggggggaagaaatccaaggctgccaaaccacggacgtccaaaaagtccaaaccaaaggacagcgataaagaaggaacttcaaattccacctctgaagatgggccaggggatggattcaccattctgtcttctaagagccttgttctgggacagaagctgtccttaacccagagtgacatcagccatattggctccatgagagtggagggcattgtccacccaaccacagccgaaattgacctcaaagaagatataggtaaagccttggaaaaggctgggggaaaagagttcttggaaacggtaaaggagcttcgcaaatcccaaggccctttggaagtcgccgaagccgccgtcagccaatccagtggactcgcagccaaatttgtcatccactgtcacatccctcagtggggctccgacaaatgtgaagaacagcttgaagagaccatcaaaaactgcctgtcagcggcggaggacaagaagctaaagtccgtcgcgttcccgcctttccccagcggcagaaactgctttcccaaacagactgcggcccaggtgaccctcaaagccatctcagcccactttgatgactcgagcgcgtcctcgctgaagaacgtgtacttcctgctcttcgacagcgagagcatcggcatctacgtgcaggagatggccaagctcgacgccaagtagccgccgcactttccagcagggatcggaggacgacccgagtcccaagagtggggttttgctttttaaaaggagagaggaggggtgatggcaggggagtggagggtggccgggcaggtcctgccggcgcagggagccctctgcccttcacactctcctccaaaagagcctccatctgtaaggaagcaggtctccgcgaggggtttctttccatgtgttttcctcctgttgttttagaacttttttaaaaaaacagacctcgttttagatttatagcattgacttttacacacattcacacaagaaaaaaatcctttcaaaattcttaaatcttctgttcctcctttttccaagggaagagggcaaaaagtggcctgggctctgttggtgtgcgtgttccgtggcggagagaagaaaatgggaaagacatctcactggtgcttttctcttttgttttagtgccccccgcccccatccctataatatctgtaactactcctaaaaaggttttgattcaggcttttttttggtttcattttgtttttttaagaaaaagaaaatgaaaggaaaaaaataaaagatccagtgtctttcttacaacataaa

SEQ ID NO: 1902 - DNA, 2105 bp, Homo sapiens; identical to SEQ ID NO: 547

SEQ ID NO: 1903 - DNA, 2842 bp, Homo sapiens
gagacgctcgctgtttgtatccattgaggagctgcctcgcgcagggggtgtgcgaggctgagtccaagagatagcaaatcgagtcttaaataatccggggagaaagacgcccgggtagatttgaggtgcagccttggagggagggattagaagccgctagactttttttcctcccctctcagtagcacggagtccgaattaattggatttcattcactggggaggaacaaaaactatctgggcagcttcattgagagagattcattgacactaagagccagcggctgcagctgggtgcagagagaacctccggctttacttctgtctcgtctgccccaaccgctagcctcggcttgggtaaggcgaggcggaattaaaccccgctccgagagcggcagcttcgcgcgcggtgcgctcggcctatgcctgccccgaggggcgtctggtaggcaccccgccctctcccgcagctcgacccccatgatagatacgctcagacccgtgcccttcgcgtcggaaatggcgatcagcaagacggtggcgtggctcaacgagcagctggagctgggcaacgagcggctgctgctgatggactgccggccgcaggagctatacgagtcgtcgcacatcgagtcggccatcaacgtggccatcccgggcatcatgctgcggcgcctgcagaagggtaacctgccggtgcgcgcgctcttcacgcgcggcgaggaccgggaccgcttcacccggcgctgtggcaccgacacagtggtgctctacgacgagagcagcagcgactggaacgagaatacgggcggcgagtcggtgctcgggctgctgctcaagaagctcaaggacgagggctgccgggcgttctacctggaaggtggcttcagtaagttccaagccgagttctccctgcattgcgagaccaatctagacggctcgtgtagcagcagctcgccgccgttgccagtgctggggctcgggggcctgcggatcagctctgactcttcctcggacatcgagtctgaccttgaccgagaccccaatagtgcaacagactcggatggtagtccgctgtccaacagccagccttccttcccagtggagatcttgcccttcctctacttgggctgtgccaaagactccaccaacttggacgtgttggaggaattcggcatcaagtacatcttgaacgtcacccccaatttgccgaatctctttgagaacgcaggagagtttaaatacaagcaaatccccatctcggatcactggagccaaaacctgtcccagtttttccctgaggccatttctttcatagatgaagcccggggcaagaactgtggtgtcttggtacattgcttggctggcattagccgctcagtcactgtgactgtggcttaccttatgcagaagctcaatctgtcgatgaacgatgcctatgacattgtcaaaatgaaaaaatccaacatatcccctaacttcaacttcatgggtcagctgctggacttcgagaggacgctgggactcagcagcccatgtgacaacagggttccagcacagcagctgtattttaccaccccttccaaccagaatgtataccaggtggactctctgcaatctacgtgaaagaccccacacccctccttgctggaatgtgtctggcccttcagcagtttctcttggcagcatcagctgggctgctttctttgtgtgtggccccaggtgtcaaaatgacaccagctgtctgtactagacaaggttaccaagtgcggaattggttaatactaacagagagatttgctccattctctttggaataacaggacatgctgtatagatacaggcagtaggtttgctctgtacccatgtgtacagcctacccatgcagggactgggattcgaggacttccaggcgcatagggtagaaccaaatgatagggtaggagcatgtgttctttagggccttgtaaggctgtttccttttgcatctggaactgactatataattgtcttcaatgaagactaattcaattttgcatatagaggagccaaagagagatttcagctctgtatttgtggtatcagtttggaaaaaaaaatctgatactccatttgattattgtaaatatttgatcttgaatcacttgacagtgtttgtttgaattgtgtttgttttttcctttgatgggcttaaaagaaattatccaaagggagaaagagcagtatgccacttcttaaaacagaacaaaacaaaaaaagaaaattgtgctcttttctaatccaaagggtatatttgcagcatgcttgactttaccaattctgatgacatctttacggacactattatcactaagaccttgttatggcgaagtctttagtctttttcatgtattttcctcatgattttttctctttatgtagtttgactatgccttacctttgtaaatatttttgcttgtgttgtcgcaaaggggataatctgggaaagacaccaaatcatgggctcactttaaaaaaagaaagaataaaaaaaccttcagctgtgctaaacagtatattacctctgtataaaattcttcagggagtgtcacctcaaatgcaatactttgggttggtttctttcctttaaaaaaatttgtataaaactggaagtgtgtgtgtgtgagcatgggtacccatttgataagagaaatgcatttgattgtgaagaagggagagttaaattctccattatgttcgtggtgtaaagtttagagctggaatttattataagaatgtaaaaccttaaattattaataaataactattttggctattgaaaaaaaaaaaaaaaaaaaaaaaa

SEQ ID NO: 1904 - DNA, 3634 bp, Homo sapiens; identical to SEQ ID NO: 634

SEQ ID NO: 1905 - DNA, 3431 bp, Homo sapiens
ccaagatcttcctcctaccctcccctctttcccttctcccgcggtcggccctcgccccctcccccaggcccagcgcgggcgctcggcgcgtccagacccgcggcgcgatgccggcagtttaggatccaaagcttctctgctccttttgttctttccttcccttttttaaaaaaagaggggggaaatcccagtggtgggcagcctggcacgcacacagtcgccctcataccccgacaaaagcagatgcactttgacttctgacagctctacctcaagccccggagaactcagcggcgctttcctcgcaacccgagctcggcgagtcgtcgtcttcttcttctccgtttttatttatttatttccgttcccgccgccgttctcgctgaccttcactcctccgcgggctctgagcagaagggtcgcattctctcccgcctgagacttcttttcctcgccccgggagctcaggcggcgccgctccagcccggggccccgggactccccggctgcacacttcactgagacgcccccccaggccccgatcagcctcgtttcctccaccctactttgatttcctggtgcgagttttggcttgcacggccgagtgtgtgtcctctttttggagagactggggagctcgtgccgattgtcttcaggagtcatcccctgggctctactttgcccctctctctctctgggcctcatcagaccaaaccaaagaccatggttcactgtgccggctgcaaaaggcccatcctggaccgctttctcttgaacgtgctggacagggcctggcacgtcaagtgcgtccagtgctgtgaatgtaaatgcaacctgaccgagaagtgcttctccagggaaggcaaactctactgcaagaacgacttcttccggtgtttcggtaccaaatgcgcaggctgcgctcagggcatctcccctagcgacctggtgcggagagcgcggagcaaagtgtttcacctgaactgcttcacctgcatgatgtgtaacaagcagctctccactggcgaggaactctacatcatcgacgagaataagttcgtctgcaaagaggattacctaagtaacagcagtgttgccaaagagaacagccttcactcggccaccacgggcagtgaccccagtttgtctccggattcccaagacccgtcgcaggacgacgccaaggactcggagagcgccaacgtgtcggacaaggaagcgggtagcaacgagaatgacgaccagaacctgggcgccaagcggcggggaccgcgcaccaccatcaaagccaagcagctggagacgctgaaggccgccttcgctgctacacccaagcccacccgccacatccgcgagcagctggcgcaggagaccggcctcaacatgcgcgtcattcaggtctggttccagaaccggcgctccaaggagcggaggatgaagcagctgagcgccctgggcgcccggcgccacgccttcttccgcagtccgcgccggatgcggccgctggtggaccgcctggagccgggcgagctcatccccaatggtcccttctccttctacggagattaccagagcgagtactacgggcccgggggcaactacgacttcttcccgcaaggccccccgtcctcgcaggcccagacaccagtggacctacccttcgtgccgtcatctgggccgtccgggacgcccctgggtggcctggagcacccgctgccgggccaccacccgtcgagcgaggcgcagcggtttaccgacatcctggcgcacccacccggggactcgcccagccccgagcccagcctgcccgggcctctgcactccatgtcggccgaggtcttcggacccagcccgcccttctcgtcgctgtcggtcaacggtggggcgagctacggaaaccacctgtcccacccccccgaaatgaacgaggcggccgtgtggtagcggggtctcgcacggtctgcggagttcgtggttgtacagaaatgaacctttatttaagaaaaatagaaaaaaaaaaaaacataaaaagcaagtccccacccccttcctccagcctcgagaaccattctccttctggggagaccggatggaaaagggggacacgaaataggatccaaatcggcctcgaggtgggactgggatccgcgcactggctgtcgacgtgcagaactggggctccccaaaggaaacgcagacctctccccaactcccacctggacccggatccgtagacagaccccgcgggcgtgtgcgcctggcaggcgggcggcgaaaagacgtccagggcagccgcgggtgcgcacagccgttggcgatgccaggagccgtggggagggaggccgtgagcacagccgggtgaaggaagtgaagcggcccagggcgctcccgggccagccaggagggttctagctctgggatatcccttattagtgttgtctcagagttcaacaacagcgacaaaaaactcttatagcttcagaaacgccgacctgccgtgcatcaggtgggactatatatatattttttgtctatctggatttttggtttttgtttttgccaaaattgcaaaattctaaatgtaaagccctccgtatcaactcttctaccttcgcaaaactacacatacacacatacacacgtacacggacacactcggtaagatggtctccagccagaccgctcagtaaaatgacttgaacatcagctgtacaagaaaagtattctaccttcacacacaaaaagttaaaaaaaaaaaaaaaagactattgaactaaaaacagtcaactgtttacgtataatgttaaattcaggagttcagtgttttactaatatatcctgttttgaaacctcttgttcgaaaacaaaatgttttgagcaatcaaccaaaattgttccttttcttttcctgtagatgttctgacagatttgcagggctttcggctcactgtgctagtatgtaaaaaggtgttgtttacacgaggcaaagagaaaacatgctattcagacagttgccaaatagaataattatagcacaaatactgtaaaggtgcctggcaccagcaacctgagaaagtgttaaaaaaaaaaaaaaaaaagtgttacaagatttaaaaaaaaacatctttgctaatttttttgtcctgttgaacattcatggaattgttaatatgacttatatagacccacacaggttttatttttgtgtctttaaaataaaagtccaaaatatttaaattttatggtcaaatatgcagtcaacagctgctactttttctttatatattaaatttctcatatgtcttttattgttctaataaacctaagcttgtgtgacctccagtgcatattagaccattcactgtatgaaagaaaacatgttgaataaatttgtgagtttttaataaaaatagaaaatctgatgtttagat

SEQ ID NO: 1906 - DNA, 3970 bp, Homo sapiens; identical to SEQ ID NO: 1504

SEQ ID NO: 1907 - DNA, 8605 bp, Homo sapiens
aattcgccaactgaaaaagtgggaaaggatgtctggaggcgaggcgtcccattacagaggaaggagctcgctatataagccagccaaagttggctgcaccggccacagcctgcctactgtcacccgcctctcccgcgcgcagatacacgcccccgcctccgtgggcacaaaggcagcgctgctggggaactcgggggaacgcgcacgtgggaaccgccgcagctccacactccaggtacttcttccaaggacctaggtctctcgcccatcggaaagaaaataattctttcaagaagatcagggacaactgatttgaagtctactctgtgcttctaaatccccaattctgctgaaagtgagataccctagagccctagagccccagcagcacccagccaaacccacctccaccatgggggccatgactcagctgttggcaggtgtctttcttgctttccttgccctcgctaccgaaggtggggtcctcaagaaagtcatccggcacaagcgacagagtggggtgaacgccaccctgccagaagagaaccagccagtggtgtttaaccacgtttacaacatcaagctgccagtgggatcccagtgttcggtggatctggagtcagccagtggggagaaagacctggcaccgccttcagagcccagcgaaagctttcaggagcacacagtggatggggaaaaccagattgtcttcacacatcgcatcaacatcccccgccgggcctgtggctgtgccgcagcccctgatgttaaggagctgctgagcagactggaggagctggagaacctggtgtcttccctgagggagcaatgtactgcaggagcaggctgctgtctccagcctgccacaggccgcttggacaccaggcccttctgtagcggtcggggcaacttcagcactgaaggatgtggctgtgtctgcgaacctggctggaaaggccccaactgctctgagcccgaatgtccaggcaactgtcaccttcgaggccggtgcattgatgggcagtgcatctgtgacgacggcttcacgggcgaggactgcagccagctggcttgccccagcgactgcaatgaccagggcaagtgcgtaaatggagtctgcatctgtttcgaaggctacgccggggctgactgcagccgtgaaatctgcccagtgccctgcagtgaggagcacggcacatgtgtagatggcttgtgtgtgtgccacgatggctttgcaggcgatgactgcaacaagcctctgtgtctcaacaattgctacaaccgtggacgatgcgtggagaatgagtgcgtgtgtgatgagggtttcacgggcgaagactgcagtgagctcatctgccccaatgactgcttcgaccggggccgctgcatcaatggcacctgctactgcgaagaaggcttcacaggtgaagactgcgggaaacccacctgcccacatgcctgccacacccagggccggtgtgaggaggggcagtgtgtatgtgatgagggctttgccggtgtggactgcagcgagaagaggtgtcctgctgactgtcacaatcgtggccgctgtgtagacgggcggtgtgagtgtgatgatggtttcactggagctgactgtggggagctcaagtgtcccaatggctgcagtggccatggccgctgtgtcaatgggcagtgtgtgtgtgatgagggctatactggggaggactgcagccagctacggtgccccaatgactgtcacagtcggggccgctgtgtcgagggcaaatgtgtatgtgagcaaggcttcaagggctatgactgcagtgacatgagctgccctaatgactgtcaccagcacggccgctgtgtgaatggcatgtgtgtttgtgatgacggctacacaggggaagactgccgggatcgccaatgccccagggactgcagcaacaggggcctctgtgtggacggacagtgcgtctgtgaggacggcttcaccggccctgactgtgcagaactctcctgtccaaatgactgccatggccagggtcgctgtgtgaatgggcagtgcgtgtgccatgaaggatttatgggcaaagactgcaaggagcaaagatgtcccagtgactgtcatggccagggccgctgcgtggacggccagtgcatctgccacgagggcttcacaggcctggactgtggccagcactcctgccccagtgactgcaacaacttaggacaatgcgtctcgggccgctgcatctgcaacgagggctacagcggagaagactgctcagaggtgtctcctcccaaagacctcgttgtgacagaagtgacggaagagacggtcaacctggcctgggacaatgagatgcgggtcacagagtaccttgtcgtgtacacgcccacccacgagggtggtctggaaatgcagttccgtgtgcctggggaccagacgtccaccatcatccaggagctggagcctggtgtggagtactttatccgtgtatttgccatcctggagaacaagaagagcattcctgtcagcgccagggtggccacgtacttacctgcacctgaaggcctgaaattcaagtccatcaaggagacatctgtggaagtggagtgggatcctctagacattgcttttgaaacctgggagatcatcttccggaatatgaataaagaagatgagggagagatcaccaaaagcctgaggaggccagagacctcttaccggcaaactggtctagctcctgggcaagagtatgagatatctctgcacatagtgaaaaacaatacccggggccctggcctgaagagggtgaccaccacacgcttggatgcccccagccagatcgaggtgaaagatgtcacagacaccactgccttgatcacctggttcaagcccctggctgagatcgatggcattgagctgacctacggcatcaaagacgtgccaggagaccgtaccaccatcgatctcacagaggacgagaaccagtactccatcgggaacctgaagcctgacactgagtacgaggtgtccctcatctcccgcagaggtgacatgtcaagcaacccagccaaagagaccttcacaacaggcctcgatgctcccaggaatcttcgacgtgtttcccagacagataacagcatcaccctggaatggaggaatggcaaggcagctattgacagttacagaattaagtatgcccccatctctggaggggaccacgctgaggttgatgttccaaagagccaacaagccacaaccaaaaccacactcacaggtctgaggccgggaactgaatatgggattggagtttctgctgtgaaggaagacaaggagagcaatccagcgaccatcaacgcagccacagagttggacacgcccaaggaccttcaggtttctgaaactgcagagaccagcctgaccctgctctggaagacaccgttggccaaatttgaccgctaccgcctcaattacagtctccccacaggccagtgggtgggagtgcagcttccaagaaacaccacttcctatgtcctgagaggcctggaaccaggacaggagtacaatgtcctcctgacagccgagaaaggcagacacaagagcaagcccgcacgtgtgaaggcatccactgaacaagcccctgagctggaaaacctcaccgtgactgaggttggctgggatggcctcagactcaactggaccgcagctgaccaggcctatgagcactttatcattcaggtgcaggaggccaacaaggtggaggcagctcggaacctcaccgtgcctggcagccttcgggctgtggacataccgggcctcaaggctgctacgccttatacagtctccatctatggggtgatccagggctatagaacaccagtgctctctgctgaggcctccacaggggaaactcccaatttgggagaggtcgtggtggccgaggtgggctgggatgccctcaaactcaactggactgctccagaaggggcctatgagtactttttcattcaggtgcaggaggctgacacagtagaggcagcccagaacctcaccgtcccaggaggactgaggtccacagacctgcctgggctcaaagcagccactcattataccatcaccatccgcggggtcactcaggacttcagcacaacccctctctctgttgaagtcttgacagaggaggttccagatatgggaaacctcacagtgaccgaggttagctgggatgctctcagactgaactggaccacgccagatggaacctatgaccagtttactattcaggtccaggaggctgaccaggtggaagaggctcacaatctcacggttcctggcagcctgcgttccatggaaatcccaggcctcagggctggcactccttacacagtcaccctgcacggcgaggtcaggggccacagcactcgaccccttgctgtagaggtcgtcacagaggatctcccacagctgggagatttagccgtgtctgaggttggctgggatggcctcagactcaactggaccgcagctgacaatgcctatgagcactttgtcattcaggtgcaggaggtcaacaaagtggaggcagcccagaacctcacgttgcctggcagcctcagggctgtggacatcccgggcctcgaggctgccacgccttatagagtctccatctatggggtgatccggggctatagaacaccagtactctctgctgaggcctccacagccaaagaacctgaaattggaaacttaaatgtttctgacataactcccgagagcttcaatctctcctggatggctaccgatgggatcttcgagacctttaccattgaaattattgattccaataggttgctggagactgtggaatataatatctctggtgctgaacgaactgcccatatctcagggctaccccctagtactgattttattgtctacctctctggacttgctcccagcatccggaccaaaaccatcagtgccacagccacgacagaggccctgccccttctggaaaacctaaccatttccgacattaatccctacgggttcacagtttcctggatggcatcggagaatgcctttgacagctttctagtaacggtggtggattctgggaagctgctggacccccaggaattcacactttcaggaacccagaggaagctggagcttagaggcctcataactggcattggctatgaggttatggtctctggcttcacccaagggcatcaaaccaagcccttgagggctgagattgttacagaagccgaaccggaagttgacaaccttctggtttcagatgccaccccagacggtttccgtctgtcctggacagctgatgaaggggtcttcgacaattttgttctcaaaatcagagataccaaaaagcagtctgagccactggaaataaccctacttgcccccgaacgtaccagggacataacaggtctcagagaggctactgaatacgaaattgaactctatggaataagcaaaggaaggcgatcccagacagtcagtgctatagcaacaacagccatgggctccccaaaggaagtcattttctcagacatcactgaaaattcggctactgtcagctggagggcacccacagcccaagtggagagcttccggattacctatgtgcccattacaggaggtacaccctccatggtaactgtggacggaaccaagactcagaccaggctggtgaaactcatacctggcgtggagtaccttgtcagcatcatcgccatgaagggctttgaggaaagtgaacctgtctcagggtcattcaccacagctctggatggcccatctggcctggtgacagccaacatcactgactcagaagccttggccaggtggcagccagccattgccactgtggacagttatgtcatctcctacacaggcgagaaagtgccagaaattacacgcacggtgtccgggaacacagtggagtatgctctgaccgacctcgagcctgccacggaatacacactgagaatctttgcagagaaagggccccagaagagctcaaccatcactgccaagttcacaacagacctcgattctccaagagacttgactgctactgaggttcagtcggaaactgccctccttacctggcgacccccccgggcatcagtcaccggttacctgctggtctatgaatcagtggatggcacagtcaaggaagtcattgtgggtccagataccacctcctacagcctggcagacctgagcccatccacccactacacagccaagatccaggcactcaatgggcccctgaggagcaatatgatccagaccatcttcaccacaattggactcctgtaccccttccccaaggactgctcccaagcaatgctgaatggagacacgacctctggcctctacaccatttatctgaatggtgataaggctgaggcgctggaagtcttctgtgacatgacctctgatgggggtggatggattgtgttcctgagacgcaaaaacggacgcgagaacttctaccaaaactggaaggcatatgctgctggatttggggaccgcagagaagaattctggcttgggctggacaacctgaacaaaatcacagcccaggggcagtacgagctccgggtggacctgcgggaccatggggagacagcctttgctgtctatgacaagttcagcgtgggagatgccaagactcgctacaagctgaaggtggaggggtacagtgggacagcaggtgactccatggcctaccacaatggcagatccttctccacctttgacaaggacacagattcagccatcaccaactgtgctctgtcctacaaaggggctttctggtacaggaactgtcaccgtgtcaacctgatggggagatatggggacaataaccacagtcagggcgttaactggttccactggaagggccacgaacactcaatccagtttgctgagatgaagctgagaccaagcaacttcagaaatcttgaaggcaggcgcaaacgggcataaattccagggaccactgggtgagagaggaataaggcccagagcgaggaaaggattttaccaaagcatcaatacaaccagcccaaccatcggtccacacctgggcatttggtgagagtcaaagctgaccatggatccctggggccaacggcaacagcatgggcctcacctcctctgtgatttctttctttgcaccaaagacatcagtctccaacatgtttctgttttgttgtttgattcagcaaaaatctcccagtgacaacatcgcaatagttttttacttctcttaggtggctctgggaatgggagaggggtaggatgtacaggggtagtttgttttagaaccagccgtattttacatgaagctgtataattaattgtcattatttttgttagcaaagattaaatgtgtcattggaagccatccctttttttacatttcatacaacagaaaccagaaaagcaatactgtttccattttaaggatatgattaatattattaatataataatgatgatgatgatgatgaaaactaaggatttttcaagagatctttctttccaaaacatttctggacagtacctgattgtattttttttttaaataaaagcacaagtacttttgagtttgttattttgctttgaattgttgagtctgaatttcaccaaagccaatcatttgaacaaagcggggaatgttgggataggaaaggtaagtagggatagtggtcaagtgggaggggtggaaaggagactaaagactgggagagagggaagcactttttttaaataaagttgaacacacttgggaaaagcttacaggccaggcctgtaatcccaacactttgggaggccaaggtgggaggatagcttaaccccaggagtttgagaccagcctgagcaacatagtgagaacttgtctctacagaaaaaaaaaaaaaaaaaaatttaattaggcaagcgtggtagtgcgcacctgtcgtcccagctactcaggaggctgaggtaggaaaatcactggagcccaggagttagaggttacagtgagctatgatcacactactgcactccagcctgggcaacagagggagaccctgtctctaaataaaaaaagaaaagaaaaaaaaagcttacaacttgagattcagcatcttgctcagtatttccaagactaatagattatggtttaaaagatgcttttatactcattttctaatgcaactcctagaaactctatgatatagttgaggtaagtattgttaccacacatgggctaagatccccagaggcagactgcctgagttcaattcttggctccaccattcccaagttccctaacctctctatgcctcagtttcctcttctgtaaagtagggacactcatacttctcatttcagaacatttttgtgaagaataaattatgttatccatttgaggcccttagaatggtacccggtgtatattaagtgctagtacatgttagctatcatcattatcactttatatgagatggactggggttcatagaaacccaatgacttgattgtggctactactcaataaataatagaatttggatttaaaaaaaa

SEQ ID NO: 1908 - DNA, 2865 bp, Homo sapiens; identical to SEQ ID NO: 557

SEQ ID NO: 1909 - DNA, 2842 bp, Homo sapiens; identical to SEQ ID NO: 579

SEQ ID NO: 1910 - DNA, 2889 bp, Homo sapiens; identical to SEQ ID NO: 246

SEQ ID NO: 1911 - DNA, 3405 bp, Homo sapiens
aacagctgcagccggcgctgggcccgcctggaatgcgggaacaggctgcacaccaggacttttatggaaacttgctgctggagacggcggcggcggcggcggcagcggcagccagaggactcccagcggctggagcagaagtgttagcggccagagctcccagacccctacccacagccaggcgggacgcgcacagtccctccacgcggaaagaagtaccttcgccggtcaccggctcctgcagggtgcaaatatatacagagcttcataatcagcccaagaccacatagagcaaacatgaatgatatttcccaaaaggctgagattctgctttcttcatctaaacctgtcccaaaaacctatgtaccaaaacttggcaagggtgatgtaaaggataagtttgaagccatgcagagagccagggaagaaagaaatcaaaggagatctagagacgaaaaacaaagaagaaaagaacaatatattagagagagagaatggaacaggagaaagcaggagattaaagaaatgcttgcttctgatgatgaggaagatgtatcttctaaagtagaaaaggcttatgttccaaaattaacaggaactgtgaagggtagatttgctgaaatggagaaacaaagacaagaggaacaaaggaagagaacggaggaggaacgaaaacgcagaattgagcaggatatgttagaaaagaggaaaatacagcgtgaattagcaaaaagggctgaacagattgaggacataaacaatacgggaactgaatcagcatcagaggaaggagatgattcactacttataactgtggtacctgtcaaatcatataaaacatctggaaaaatgaaaaagaattttgaggatctagaaaaagaacgtgaagagaaagaaaggatcaagtacgaggaagataaaagaataagatatgaagaacaacgaccatctctcaaggaagcaaagtgtctttcattagttatggatgatgaaatagaaagtgaagcaaaaaaagaatcactttctcccggaaaattgaaactaacttttgaagaactggagcgacaaagacaagaaaaccgaaagaagcaagctgaagaggaagcaagaaaacgtttagaagaagagaagcgtgcttttgaagaagcaaggcggcaaatggtaaatgaagatgaggaaaaccaagacacagcaaaaatttttaaagggtaccgccctggtaaactcaaactcagttttgaagaaatggaaaggcaaagaagagaagatgaaaaaaggaaagcagaagaagaagccagaaggagaatagaggaagaaaagaaggcgtttgctgaagcaaggagaaatatggtagtagatgatgactccccagagatgtataagacaatctctcaagaatttcttacaccgggaaaactggaaattaattttgaagaattattaaaacaaaaaatggaagaagaaaaacgacgaacagaggaggaacggaagcataagctagaaatggagaaacaagaatttgaacaactgagacaggaaatgggagaggaagaggaagaaaatgaaacctttggattgagcagagaatatgaagaactgatcaaattaaaaaggagtggctctattcaagctaaaaacctaaaaagcaagtttgaaaaaattggacagttgtctgaaaaagaaatacagaaaaaaatagaagaagagcgagcaagaaggagagcaattgaccttgaaattaaagagcgagaagctgaaaattttcatgaggaagatgatgttgatgttaggcctgcaagaaaaagcgaggctccatttactcacaaagtgaatatgaaagctagatttgaacaaatggctaaggcaagagaagaagaagaacaaagaagaattgaagaacaaaagttactacgcatgcagtttgaacaaagggaaattgatgcagcactacaaaagaaaagagaagaggaggaggaggaagaaggtagcatcatgaatggctccactgctgaagatgaagagcaaaccagatcaggagctccatggttcaagaagcctcttaaaaacacatcagttgtagacagtgagccagtcagatttacggttaaagtaacaggagaacccaaaccagaaattacatggtggtttgaaggagaaatactgcaggatggagaagactatcaatatattgaaaggggagaaacttactgcctttacttaccagaaactttcccagaagatggaggagagtatatgtgtaaagcagtcaacaataaaggatctgcagctagtacctgtattcttaccattgaaagtaagaattaatcactctttttatcttttattctattaatttttttttccttaaaatcacttttcttcttctcttttttagctgatgactactagctcccctcccctctccctggaactttctctttcactccaactttcttactacatccatcttttctgtggcggggccaaaaaaggaaaccaggagtgccactatgctgacttcttattccttttcataacagtcttcaaagcacagctcatctaaagaatgcctacttcttttccaaataagcatcagatttatcgcctattatgcagtaacagtcaataaaatgtacttatgggggggaattactcaattattctatcagaacctattataaagactgtatttcccatagacgtttacagcaactatgtttaaaaaacaaaaacaaaaaaaaaacacacaaacctaagtagaatacattattttgcatgaaggaatgtcatttctgagctttttacacctaaaattaggctgaaatagctgagataattaatttggaacctatcaatttgagtggactttttctttagtagtacaccattttggttgttgtagtttcaaagtctttctgaagcagatatattgggattggagcggggtggggaaaactgtcactcctttcagaggaaaaggggaggagcatggagaaaaacaaaaattaaaggacttaaagaatggctatacagtgttgagtgttgaggatattaaacatgttatttttcaaacgtatgtaatatatattaaatttataaagcaaatttatgttgtgatcttgcctgaacaaattatattttaatgaaaaaactttctattaatagttcacgcaagagaaaacactttcaacatagtcgaaggcttcaagatctaagtgtatcagacttagggaaaaagtggcacaaccttcgatttaaaattctagtctttaaaatgagtttgtaaataattagctattacgttctattaagttgttttatattttaattttctggaagacaattttattttacaacgtgaacccaaataaagtaacttctgtatttaaaaaaaaaaaaaaaaaa

SEQ ID NO: 1912 - DNA, 1378 bp, Homo sapiens
agccggcgctacgtgtgcgcccgggacgcggacgcaagccgccgacggaggaggccttttaactacggcctctccatcgaagaaaaaaatgaaaatgatgaaaactcattaagcagttcctccgacagtagtgaagacaaggatgaaaaaataagtgaagaatgtgatattgaagaaaagactgaagtgaaagaagaaccggagcttcaaacaaaaagggaaatggaagaaagaacagtaactctagaaatccctgaagttctgaagaggcagctggaggatgattgttactacattaatcggaggaaacggttagtgcaacttccatgccacaccaacatcataacgattttggaatcctatgtgaagcattttgctatcagtgcagccttttcagccaatgagaggcctcgtcaccatcacgctatgccacatgccagcatgaacgtgccttatatcccagcagaaaagaatattgacctttgtaaggagatggtggatggattaagaataacctttgattacactctcccgttggttttactctatccctatgaacaagctcagtataaaaaggtgactgcatctaaggtttttcttgcaattaaggaaagtgccacaaatactaataggagccaggagaagctctctcccagcttacgtttgttgaatccatccaggccgcagtctacagagagtcagtcgaccagcggtgaaccagccacccctaaaaggcgcaaagccgagccgcaagcagtgcagtctctgaggcggtcctcgccccacaccgccaactgtgacaggctttctaagagcagcacctcacctcagcccaagcgctggcagcaggacatgtccaccagtgtgcccaagctgttcctgcacctggaaaagaagacacctgtgcatagcagatcatcttcacctactctgactcctagccaggaagggagtcctgtgtttgctggctttgaagggagaagaactaatgaaataaatgaggtcctctcctggaagctcgtacctgacaattacccaccaggtgaccagccacctccaccctcttacatttacggggcgcaacatttgctgcgattgtttgtcaaacttccagaaattcttggaaaaatgtcctttactgagaagaatctgaaggctttattgaagcactttgatctctttgtgaggtttttagcagaataccacgatgacttcttcccagagtcagcttacgtcgctgcctctgaggtgcattacagcaccaggaacccccaggcagtcaataagtgttgatggttctgtaagaacaactgctccatctagcatggtgttctgagttccaggtaaaaaattaacaaggtggtgggtttttatccag

SEQ ID NO: 1913 - DNA, 4351 bp, Homo sapiens
cccgccccttcgcggcgcttcctagttcggctggttcttctgtcgccggcttcagcagcccgcgcccgggcaggggcctggagcagtatctagcacaaagtagacactcagtaaatatttggaatagaagatgaacaaacccataacaccatcaacatatgtgcgctgcctcaatgttggactaattaggaagctgtcagattttattgatcctcaagaaggatggaagaagttagctgtagctattaaaaaaccatctggtgatgatagatacaatcagtttcacataaggagatttgaagcattacttcaaactggaaaaagtcccacttctgaattactgtttgactggggcaccacaaattgcacagttggtgatcttgtggatcttttgatccaaaatgaattttttgctcctgcgagtcttttgctcccagatgctgttcccaaaactgctaatacactaccttctaaagaagctataacagttcagcaaaaacagatgcctttctgtgacaaagacaggacattgatgacacctgtgcagaatcttgaacaaagctatatgccacctgactcctcaagtccagaaaataaaagtttagaagttagtgatacacgttttcacagtttttcattttatgaattgaagaatgtcacaaataactttgatgaacgacccatttctgttggtggtaataaaatgggagagggaggatttggagttgtatataaaggctacgtaaataacacaactgtggcagtgaagaagcttgcagcaatggttgacattactactgaagaactgaaacagcagtttgatcaagaaataaaagtaatggcaaagtgtcaacatgaaaacttagtagaactacttggtttctcaagtgatggagatgacctctgcttagtatatgtttacatgcctaatggttcattgctagacagactctcttgcttggatggtactccaccactttcttggcacatgagatgcaagattgctcagggtgcagctaatggcatcaattttctacatgaaaatcatcatattcatagagatattaaaagtgcaaatatcttactggatgaagcttttactgctaaaatatctgactttggccttgcacgggcttctgagaagtttgcccagacagtcatgactagcagaattgtgggaacaacagcttatatggcaccagaagctttgcgtggagaaataacacccaaatctgatatttacagctttggtgtggttttactagaaataataactggacttccagctgtggatgaacaccgtgaacctcagttattgctagatattaaagaagaaattgaagatgaagaaaagacaattgaagattatattgataaaaagatgaatgatgctgattccacttcagttgaagctatgtactctgttgctagtcaatgtctgcatgaaaagaaaaataagagaccagacattaagaaggttcaacagctgctgcaagagatgacagcttcttaaaactttattggaaaagactcttgactttttatatacacctatctcaaccatttttttaactgatttttttcctaaatattcttctttacctttaacaaggcataggctgttgcaggacagtggttattaaagcatgggttgaacttccaaaatataaaaatagagccaccatatcaacacttagccctacccattagtatcacccccagttcttacagtaatccctgagaaatctccttcaagcatcaccaaacacagtttgaaaattacagggttagcaaaaagagcctgggctgtatgtagggtggaaacactctgatctgaagcccagctgactccactactaatttgctgtaaagctttggacatacacttagctgctgtgagccactaataacattgggctaatatctgctgtgcttctctgacaggtagtcatgaaaatcaaatgatgcaaaatatatacaagcactttgtaaattgtaaaatgatacaaaatttaaagtttatagagccagttacaaaatcctattagtcatatatttatagattgtgttcacagcaatcatttaaccacaaataaaatatcccttgatgatactgccataatgatatgtccattattagattatgttacatgacaaagttgaaggaatttggcagatgcagttaaggttcctaaacaactcactttgagactgttgaaagggcctgacctaatcaagtgaacccttgcaagaagaattctccttgtaagccttgaagaagtatgtgagagggccacattggctaaaacctaaaggtggcctctaggagatgagacctaccttccagttgtcagcaagcaggaaaaaaaaattgggacctcagttgcaaccacaaggaactgaattctgccaaaaatctgagtcagcttagaagagtactccaagcttcagatgataaccacagcctgggctgacacctggatttcagctttgcatgatcctcagtatgagaatctatctgttctgtgctggacttctaatatatagaactgtgagataatgggtcacattggctggatgtggtggctcatacctgtaaatcccagcactttgggaggccgaggcaggcagatcacctgaggtcaagagttcaagaccggcctggccaacatggtgaaaccccgtctctactaaaaatacaaaaattagacgagcgtggtggtggacacctgtagtcccagctacttgggaggctgaggcaggagactagctggaaccagggaggtagaggttgcagtgagctgagatcgtgccactgcactccagcctgggtgacagagtgagactccatcataaataaataaataaataaatgggtcacattaagcctttaagtttgtggtaatttattattcagtaatagaaaacaaatacagatactctcccatgatgtttttcccatgatgatttcccatgatatttacaggttttgcccacatttgaggggtatgtggaaattatacagagcatgtacagcgggaggcttatagtgtacgtactgaaatgtggggttggagccccaacacagagaccccagcaggacactgcctagtagagctatgggaagggtgctgccaccctccagacttgagaattgtagagccaccagcagcttgcactctgagcttggaaaagccacaggcactcaacttcaaccatgagggaagccacgcaccctgcaaagccacaggagtggagctgcccacggcctcgagggcccaccccttgcaccagtgtgccaggatgtgggacatggaatcaaggaatatgttagggcttttttttttttttttttgagacggagtcttgctctgttgcccaggctggagtgcagtggcacgatctcggctcactgcaagctctgcctcccaggttcacgccattcccctgcctcagcctccccagtagctgggactacaggtgcccgccaccatgcccagctaattttttttgtatttttagtagagatggggtttcactgtgttagccaggatggtcttgatctcctgacctcgtgatcacccgcctcggcctcccaaagtgccagtatttaaagtttaatgtcttcccagctgggtttcagacttgccaggatcctgttgcccctttctttagccaatttctcccttttgggacaagaatgttttacttattgcctgtaccaccaactgtatcttggaaataaataacttatattttatttcagaggctcataggcggcaggaacttaccttgagtctcaaatgagacttaggacttttgagtgatgctagaatgagttaagactttgggaagggatgattatattttgcaatgtgagaaagacattagatttggggggctgggggtagaatgacattgtttagatgtttgtctccttcaaatttcatgtttaaatgtaatccccagtgttgggggtggaggtggggcctgatgggaagtgtttgggtcatggtggatgatccctcatgaatggcttagagccactggtgatgagtgagttctcactcagttcgtgtgagatctggtggcttaaaagagtctgctccccctttgccttccattgtgattgtaaccttcctggggccttcatcaaaggccaggcaaatattggtgccgtgctagtatggcctgcagaaccgtaagccaaaacaaaccttttttctttataaattacccagcctcagttattcctttatagtgatgcaaaacgggctaactatataaatttgtaatttttaagttatagattgtttttattaaacacttatgaatactgttaaaaaaaaaa

SEQ ID NO: 1914 - DNA, 1085 bp, Homo sapiens; identical to SEQ ID NO: 570

SEQ ID NO: 1915 - DNA, 11733 bp, Homo sapiens; identical to SEQ ID NO: 1523

SEQ ID NO: 1916 - DNA, 967 bp, Homo sapiens; identical to SEQ ID NO: 1532

SEQ ID NO: 1917 - DNA, 6063 bp, Homo sapiens
taagttggcgcgtcacctagacgtcagcctcttacctctcggacgtcccgtcccaggagcaaaactctagtgactttgggcccgcccccgtgagagtggagggcggccgatgagggcggttctgaagggaacaagaccaatgagacgagcccggggcggggcgcggggccggagggtggggcgggtggcggcggtggcagtccgaggtctggctccgcgcagtatatgacagtacgtcagcagcgggatggccctagcagtggcggcggctgcagaagcccaagcagccgcggccgcagtggaggctagagccggagcggcggcggcggcggcaccccggggagtttaagatggcggcgggggggacagggggcctgcgggaggagcagcgctatgggctgtcgtgcggacggctggggcaggacaacatcaccgtactgcatgtgaagctcaccgagacggcgatccgggcgctcgagacttaccagagccacaagaatttaattccttttcgaccttcaatccagttccaaggactccacgggcttgtcaaaattcccaaaaatgatcccctcaatgaagttcataactttaacttttatttgtcaaatgtgggcaaagacaaccctcagggcagctttgactgcatccagcaaacattctccagctctggagcctcccagctcaattgcctgggatttatacaagataaaattacagtgtgtgcaacaaacgactcgtatcagatgacacgagaaagaatgacccaggcagaggaggaatcccgcaaccgaagcacaaaagttatcaaacccggtggaccatatgtagggaaaagagtgcaaattcggaaagcacctcaagctgtttcagatacagttcctgagaggaaaaggtcaacccccatgaaccctgcaaatacaattcgaaagacacatagcagcagcaccatctctcagaggccatacagggacagggtgattcacttactggccctgaaggcctacaagaaaccggagctacttgctagactccagaaagatggtgtcaatcaaaaagacaagaactccctgggagcaattctgcaacaggtagccaatctgaattctaaggacctctcatataccttaaaggattatgtttttaaagagcttcaaagagactggcctggatacagtgaaatagacagacggtcattggagtcagtgctctctagaaaactaaatccgtctcagaatgctgcaggcaccagccgttcagaatctcctgtatgttctagtagagacgctgtatcttctcctcagaaacggcttttggattcagagtttattgatcctttaatgaataaaaaagcccgaatatctcacctgacgaacagagtaccaccaacactaaatggtcatttgaatcccaccagtgaaaaatctgctgcaggcctcccgctgccccctgcggctgctgccatccctacccctccaccgctgccttcaacctatctgcccatctcacatcctcctcagattgtaaattctaactccaactcccctagcactccagaaggccgggggactcaagacctacctgttgacagttttagtcaaaacgatagtatctatgaggaccagcaagacaaatatacctctaggacttctctggaaaccttaccccctggttccgttctactaaagtgtccaaagcctatggaagaaaaccattcaatgtctcacaaaaagtccaaaaagaagtctaaaaaacataaggaaaaggaccaaataaaaaagcacgacattgagactattgaggaaaaggaggaagatcttaagagagaagaggaaattgccaagctaaataactccagtccaaattccagtggaggagttaaagaggattgcactgcctccatggaaccttcagcaattgaactcccagattatttgataaaatatatcgctatcgtctcctatgagcaacgccagaattataaggatgacttcaatgcagagtatgatgagtacagagctttgcatgccaggatggagactgtagctagaagatttatcaaactagatgcacaaagaaagcgcctttctccaggctcaaaagagtatcagaatgttcatgaagaagtcttacaagaatatcagaagataaagcagtctagtcccaattaccatgaagaaaaatacagatgtgaatatcttcataacaagctggctcacatcaaaaggctaataggtgaatttgaccaacagcaagcagagtcatggtcctagaactctgcttggaccagaagatgtgaataaacttaagcttatttatttaaaattccaaatgagttgctctagattctaaaaaggtgaaactttggctgttgaaagtttcagtattagtaaacttgagttactttttcttttccattttactttgcttccctgcatttcgaagctgctctttctggtcctccccaccaccccacccccaagacttgtgtttgttaatagaaataatttttttaggtattggggatccattgtctatatttcaaatcagttttttttcctcaaaaacttgtgtttgttattagaaatgattttttagatattggggatccagtgtccacacttaaaagttgtatgtgtttaaaaaacaacaacagtaatgtgcaaggtgaaatgcttttggataaacgtaagcctattttctgacgtttcttaatgcaaactctttgccttaaatggtagaatatttagaaatttgcacaaaattaaaaaaataaacattgtcttggagggttaaaaaatagaaaggtgtatgtgtatagattcacatacacatatgtatatacaggctgacttgatctagaacattaaatccgccctgcaagttaaccccccattgcaatggttgccttaaggtgtttgctagttgtgtacatagtgtggttaatcattagctacactgcttcccacttgattagagcaatgggaagcatactgtggcctaccagcatctggaagtgtgtgctcgatctgtatgtgtgcagaggtggtgtggatgtgagcgtgcatgaaggaaaaaaagctgctactcctagtaggccaaacgctcaggttaaacaactgacgagtgttactgtagggtgtttttttgtttttttgttttttttcttctatcaaattgctacttttgttgtggaagacaaaagcatttccatttcaacgagtttgtcagctttattaatgttgggcaaaaattgatatgtcatgaaaatgaaacagatctatagttttgggacaaaattataaaatgaaatgtgtaggtaacctatttatatactgctataaagtattttttgaagagagatatgcaaagaagctattacctacataagaggtatatttaaagattttttttttcatcctggtgccaggaatataaaaaagagtggatatatttaaccataacatactgtgattcatcaaacagcacaaactttcatttcatggagtttatctgttgacattgatttaaactgtcacttgttttatcatgtgggaacataagttatgtggtcaaaaatataaggattttgaattaatgttgattcaagttgtattgtcttattgtattgtcttttcaaagtgctgccagttgaaaagggaagcattatgtttacaaatctgttttgaaatgtttgccaaaattttggtagtgtctttaataaagatgtttgtctccagcatccagaaaaataaatgaataactttgttgtgtatcactgtaaaccagaaaaatgttggttatctagaaaacttgagagagcatgtagattaacttttctctttggagttctaaaacattaactggaaagattagataatatactaaatgtatacagaagtatacagactatacaaagactgaaacaagtcccttttgcactacaactctataacattaccgcagaaattttggttctatgtagcatggacctcctaaggaattctgtttcttttagcattgagatccctggtgctctttttttacctcagaattggtacaatcattattaaacgttaatttatttcaaactttttaattgaaaaaaggaaagggaaacttaattggggataaattcaggcatcatattattatgatagagtctcctgagtggttcgtctataggtaatgaactcattggtgttatttcttggacatcttggccttttaatcaaagactgtgtgctgctatttgctatgagcaaggtttctcaaaagcaaaaggtgcttggaccatttggatcacctgagttagaatctctaggtatagggcccaagtatctgcattttcacaggtttcttgtaggtgactttctgcaagctaaagtatgagaaccattggcttggatgtagttctaaacttttaggtctgtaaatcttgaaatcttgaactgaaggtcaactattggcttttttttttttttaatgtccatcatgtcagcaggtgcaaatcacttttcccctttgcatgatctgaggcacctcctcagttgtttcactgccaactcttgtttcagaacctgtttacaaacaagccttccagttggtgaatggttagccattggagctcctaccctgtacatcagcacatcttctggtttacaagttgggtaacaatgaaagctggagatgctaaatggaaatccagcattgcatacccttagacctgatcacataccagtaaaagccttaatttagatgttagttgtatgtgttggacagatccttgcaaaagtgtgtctgtctattagttgtaaatttgaaaattataaatctctgaatctgctactatccaagtttcatcccttttgaagatgaggcatgagcctattaaaatatttataatcatttttcgtcccctactgcaagacttttagattcttacaaatgattactacaggaatagtggccacttaatgtcagttactccggtggaagaatttatctagttttttttcttttcttttttggaaggatggtgtgaaaaatagcaagattagagaatgagttgtatagttttttctatcacatttcatctaaaatgatttgaaggacttttgaagatttttaccaacatccttaaatcaactccaggttggatgaacaactgatttaaaacaaactaagagaacattaactagatgtgggctttttaaaatatataggtattgcatttcctaccttgttatttattccactttgaatactttagagggcttaactttcaactctttaaggtagtaatggatagttttatacttgttctcacaaaattgttatggtcagtttatatcattgctccatgcattgattataaaaattcagtattaattttttctgatcttataagctttataggagttttcttttctcttataaagtgtttcaccttatgtaaaacaaatgcctgcttgcatattggaagatgttgaaattagttttagacaaaagtggtccatcaattcagacactctgcttggatgccttacccttttcattagtgcattctttgcttctgaaacttggcagaaactcgttagccagtccactgcctttctgacaatgtgtggagtcacgtatgcttggtatatgcctttactacttttaaagttctacagtttattacttgcccaagtgttactaaatccttttcttatgtgtactggatggagaaaaaattatagccagcactttgagaggaaagttttcagaaacaatattaactggcactactaactgaaggccacaggagatgctatcaatgttatttgtaatctgaagattgaacaaggctgtgaggctcatttcaaactattttgaggtgttaaaatatatatatgctgtttctcagctgttccactcaaaccgtgttaggactctcaaaggtaaaatgtcacaggggcttttcagttgttacagagctcagcagctgtggttgcccctgttctacaccaatttcagttcaataaaaatgttaactttgcaaaaaaaaaaaaaaaaaaa

SEQ ID NO: 1918 - DNA, 3319 bp, Homo sapiens
gcttccggccgcggccctggcgcgtggtctgcgcgcgcccggccgtgcgtgcggatgcggggaggctgcgtgtgtgcgcagggagagaacgccggccaccttcccgcttccgagctgggtgcgcgccgagcacaggagattgcctgcgtttaggaggtggctgcgttgtgggaaaagctatcaaggaagaaattgccaaaccatgtctttttttctgttttcagagtagttcacaacagatctgagtgttttaattaagcatggaatacagaaaacaacaaaaaacttaagctttaatttcatctggaattccacagttttcttagctccctggacccggttgacctgttggctcttcccgctggctgctctatcacgtggtgctctccgactactcaccccgagtgtaaagaaccttcggctcgcgtgcttctgagctgctgtggatggcctcggctctctggactgtccttccgagtaggatgtcactgagatccctcaaatggagcctcctgctgctgtcactcctgagtttctttgtgatgtggtacctcagccttccccactacaatgtgatagaacgcgtgaactggatgtacttctatgagtatgagccgatttacagacaagactttcacttcacacttcgagagcattcaaactgctctcatcaaaatccatttctggtcattctggtgacctcccacccttcagatgtgaaagccaggcaggccattagagttacttggggtgaaaaaaagtcttggtggggatatgaggttcttacatttttcttattaggccaagaggctgaaaaggaagacaaaatgttggcattgtccttagaggatgaacaccttctttatggtgacataatccgacaagattttttagacacatataataacctgaccttgaaaaccattatggcattcaggtgggtaactgagttttgccccaatgccaagtacgtaatgaagacagacactgatgttttcatcaatactggcaatttagtgaagtatcttttaaacctaaaccactcagagaagtttttcacaggttatcctctaattgataattattcctatagaggattttaccaaaaaacccatatttcttaccaggagtatcctttcaaggtgttccctccatactgcagtgggttgggttatataatgtccagagatttggtgccaaggatctatgaaatgatgggtcacgtaaaacccatcaagtttgaagatgtttatgtcgggatctgtttgaatttattaaaagtgaacattcatattccagaagacacaaatcttttctttctatatagaatccatttggatgtctgtcaactgagacgtgtgattgcagcccatggcttttcttccaaggagatcatcactttttggcaggtcatgctaaggaacaccacatgccattattaacttcacattctacaaaaagcctagaaggacaggatactttgtggaaagtgttaaataaagtaggtactgtggaaaattcatggggaggtcagtgtgctggcttacactgaactgaaactcatgaaaaacccagactggagactggagggttacacttgtgatttattagtcaggcccttcaaagatgatatgtggaggaattaaatataaaggaattggaggtttttgctaaagaaattaataggaccaaacaatttggacatgtcattctgtagactagaatttcttaaaagggtgttactgagttataagctcactaggctgtaaaaacaaaacaatgtagagttttatttattgaacaatgtagtcacttgaaggttttgtgtatatcttatgtggattaccaatttaaaaatatatgtagttctgtgtcaaaaaacttcttcactgaagttatactgaacaaaattttacctgtttttggtcatttataaagtacttcaagatgttgcagtatttcacagttattattatttaaaattacttcaactttgtgtttttaaatgttttgacgatttcaatacaagataaaaaggatagtgaatcattctttacatgcaaacattttccagttacttaactgatcagtttattattgatacatcactccattaatgtaaagtcataggtcattattgcatatcagtaatctcttggactttgttaaatattttactgtggtaatatagagaagaattaaagcaagaaaatctgaagtattgtcttgtttttaaaaaatacagttcctagtgtttttagaagtcacttaatttgtctcatttttccacctggaaattaggaataatgtagaatgcaaggcagtaatttccttttggaaaggactctgaaggcagaaaagaagggagagaacctcatgggcagaatattataaaaagagtgtcatattccagcatttgaattggaaagagaagagtgaagatccaagttgcattattaatctgccctgtgttttttccttttaacaatcagtttgagctgctgctgttatgagtttctcatcaagatgaaagccctaatatgtaaagtcaaatccgatttaaattttgtgcttttatagaaagaaatttcttcatagacgtggtgatatatcatttgttggacctgctaatagtaggtcaaaggggagcactccttgccccctgttcctgggtttatgcagttttctttttagagtttatatagggcaagtggttctttttctctgaattacaggatggaaaaaggtcatatcctttgtcaggaaatataaacttgaaagtatgtagtcagctcttgtaatactcatatttatgattgtcctatatgaaaaacaacttcagttaaaactataatgtgtgattctgtataacaaggtgatgtctgtttcccagggctcagacctaatccagttataataaaatcaattaaatgaaatattctatagaatcgatctatgcccttgttaatctccatccatataggagtcacgttctttaagacagatggtggtagttatttttgtggcatggttagatttgactggttttgcagaagattacagttatgtactgcataatgacatatacaatagtggtcccataaaattataatggagcagaaaatctattgcctcatgatgttttagccgttttaatgtcatagcctagtgcattactcacgtgtctgtggagatgctggtgtaaacaaacctactacactgccagttgtataaaagtacagcacattcagttatgtacagtatgtaatactgataatgacaataaatgacaccggtttgtgtatttactttttataaa

SEQ ID NO: 1919 - DNA, 1602 bp, Homo sapiens; identical to SEQ ID NO: 559

SEQ ID NO: 1920 - DNA, 3672 bp, Homo sapiens
gcccggttacttcctccagagactgacgagtgcggtgtcgctccagctcagagctcccggagccgcccggccagcgtccggcctccctgatcgtctctggccggcgccctcgccctcgcccggcgcgcaccgagcagccgcgggcgccgagcagccaccgtcccgaccaagcgccggccctgcccgcagcggcaggatgaatgatttcggaatcaagaatatggaccaggtagcccctgtggctaacagttacagagggacactcaagcgccagccagcctttgacacctttgatgggtccctgtttgctgtttttccttctctaaatgaagagcaaacactgcaagaagtgccaacaggcttggattccatttctcatgactccgccaactgtgaattgcctttgttaaccccgtgcagcaaggctgtgatgagtcaagccttaaaagctaccttcagtggcttcaaaaaggaacagcggcgcctgggcattccaaagaacccctggctgtggagtgagcaacaggtatgccagtggcttctctgggccaccaatgagttcagtctggtgaacgtgaatctgcagaggttcggcatgaatggccagatgctgtgtaaccttggcaaggaacgctttctggagctggcacctgactttgtgggtgacattctctgggaacatctggagcaaatgatcaaagaaaaccaagaaaagacagaagatcaatatgaagaaaattcacacctcacctccgttcctcattggattaacagcaatacattaggttttggcacagagcaggcgccctatggaatgcagacacagaattaccccaaaggcggcctcctggacagcatgtgtccggcctccacacccagcgtactcagctctgagcaggagtttcagatgttccccaagtctcggctcagctccgtcagcgtcacctactgctctgtcagtcaggacttcccaggcagcaacttgaatttgctcaccaacaattctgggactcccaaagaccacgactcccctgagaacggtgcggacagcttcgagagctcagactccctcctccagtcctggaacagccagtcgtccttgctggatgtgcaacgggttccttccttcgagagcttcgaagatgactgcagccagtctctctgcctcaataagccaaccatgtctttcaaggattacatccaagagaggagtgacccagtggagcaaggcaaaccagttatacctgcagctgtgctggccggcttcacaggaagtggacctattcagctgtggcagtttctcctggagctgctatcagacaaatcctgccagtcattcatcagctggactggagacggatgggagtttaagctcgccgaccccgatgaggtggcccgccggtggggaaagaggaaaaataagcccaagatgaactacgagaagctgagccggggcttacgctactattacgacaagaacatcatccacaagacgtcggggaagcgctacgtgtaccgcttcgtgtgcgacctccagaacttgctggggttcacgcccgaggaactgcacgccatcctgggcgtccagcccgacacggaggactgaggtcgccgggaccaccctgagccggccccaggctcgtggactgagtgggaagcccatcctgaccagctgctccgaggacccaggaaaggcaggattgaaaatgtccaggaaagtggccaagaagcagtggccttattgcatcccaaaccacgcctcttgaccaggctgcctcccttgtggcagcaacggcacagctaattctactcacagtgcttttaagtgaaaatggtcgagaaagaggcaccaggaagccgtcctggcgcctggcagtccgtgggacgggatggttctggctgtttgagattctcaaaggagcgagcatgtcgtggacacacacagactatttttagattttcttttgccttttgcaaccaggaacagcaaatgcaaaaactctttgagagggtaggagggtgggaaggaaacaaccatgtcatttcagaagttagtttgtatatattattataatcttataattgttctcagaatcccttaacagttgtatttaacagaaattgtatattgtaatttaaaataattatataactgtatttgaaataagaattcagacatctgaggttttatttcatttttcaatagcacatatggaattttgcaaagatttaatctgccaagggccgactaagagaagttgtaaagtatgtattatttacatttaatagacttacagggataaggcctgtggggggtaatccctgctttttgtgtttttttgtttgtttgtttgtttgtttttggggggttttcttgccttggttgtctggcaaggactttgtacatttgggagtttttatgagaaacttaaatgttattatctgggcttatatctggcctctgctttctcctttaattgtaaagtaaaagctataaagcagtatttttcttgacaaatggcatatgttttccacttctttgcatgcgtttaagtcagtttatacacaaaatggattttattttttagtttaactgtgtttctccgacagctcacctctctctgaccacccagccatttccttcctgtgctccacgttcttctgtgtgattaaaataagaatattatttttggaaatatgcaactccttttcagagatcaggagggatttatgtagcagctatttttactgcaaaagtaattcactggaaaaaaaatgtaatttgtaagaaagctttatttttatctcagctctatgtaaagttaaagttactgtacagagctgaaggacggggggcggtaggggtcttgatgaaacctcttgaacgaagcacagtttgtcccatctttgttcactcgtgtgtctcaaccatcttaatagcatgctgctcctttttgctcagtgtccacagcaagatgacgtgattcttattttcttggacacagactattctgaggcacagagcggggacttaagatgggaaagagaaagcatcggagccattcattcggagaaaacgttttgatcaaaatggagacttttgtagtcgtttcaaaagagcacctgagtcatgtgtattcccggcctttataaatgacccggtcaagttggtttcaaagtccgacaggcttgtctgtttactagctgcgtggccttggacgggtggctgacatctgtaaagaatcctcctgtgatgaaactgaggaatcgggtggccgggcaagctgggaagagcaaagccagagctgcgctgcctcaatacccacaaaagaccattcccagtatacataagcacaggatgtttttctcaagagggatgtatttatcacttggacatctgtttataatataaacagacatgtgactgggaacatcttgctgccaaaagaatcctaggcagtggctcattgtatgtgaggttgaaccacgtgaaattgccaatattaggctggcttttatctacaaagaaggagtttcatggggttcagcctaacagttatggaaactacagtccttataaaccattggcatggtaataaacagatcttaagtataaaaattttgtaattgggcctttactctctcaataataaagtattttgtttatataaa

SEQ ID NO: 1921 - DNA, 4320 bp, Homo sapiens; identical to SEQ ID NO: 545

SEQ ID NO: 1922 - DNA, 1678 bp, Homo sapiens; identical to SEQ ID NO: 645

SEQ ID NO: 1923 - DNA, 5672 bp, Homo sapiens; identical to SEQ ID NO: 1495

SEQ ID NO: 1924 - DNA, 4559 bp, Homo sapiens; identical to SEQ ID NO: 667

SEQ ID NO: 1925 - DNA, 3438 bp, Homo sapiens
cggttctttccggaaattatgactgcagctgttttcactccgctgtgactcagagcgctccgggctgcaggagaggaagaaatcttgcatcaccatggtgcacttctgtggcctactcaccctccaccgggagccagtgccgctgaagagtatctctgtgagcgtgaacatttacgagtttgtggctggtgtgtctgcaactttgaactacgagaatgaggagaaagttcctttggaggccttctttgtgttccccatggatgaagactctgctgtttacagctttgaggccttggtggatgggaagaaaattgtagcagaattacaagacaagatgaaggcccgcaccaactatgagaaagccatctcccagggccaccaggccttcttattggagggggacagcagctccagggatgtcttctcttgcaatgtgggtaacctccaacctgggtcgaaggcggcagtcaccctgaagtatgtgcaggagctgcctctggaagcagatggggctctgcgctttgtgctcccagctgtcctgaatcctagataccagttctctgggtcgtctaaggacagttgccttaatgtgaagactcctatagtccctgtggaggacctgccctacacactcagcatggtcgccaccatagattcccagcatggcattgagaaggtccaatccaactgccccttgagtcctaccgagtacctaggagaggacaagacttctgctcaggtttccctggctgctggacacaagtttgatcgggacgtggaactcctgatttactacaatgaggtgcatacccccagcgtggttttggagatggggatgcctaacatgaagccaggtcatttgatgggagatccatctgcaatggtgagtttctatccaaatatcccagaagatcaaccatcaaatacctgtggagagtttatctttctcatggaccgctcgggaagtatgcagagccccatgagtagccaggatacatctcagctgcgaatacaggcagccaaggaaacactgattttgctgctgaagagtttacctataggctgttatttcaacatctatggatttggctcttcctatgaggcatgctttccggagagtgtgaagtacactcagcaaacaatggaggaggctctggggagagtgaagcttatgcaggccgacctagggggcactgaaatcttggcaccactccagaacatttacaggggaccctccatcccaggccaccccctacagctttttgtctttacagatggagaagttacagacacgtttagtgtaattaaagaagttaggatcaacagacagaaacacaggtgtttctcatttggtattggagaaggcacctccaccagcctaataaaaggtattgcccgggcatcagggggcacctcagaatttatcacaggcaaagacaggatgcagtccaaggctctcaggactctgaaacgctctctgcagcctgtggtagaggatgtctctctgagctggcatttgcctcctggtctgtctgctaaaatgctttccccagaacagactgtcatctttaggggtcagagattaatcagctatgcccagctgaccgggaggatgccagcagcagagacaacaggagaagtatgcctcaaatatacactccagggcaagacttttgaggataaggtgacatttcctctacaacccaagcctgatgtcaacctcaccattcaccgccttgctgccaagtccttgctccagaccaaggacatgggcctcagggagactccagcaagtgataaaaaagatgcattgaaccttagccttgagtctggtgtcataagctccttcacagctttcattgctatcaataaggagctcaacaagccggttcaggggcctctggctcatagggacgtcccaaggccaattctgttgggtgcttctgccccattgaagataaaatgccaatcaggttttcgaaaggccttacactctgaccgtcctccttctgcatctcagcccagaggggaacttatgtgttataaggccaagacattccagatggacgattacagtctctgtgggttgataagtcacaaggaccagcacagtccaggctttggagagaatcaccttgtgcagctgatttaccaccaaaatgcaaatggttcctgggatctgaatgaagatctagccaagatcctaggtatgagtttggaagaaataatggctgcacagcctgccgagcttgtggattcctcaggctgggccaccatcctggccgtgatctggctgcacagcaatggtaaggacttgaagtgtgaatgggagcttctggaaaggaaggccgtggcctggatgcgtgcccatgcaggctccaccatgccttcggttgtgaaagctgctattactttcctgaagtcatctgtggatcctgctatctttgccttttgaagataccatccagaaaaagaagtgcctttaatttgctactgtcatttcctctagtatcacttttgctgtgatgatgtgttcttgtgtattataactctttattttttgccataaaagtaaaggatgcttactccacttcgcttctctgctccaggttcactttggatatgatctttcttttcccaacatatgccctcagaaaagtgacagtggtcccagaacctattccctttcttgagggagttcaaaacattcataggcagtaatgttcctcccagggtttccagggaaacaacatgaaaaacaggtgacatgaactacagactaaagattgcagcatttatgttagagaatgcttgaattagagaattttctgcattatctttgtctgttcactttctatcttatatacttatcagggccatactggtaagcttgcgtaggaggagttagagggaagttgaaagccaacatctggatcaatgtaatgtcaagatcacaaagacagagactgcaggggtccactgtgagaggtgacactgttggggaccttcctgattcattcttcttgggctttgctagcctgtacaacctacatgtcttttcttccactgcctgaaagacttgggttgaactataactgttggagagagatgttcctctttaatcatgaaacaccttaagaagtctataatgcaatccttagtcctaccctgaacctatgtgtcctctaagtcaggccctgatctagtgcagtaaagggaagggtgggcttaatgggagctttgcctgggacctgaacctggagcacttaccgcattaggaagaaaggagctccccgtaatcgttcctgacccttgtgtctcatataccctatcctggtggaaatgaccctatttgatatgctgtcccttaaaataacttgtatcaatattaaaatgactatttctaccctttgatgagtaaaaaaaaaaaaaaaaaaa

SEQ ID NO: 1926 - DNA, 6936 bp, Homo sapiens; identical to SEQ ID NO: 341

SEQ ID NO: 1927 - DNA, 4813 bp, Homo sapiens; identical to SEQ ID NO: 600

SEQ ID NO: 1928 - DNA, 2269 bp, Homo sapiens
agtataaacaaggaacccgactggttagacagattttgtttttcttcttcccgcgcgctttagctccctgtcctttggtcgcatttgtgggcgcgcggcacgcagccgggaggccgaggactcggagttcacctgcaggaaagtatgcctcagactcctcccttttcagcaatgtttgacagcagtggttacaatcgaaacctctatcagtctgcagaggacagctgtggagggttgtattaccatgacaacaacctcctctctggatccctggaagcactcatccagcacttagtacctaatgtggattactatccagatagaacatacatatttaccttcctactcagttctcggttatttatgcatccgtatgagctaatggccaaagtttgccacttatgtgttgagcaccagagactaagtgatcctgatagtgataagaaccagatgagaaaaattgcacccaaaatccttcaactcctcacggaatggacggaaacatttccctatgattttcgggatgaaagaatgatgagaaacttaaaagatctggctcaccgaatagccagtggcgaagagcagacatacagaaagaatgtccagcaaatgatgcagtgtctgatccgcaagcttgctgcgctcagccagtacgaagaagtcctggcaaaaatcagctccacatccacagatcggctcacagttctcaagaccaagccacagtctatacaaagggatatcattactgtctgcaacgacccttacacgttggcccagcagctgactcatatagagctggagaggctcaattatattgggccagaagaatttgttcaggcgttcgtgcagaaggaccctttggataatgacaagagttgctacagtgaacggaagaaaacacgaaacttagaagcttacgtggaatggtttaatcgcctcagctacttggttgctacagaaatctgtatgcctgttaagaaaaaacaccgagcaagaatgattgagtatttcattgacgtagctcgggagtgttttaacattggcaacttcaactccttgatggcgataatctctggtatgaatatgagcccagtctctcgactaaaaaaaacttgggccaaagtgaagactgcaaaatttgacattcttgagcatcagatggacccttcaagcaatttctataattatcgaacagctcttcgtggggcagcacaaaggtctttaactgctcatagtagtagagaaaagattgtgataccattcttcagtctcttaatcaaagatatttatttcctcaatgagggttgtgccaaccgccttcccaatggccatgtcaattttgagaaattttgggaactggccaaacaagtgagtgaatttatgacatggaaacaagtggagtgtccatttgagagggaccggaagatcttgcagtatctgctcacagtaccagtcttcagtgaagatgctctctacttggcttcttatgagagtgaaggacctgaaaatcatatagagaaagacagatggaagtctttaaggtcgagcctcttaggcagagtttaacacatgggagctgcctgcctgctgctgctgctgcttcctgcagatcatggaggggctggcctttgttttctggcatctcgtaccacgaacgctcatgaagaccctgcagtcattggagcacccgggtcagcaaagcacacaagctcactcaagaccagatggagaacttatttcctgcagctgacagatagactcagattttgtgagactgaaatgttcactgaagacacttgagaaagaatcctctaaaaatcccggctctgcacattattcatctcctggaatttccatgtgaatcacagctctgcacctggatggagttttcttttgtgtgtgtgtgttttttttaatttggttgaacatttgctgctaatgggacttgcccagctgagtgctggctctgaggaagcccacgtttcttttgttaacttaaatgaagaaaggagtggagggaggggatctaaaacccccccgtttagatcccaaaccttagctcaaccagtattgccagagaggggtaagactggttggaagctgactgcagactttgtttccccttagtatgtgctgtgttgtaaatttttctcctccctcctcctacaaggttttgagttggctgctggttagcaaactcctttttacccatataagttatttaatataataatgaagctcaacactgtggtaggaaaatagccactag

SEQ ID NO: 1929 - DNA, 2449 bp, Homo sapiens
aaggctcctcagccgagcgccgagcggtcgatcgccgtagctcccgcagcctgcgatctccagtctgtggctcctaccagccattgtaggccaataatccgttatggagcatgcctttaccccgttggagcccctgctttccactgggaatttgaagtactgccttgtaattcttaatcagcctttggacaactattttcgtcatctttggaacaaagctcttttaagagcctgtgccgatggaggtgccaaccgcttatatgatatcaccgaaggagagagagaaagctttttgcctgaattcatcaatggagactttgattctattaggcctgaagtcagagaatactatgctactaagggatgtgagctcatttcaactcctgatcaagaccacactgactttactaagtgccttaaaatgctccaaaagaagatagaagaaaaagacttaaaggttgatgtgatcgtgacactgggaggccttgctgggcgttttgaccagattatggcatctgtgaataccttgttccaagcgactcacatcactccttttccaattataataatccaagaggaatcgctgatctacctgctccaaccaggaaagcacaggttgcatgtagacactggaatggagggtgattggtgtggccttattcctgttggacagccttgtatgcaggttacaaccacaggcctcaagtggaacctcacaaatgatgtgcttgcttttggaacattggtcagtacttccaatacctacgacgggtctggtgttgtgactgtggaaactgaccacccactcctctggaccatggccatcaaaagctaacctgttgactggcatccataagtgtgcctctgccttatctcatttctcaacagttcattgctcaacaagaacgattcacctgggtttgcaagaatctaaacctctctaggggaagcccactgggtttaaagatgttagtgtttagataatacaggtaacattataaatgacagatctcaattttatagtagtgggaaagatacatgctaagaaagcaaataagctctattatattcggttggaacctaatgggaatcattccactatacaattcagtactgattattcttcttacattattaatcattccatttatcctagaaaattgtttttaatttgaatcagagaaaactgttgaggttcctcttggagtctagaacatccttaaatgtctaacaacaagggctacctctgagtaccttttagtattagttttctgtatatgatatatattatcttatactgaaaaaaaattcctttcagattggggtgttagaagtgcaccaggtcactctgaccttattactgtctttggtattgtcttaaataaatcaagaatcattgacctaattgttaaatttaaaaataggtagttagcaataggtggaaagagaaatgatgtgaaagataaatgatgattcgtggagccctactcacacattaacccccaaattcaaaagtaagaatgcaaaagtctagagggggtaacagtctgcatcatcatcacaacctaaatggagaaagctgtgcagaggaaacttaagcataaaaattgaattcgtttctgacataccttagactgaaaaactgttggttcatccagaagtgtattcatattaccagaaaatgagtttgtctatggggatacatgaacttcatatactaaggagcctaactccaaagcctgcgttctcatcccagtctgatattcacctaagtttccggacccttttccttagctgtaaaatggaagcggttggactgatggtgtctgaggttctttcccacactgaaattctaaatattgacacttagcagtcatagggctgataatacacacagttactgacttagcctaaacaacctggtgcatcgaaatgtattcacctttcttttgtaaagagaccatcttctatcttctttccacctttctctgttttatgaaaccaactgttgacatacaaaccatgattgaaggagaacctgtccaacatgttttatgtacacaaatccctatgttgctataagaaaagtgaaagtaactgttttcttcttggtgctatgacagtgtgagactcaggttgtctgtagagaatgaaaggagcagtggcccgcgtgattgtggcatttaaggagcagtggcccatgtgactgtggcattttcggcacttttcattactttctgcttgaccggaagttgaggcttagctatgtttccatcttcagtttctgaagactagttatatattccttactagaaatatattcataatatataaaagaaatatatctgtgattttaaaattttgctaccaaagaatgcatgttctgtgtgccctgaaaatgttaccagtgttaataaatggatacttatcaaaaaagaaaaaaaaaaaa

SEQ ID NO: 1930 - DNA, 1634 bp, Homo sapiens
gggtggggaagcttagagaccggtgagggagcagagctggggcgcctgtgtacagggatagagcccggcggcagcagggcgcggcttccctttcccggggcctggggccgcaatcaggtggagtcgagaggccggaggaggggcaggaggaaggggtgcggtcgcgatccggacccggagccagcgcggagcacctgcgcccgcggctgacaccttcgctcgcagtttgttcgcagtttactcgcacaccagtttcccccaccgcgctttggattagtgtgatctcagctcaaggcaaaggtgggatatcatggcatctatctgggttggacaccgaggaacagtaagagattatccagactttagcccatcagtggatgctgaagctattcagaaagcaatcagaggaattggaactgatgagaaaatgctcatcagcattctgactgagaggtcaaatgcacagcggcagctgattgttaaggaatatcaagcagcatatggaaaggagctgaaagatgacttgaagggtgatctctctggccactttgagcatctcatggtggccctagtgactccaccagcagtctttgatgcaaagcagctaaagaaatccatgaagggcgcgggaacaaacgaagatgccttgattgaaatcttaactaccaggacaagcaggcaaatgaaggatatctctcaagcctattatacagtatacaagaagagtcttggagatgacattagttccgaaacatctggtgacttccggaaagctctgttgactttggcagatggcagaagagatgaaagtctgaaagtggatgagcatctggccaaacaagatgcccagattctctataaagctggtgagaacagatggggcacggatgaagacaaattcactgagatcctgtgtttaaggagctttcctcaattaaaactaacatttgatgaatacagaaatatcagccaaaaggacattgtggacagcataaaaggagaattatctgggcattttgaagacttactgttggccatagttaattgtgtgaggaacacgccggcctttttagccgaaagactgcatcgagccttgaagggtattggaactgatgagtttactctgaaccgaataatggtgtccagatcagaaattgaccttttggacattcgaacagagttcaagaagcattatggctattccctatattcagcaattaaatcggatacttctggagactatgaaatcacactcttaaaaatctgtggtggagatgactgaaccaagaagataatctccaaaggtccacgatgggctttcccaacagctccaccttacttcttctcatactatttaagagaacaagcaaatataaacagcaacttgtgttcctaacaggaattttcattgttctataacaacaacaacaaaagcgattattattttagagcatctcatttataatgtagcagctcataaatgaaattgaaaatggtattaaagatctgcaactactatccaacttatatttctgctttcaaagttaagaatctttatagttctactccattaaatataaagcaagataataaaaattgttgcttttgttaaaagtaaaaaaaaaaaaaaaaaa

SEQ ID NO: 1931 - DNA, 934 bp, Homo sapiens; identical to SEQ ID NO: 1526

SEQ ID NO: 1932 - DNA, 3435 bp, Homo sapiens
acagcaactatgaaataatcgtagtatgagaggcagagatcggggcgagacaatggggatgtgggcgcgggagccccgttccggcttagcagcacctcccagccccgcagaataaaaccgatcgcgccccctccgcgcgcgccctcccccgagtgcggagcgggaggaggcggcggcggccgaggaggaggaggaggaggccccggaggaggaggcgttggaggtcgaggcggaggcggaggaggaggaggccgaggcgccggaggaggccgaggcgccggagcaggaggaggccggccggaggcggcatgagacgagcgtggcggccgcggctgctcggggccgcgctggttgcccattgacagcggcgtctgcagctcgcttcaagatggccgcttggctcgcattcattttctgctgaacgacttttaactttcattgtcttttccgcccgcttcgatcgcctcgcgccggctgctctttccgggattttttatcaagcagaaatgcatcgaacaacgagaatcaagatcactgagctaaatccccacctgatgtgtgtgctttgtggagggtacttcattgatgccacaaccataatagaatgtctacattccttctgtaaaacgtgtattgttcgttacctggagaccagcaagtattgtcctatttgtgatgtccaagttcacaagaccagaccactactgaatataaggtcagataaaactctccaagatattgtatacaaattagttccagggcttttcaaaaatgaaatgaagagaagaagggatttttatgcagctcatccttctgctgatgctgccaatggctctaatgaagatagaggagaggttgcagatgaagataagagaattataactgatgatgagataataagcttatccattgaattctttgaccagaacagattggatcggaaagtaaacaaagacaaagagaaatctaaggaggaggtgaatgataaaagatacttacgatgcccagcagcaatgactgtgatgcacttaagaaagtttctcagaagtaaaatggacatacctaatactttccagattgatgtcatgtatgaggaggaacctttaaaggattattatacactaatggatattgcctacatttatacctggagaaggaatggtccacttccattgaaatacagagttcgacctacttgtaaaagaatgaagatcagtcaccagagagatggactgacaaatgctggagaactggaaagtgactctgggagtgacaaggccaacagcccagcaggaggtattccctccacctcttcttgtttgcctagccccagtactccagtgcagtctcctcatccacagtttcctcacatttccagtactatgaatggaaccagcaacagccccagcggtaaccaccaatcttcttttgccaatagacctcgaaaatcatcagtaaatgggtcatcagcaacttcttctggttgatacctgagactgttaaggaaaaaaattttaaacccctgatttatatagatatcttcatgccattacagctttctagatgctaatacatgtgactatcgtccaatttgctttcttttgtagtgacattaaatttggctataaaagatggactacatgtgatactcctatggacgttaattgaaaagaaagattgttgttataaagaattggtttcttggaaagcaggcaagactttttctctgtgttaggaaagatgggaaatggtttctgtaaccattgtttggatttggaagtactctgcagtggacataagcattgggccatagtttgttaatctcaactaacgcctacattacattctccttgatcgttcttgttattacgctgttttgtgaacctgtagaaaacaagtgctttttatcttgaaattcaaccaacggaaagaatatgcatagaataatgcattctatgtagccatgtcactgtgaataacgatttcttgcatatttagccattttgattcctgtttgatttatacttctctgttgctacgcaaaaccgatcaaagaaaagtgaacttcagttttacaatctgtatgcctaaaagcgggtactaccgtttattttactgacttgtttaaatgattcgcttttgtaagaatcagatggcattatgcttgttgtacaatgccatattggtatatgacataacaggaaacagtattgtatgatatatttataaatgctataaagaaatattgtgtttcatgcattcagaaatgattgttaaaattctcccaactggttcgacctttgcagatacccataacctatgttgagccttgcttaccagcaaagaatatttttaatgtggatatctaattctaaagtctgttccattagaagcaattggcacatctttctatactttatatacttttctccagtaatacatgtttactttaaagattgttgcagtgaagaaaaacctttaactgagaaatatggaaaccgtcttaattttccattggctatgatggaattaatattgtattttaaaaatgcatattgatcactataattctaaaacaattttttaaataaaccagcaggttgctaaaagaaggcattttatctaaagttattttaataggtggtatagcagtaattttaaatttaagagttgcttttacagttaacaatggaatatgccttctctgctatgtctgaaaatagaagctatttattatgagcttctacaggtatttttaaatagagcaagcatgttgaatttaaaatatgaataaccccacccaacaattttcagtttattttttgctttggtcgaacttggtgtgtgttcatcacccatcagttatttgtgagggtgtttattctatatgaatattgtttcatgtttgtatgggaaaattgtagctaaacatttcattgtccccagtctgcaaaagaagcacaattctattgctttgtcttgcttatagtcattaaatcattacttttacatatattgctgttacttctgctttctttaaaaatatagtaaaggatgttttatgaagtcacaagatacatatatttttattttgacctaaatttgtacagtcccattgtaagtgttgtttctaattatagatgtaaaatgaaatttcatttgtaattggaaaaaatccaataaaaaggatattcatttagaaaatagctaagatctttaataaaaatttgatatgaaaagcacaatgtgcagaagttatggaaaacctatagaggattacaacaggtaaacgttaaagagaatacattgctgacttatagtgatgtggctaagaagtacatgctttgttgtaaaattgcttgaaagcccattgaaagatgtatctgtttatttacagtctttgaagtaaaagttaccaatgtttgccaataaaaa

SEQ ID NO: 1933 - DNA, 2062 bp, Homo sapiens
gtcagtccctcctgtagccgccgccgccgccgcccgccgcccctctgccagcagctccggcgccacctcgggccggcgtctccggcgggcgggagccaggcgctgacgggcgcggcgggggcggccgagcgctcctgcggctgcgactcaggctccggcgtctgcgcttccccatggggctggcctgcggcgcctgggcgctctgagattgtcactgctgttccaagggcacacgcagagggatttggaattcctggagagttgcctttgtgagaagctggaaatatttctttcaattccatctcttagttttccataggaacatcaagaaatcatgaacaactttggtaatgaagagtttgactgccacttcctcgatgaaggttttactgccaaggacattctggaccagaaaattaatgaagtttcttcttctgatgataaggatgccttctatgtggcagacctgggagacattctaaagaaacatctgaggtggttaaaagctctccctcgtgtcacccccttttatgcagtcaaatgtaatgatagcaaagccatcgtgaagacccttgctgctaccgggacaggatttgactgtgctagcaagactgaaatacagttggtgcagagtctgggggtgcctccagagaggattatctatgcaaatccttgtaaacaagtatctcaaattaagtatgctgctaataatggagtccagatgatgacttttgatagtgaagttgagttgatgaaagttgccagagcacatcccaaagcaaagttggttttgcggattgccactgatgattccaaagcagtctgtcgtctcagtgtgaaattcggtgccacgctcagaaccagcaggctccttttggaacgggcgaaagagctaaatatcgatgttgttggtgtcagcttccatgtaggaagcggctgtaccgatcctgagaccttcgtgcaggcaatctctgatgcccgctgtgtttttgacatgggggctgaggttggtttcagcatgtatctgcttgatattggcggtggctttcctggatctgaggatgtgaaacttaaatttgaagagatcaccggcgtaatcaacccagcgttggacaaatactttccgtcagactctggagtgagaatcatagctgagcccggcagatactatgttgcatcagctttcacgcttgcagttaatatcattgccaagaaaattgtattaaaggaacagacgggctctgatgacgaagatgagtcgagtgagcagacctttatgtattatgtgaatgatggcgtctatggatcatttaattgcatactctatgaccacgcacatgtaaagccccttctgcaaaagagacctaaaccagatgagaagtattattcatccagcatatggggaccaacatgtgatggcctcgatcggattgttgagcgctgtgacctgcctgaaatgcatgtgggtgattggatgctctttgaaaacatgggcgcttacactgttgctgctgcctctacgttcaatggcttccagaggccgacgatctactatgtgatgtcagggcctgcgtggcaactcatgcagcaattccagaaccccgacttcccacccgaagtagaggaacaggatgccagcaccctgcctgtgtcttgtgcctgggagagtgggatgaaacgccacagagcagcctgtgcttcggctagtattaatgtgtagatagcactctggtagctgttaactgcaagtttagcttgaattaagggatttggggggaccatgtaacttaattactgctagttttgaaatgtctttgtaagagtagggtcgccatgatgcagccatatggaagactaggatatgggtcacacttatctgtgttcctatggaaactatttgaatatttgttttatatggatttttattcactcttcagacacgctactcaagagtgcccctcagctgctgaacaagcatttgtagcttgtacaatggcagaatgggccaaaagcttagtgttgtgacctgtttttaaaataaagtatcttgaaataattaggc

SEQ ID NO: 1934 - DNA, 2220 bp, Homo sapiens
ttggtagacgtgggcgtggctttgagattcccccatgctgcgatgtggggggagtctgctctgtctgtcctaactctctctgatcttctgacttgggaaaaacaaactcgaagttaatcattcccagctcaaagccttgtgcaagtgctctctgccttcacgcttgcttcctttgggagagaaccttcctcttcttgatcggggattcaggaaggagcccaggagcagaggaagtagagagagagacaacatgttacatctgcaccattcttgtttgtgtttcaggagctggctgccagcgatgctcgctgtactgctaagtttggcaccatcagcttccagcgacatttccgcctcccgaccgaacatccttcttctgatggcggacgaccttggcattggggacattggctgctatggcaacaacaccatgaggactccgaatattgaccgccttgcagaggacggcgtgaagctgacccaacacatctctgccgcatctttgtgcaccccaagcagagccgccttcctcacgggcagataccctgtgcgatcagggatggtttccagcattggttaccgtgttcttcagtggaccggagcatctggaggtcttccaacaaatgagacaacttttgcaaaaatactgaaagagaaaggctatgccactggactcattggaaaatggcatctgggtctcaactgtgagtcagccagtgatcattgccaccaccctctccatcatggctttgaccatttctacggaatgcctttctccttgatgggtgattgcgcccgctgggaactctcagagaagcgtgtcaacctggaacaaaaactcaacttcctcttccaagtcctggccttggttgccctcacactggtagcagggaagctcacacacctgatacccgtctcgtggatgccggtcatctggtcagccctttcggccgtcctcctcctcgcaagctcctattttgtgggtgctctgattgtccatgccgattgctttctgatgagaaaccacaccatcacggagcagcccatgtgcttccaaagaacgacaccccttattctgcaggaggttgcgtcctttctcaaaaggaataagcatgggcctttcctcctctttgtttcctttctacacgttcacatccctcttatcactatggagaacttcctcgggaagagtctccacgggctgtatggggacaacgtagaggagatggactggatggtaggacggatccttgacactttggacgtggagggtttgagcaacagcaccctcatttattttacgtcggatcacggcggttccctagagaatcaacttggaaacacccagtatggtggctggaatggaatttataaaggtgggaagggcatgggaggatgggaaggtgggatccgcgtgcccgggatcttccgctggcccggggtgctcccggccggccgagtgattggcgagcccacgagtctgatggacgtgttccccaccgtggtccggctggcgggcggcgaggtgccccaggacagagtgattgacggccaagaccttctgcccttgctcctggggacagcccaacactcagaccacgagttcctgatgcattattgtgagaggtttctgcacgcagccaggtggcatcaacgggacagaggaacaatgtggaaagtccactttgtgacgcctgtgttccagccagagggagccggtgcctgctatggaagaaaggtctgcccgtgctttggggaaaaagtagtccaccacgatccacctttgctctttgacctctcaagagacccttctgagacccacatcctcacaccagcctcagagcccgtgttctatcaggtgatggaacgagtccagcaggcggtgtgggaacaccagcggacactcagcccagttcctctgcagctggacaggctgggcaacatctggagaccgtggctgcagccctgctgtggcccgttccccctctgctggtgccttagggaagatgacccacaataaatgtctgcagtgaaaagctggagccccgattcctaaattttgtcactcaaattgaaacaaaccagctggccatggtggttgtcatcccagcactttaggaggccaccacaggaggatcactcccgtgatcaaaaccaacctgggcaacatgatgaaactctagctctacaaaacaaaaataaaaaaaaaattagcctgca

SEQ ID NO: 1935 - DNA, 8516 bp, Homo sapiens; identical to SEQ ID NO: 621

SEQ ID NO: 1936 - DNA, 2334 bp, Homo sapiens
agattcgcacaaacccggaagcgggtcgcgtggagtgacggtcccaccgcggggatatctcttccaaatgcatgatgaaggagttctcatccacagcgcaaggcaatacagaagtgatccacacagggacattgcaaagacatgaaagtcatcacattagagatttttgcttccaggaaattgagaaagatattcataactttgagtttcagtggcaagaagaggaaaggaatggtcacgaagcacccatgacagaaatcaaagagttgactggtagtacagaccgacatgatcaaaggcatgctggaaacaagcctattaaagatcagcttggatccagctttcattcgcatctgcctgaactccacatatttcagcctgaatggaaaattggtaatcaagttgagaagtctatcatcaatgcctccttaattttgacatcccaaagaatttcttgtagtcccaaaacccgtatttctaataactatgggaataattccctccattcttcattacccatacaaaaattgggaagtacacatgagagaaaaatctttccaatgtaatgagagtggcaaatcctttaattatagctaactcttaaggaaatatcagataatccatttaggatagaaacaatataaatgtgaggtatgtgacaaggtctttaatcagaattgattccttgtatgccataatagatgtcacactggtaagaaaccttacagttgttatgagtgtggcaagaccttcagtcagacgtcatcctttacatgctatcgtagacttcatactggagggaaaccttacaagtgtagtgagcataacaagacctttggttgaaattcagcccttgtaattcataaggcaattcatactggagagaatccttgcaagtgtaatgaatgtggcaaggtttttaatcagaaagcacaccttgcacgtcatcatagacttcatactagagagaagccttacaaatgtgaagaatgtgaaaaagttttcagtcgcaaatcacatcttgaaagacaaaacttaaaagaggtggcgttgcccttgtttttgagaatgccctactgtgtaagtggtagtgttctttcttttttttttttttttaagacggagtctcacctgagcgagcctctgcactggccttatttattattgttattaattttttgtttttgagacggagtttcactcttattgcccaggctggagtgcaatggtgcaatcttggctcactgcaccctctgtctgttgggctcaagcgtttctcttgcctcagcctcccaagtagctgggactacaggtgcatgccaccacgcctggttaatttttgtatttatagtggagatggggtttctccatattggtcaggctggtcttgaacccttgacctcaggtcatccacccgcctcggccttccaaaacgctggatttacaggcttgagccacgcgtccggcctgaagtggtattttttagaaagtaactaaaccttttttcagtttaatgacccagggatgtatttctgaaggacttgggagcgatccttttaaggcaaacaagggagatagtacctgtatcttagtaggaaattaaataattcaaacatcaaatgtttcaaattaaaagctaccgacctttaaataattctgagccttgagaggaacgtggtcatgcaacaagagtccagtggcatgcaggcacaaggttttttcttttttgttttttgtttttttttgagacagtctcgctctgtcgcccaagctgaagtgcagtggtgcgatctcagctcactgcaagctccgcctcctgggttcacgtcattttcctgtctcagcctccccagtagctgggactccaggcacccaccaccactcccggctaattttttgtatttttagtacagacagggtttcactgtgttagccaggatggtcttgatctcctgaccttgtgatccacccacctcagcctcccaaagtgctgggattacaggcatgaatgaccgcgcccagccgcaggcgcaacttttttgagttttcctggccaggcgcagtggctcaagcctgtaatcccagcattttgggaggccgaggtgggcggatcacttgaggtcaggagttagaaaccagcctggccaacgtggtgaaaccccgtctccagtaaacatacaaagccattacagggcatggtggggcacgcctgtattcccagctacttgggaggctgaggcaggagaactgcttgatccggggaggtggaagttgcagtgggccaagatcatgccactgcaccccagcctgggcaacagagcaagactccgtacc

SEQ ID NO: 1937 - DNA, 2086 bp, Homo sapiens; identical to SEQ ID NO: 1473

SEQ ID NO: 1938 - DNA, 2567 bp, Homo sapiens; identical to SEQ ID NO: 618

SEQ ID NO: 1939 - DNA, 7802 bp, Homo sapiens; identical to SEQ ID NO: 650

SEQ ID NO: 1940 - DNA, 3595 bp, Homo sapiens; identical to SEQ ID NO: 626

SEQ ID NO: 1941 - DNA, 5434 bp, Homo sapiens
ttttaaggaactccaccctaggtggagtcctcacgatagtcacacctctcctttgggcctagcagggccagagaaagacggaatcactctacccactcaggttgcccagagagcactttaggttctgactcgcgtggggcgcgaggtaccccgtggggcagctaggtgcctccaagaaaccccgccccagaggacccgcacgagttgctgccatttttcgctgaagcccctgccctggggctggtgttcttctctatgattctaccaatcgtcggcatttttttcctcccttctttctttttaggaaggcgctggggtgtgcggcggcaacggcggcggtgaagggatcctcttgtggtatctcctcgtgggttcctgtcttgaaggatttcttctccgcctcaactttatgttcaagtagcgctttgggggttgggttggttttcatagcccccacccccggccctctccttttaaagggtgtgtggagttcagaggatgggtggagagcgggcttggccggaactgaattggtagaggtaaaaggggaacggaggaccttaagctctggccacttcggcccagcgaacccactttatttttgtccaaggaaaagctgcaggggggaggattctttttaggaagtctactctgccggcccctgatttttgggttggatgcttgagagctttgtttcccttgttccgagagtggcccagctgggtctgaatcgactccctcccctttcgaccccctcctcattttccagcccggagaaataggggagtgggggcccaagaacgagaagacgagaacgcgtcgccctgcgctatgtcagaatggggcgggtgtgaggggaacagctctcttgcgatcagctcaggagtatgagcctcccggaggacggcatgagttctggacacttcaggagtcctcagctagtgacatggtcgatatggataaactcataaacaacttggaggtccaacttaattcagaaggtggctcaatgcaggtattcaagcaggtcactgcttctgttcggaacagagatccccctgagatagaatacagaagtaatatgacttctccaacactcctggatgccaaccccatggagaacccagcactgtttaatgacatcaagattgagcccccagaagaacttttggctagtgatttcagcctgccccaagtggaaccagttgacctctcctttcacaagcccaaggctcctctccagcctgctagcatgctacaagctccaatacgtccccccaagccacagtcttctccccagacccttgtggtgtccacgtcaacatctgacatgagcacttcagcaaacattcctactgttctgaccccaggctctgtcctgacctcctctcagagcactggtagccagcagatcttacatgtcattcacactatcccctcagtcagtctgccaaataagatgggtggcctgaagaccatcccagtggtagtgcagtctctgcccatggtgtatactactttgcctgcagatgggggccctgcagccattacagtcccactcattggaggagatggtaaaaatgctggatcagtgaaagttgaccccacctccatgtctccactggaaattccaagtgacagtgaggagagtacaattgagagtggatcctcagccttgcagagtctgcagggactacagcaagaaccagcagcaatggcccaaatgcagggagaagagtcgcttgacttgaagagaagacggattcaccaatgtgactttgcaggatgcagcaaagtgtacaccaaaagctctcacctgaaagctcaccgcagaatccatacaggagagaagccttataaatgcacctgggatggctgctcctggaaatttgctcgctcagatgagctcactcgccatttccgcaagcacacaggcatcaagccttttcggtgcacagactgcaaccgcagcttttctcgttctgaccacctgtccctgcatcgccgtcgccatgacaccatgtgagccgcacaggtcacactagagaagctgcgctggtatctttcctggtcgtgtgctgaggttgggacaattttttcctctttgacttcagcttgcatatggggttgaagcagcccactgagccaagttgaggagactggaggaaaagagagctggtctcccgtggggctcttcatattctaccttcacttctccactgtccagacccgtttttttcaacctccacatgggttgaattccagtgtggcacccatggctgccttcccatccccccctgctctgaaataggacatttttcctacagtaacaaaacaggaatcaaactcaaggctgtgaacaaacatacgctgctttattctttccaatttttctcttgttttctagaactcttatccatatgtttttaaaataagtacctaaaagtggtttgatagtgtcctaaacgacttttttaacttcctaaatggaaagagcataacaatgtagttgattggtaagatttacagggatttggtttctgagtttgaggcacattcccagtgaataagctgagtcccataccacactcaaaaggttttaataaatctaatcctatttcttcttaaagtttggttttcagacagtgctggtgcttctgcttcttaagttcatcaagggaatgaggagttcttgtccttctcctcctcttttttttcttttccactttctccttcaggattaaagattttgctgcacaattgttatttgttaggttaaatttggacaaatattcaaagcacacatagacatataagtaaggagaaaaatgttccaggagagtaggttgggcagtgacaggaacaaacagacctaggatgatcctgagaacaaatagaggggttcctttacttgtataggatatcaaaagtgctgttaatcacaaacctcattcaaatggcaggctgtcgagacagtgtcttgaggggctggctgtactgtttattttttcgtttacacaaagaagcaattgagtatattgcatgatgagaaatcacacactagggtcatgttatacagaagtaaggggttggaaaaatggaatgttgttcactccatggaattattggcattcattcctgtgtttcaaatgaaacatagatgcttttcatgaaaactgacctacaaaaagcaatttgatgttctgcaactgctatgaaaacctaagccatttattttagctgatagcagattgcataatatactcatttagctgcccaatcagattgttttataatattacctggggtacaaaatcctctgttcctggccctggaccacagatctacctccacatggcatatttcctttctggggtcaggggtaggggagggggctttgcatcacttgaatttagactcagcctctctttaaaagattgtctttatattgaacacctttttcttttcaaccctgcttgaatactttaggttactatttcctgaggctgtccattctcactatattgtagaattctagcaccaagaagggatcccgttaaccatctagtcctatccatccctcatattttacagatgagacaaatacgggtcagatttttttctccagatgtttctttgagcccttatacacctgcacgcttattctcctggggatcacataattttatttatttattttttgagagacggtttcactccatcacccaggctggagtgcagtggcgtaatcttggctcactgcaacctccgcctcctgggttcaagtgattctcctgcctcagcctcccaaatagcttggattacaggtgcgtgccaccacacctagctaagttttgtattattagtagagatggggtttcgccatgttggccaggctggtctcaaactcctgacctcaagtgatccccccacctcggcctcccaaagtgctgggatcacaggtgtgagtcaccacacctggccaggatcacattattaaaccaaattaaagtttatgtgattggttgcaatatttgtctaattttatatgttttcttcaggaaaactttagaactcaaaaatcatttacagctgattaaatagcaagtaaaatgtacttgtggtcattgccgtataacattaggcacacgcttctaacacttctataatatctagattttatttacctcattttaacttgcaatgtctgtctatctcatgaactctccataaatccaagaactgcctgtagttttcaaaatgacatgtgggtttttactgttatcattgttatttcgatagggctttttcctgattttgggtatacaagttccaaacttgcataataattgctaacgcactaggcgatatctagggccagtctgttaaaggggacctctaatgtagctataagacaggttggtaaagatgaactaacataagtttaagctaataattcagtagttgatgcagtatttcacagtagagcccgagcttactcatttttttcaaaatttggatcctgatactcctttttcagagttcagaactgaactgctcccctaagacctcagaatcttttgcattgagacatatgatctatttataaataaaggttatcaaatatcttgttgaactaattaggttgatcaaattaggatcccaaatattggggtccctgacatctgagcctttatctaaaaatgtttctgtaacataatgacagcctttatgtttgttaattgcctatagtaaagaagcaattttaagcctattctcatttccctctcccctacaaaaaatgataaaagctttccaattacttacatatgctctaacaagtgtctcaggattcattaacagaattttatagagtacagtaattcaaatatagcacagtacagagtttaccaaaaacacataaaactttgctagatagacagtgaggtggaaaggaactaaaatgtatctctcttgaatagcatttggggttcaattgaatttgttgtgtttacaacagcaaagcaccgttagcctggacagttgcttatggcatcgatagggttggataatattctgggatttgttgcagcagaattcctctatctgatgatcagcagttgaacataaacttcataattatagtaaaatttaggaaaaactatgagtgtgaagagtatgaactgattgggtagattaggcagagtgcattatgggcaagacaaaggttttcgatattaacttcttttaaaataaactttttattttcaaacagtttcagttttacagaaaaaatgtgaagctagtacagagaggtctcatttaccccacacccagtttctcctgttattagcatctcacattaatatgtggtatatttgttacaattaataaaacacattgatatgttaatattattaaaaaaaaaaaaaaa

SEQ ID NO: 1942 - DNA, 6947 bp, Homo sapiens; identical to SEQ ID NO: 641

SEQ ID NO: 1943 - DNA, 5606 bp, Homo sapiens; identical to SEQ ID NO: 624

SEQ ID NO: 1944 - DNA, 1164 bp, Homo sapiens; identical to SEQ ID NO: 670

SEQ ID NO: 1945 - DNA, 3015 bp, Homo sapiens; identical to SEQ ID NO: 604

SEQ ID NO: 1946 - DNA, 4988 bp, Homo sapiens
atcctcccagaaacccagccggcttcacctctcaccaacagtggctgcgggactttccagcacctagcctgggcattcccacagcccagagggagctcgtcccagacaaccaagaggaaaagaagggaaacaagaaagagatggagacccatcattgtggccaacgaccccacgaagagggaatagcggtccacgcacgggacccagcctccgatcaagcccagcaggcgccgggtgcgcctgtgctgggaggcagagcccacgcccacccggaaccgcgccggccagcgaggtccgtgcgcagccccggctgccgcctgcgcttctccctccacacctcaccgttagcagagggagccggctccggcctcagccagccccagagacaggcccccacagcacagcggcgggctgaagggctcctcgagcgtggccagagcagacgccgaggctaaggaggtgccgagagacagcgagggctgctagcacattgtcacctctcaatactggaactcagaataagaggtctccactgttctgagttatgggagaaagatgggtgtatggtagacagaatagtgcctccccacaacaaagatgtcaacatgttactgtgtgtgttaaaagggactttgtaggtgtgagtaagttgaagatcttgagaagaaaagattatcctgggttttttgggtggggccaatgtcataaaaaggtccagataagaaagaggcagaagagtcagggtcagaggaggagccatcatgataggagcagagaagcagagtcaggagagttgatgctacactgctaactttgaagatgaagaagccacgagctatggaatggagacagcctctgaaaggcaaggagatggatttcctttagagcttccaggaaggagtgcaggcctgctaacagatacgttttagcccagtgagactaatttttagacttctgacttccaggaccgtaagtttgcagaattactctcctatgatggcacagaaatcacaaggatctgacaaccttcaggaaggccaggaaaagagcaagagagagatcctgaagtgcaccaaaagcgcgtgggctccgctggatgagtggctgccccctgaccctgaggaggaaagccagagtctcaccatccccatgctggaagattccaagcaagaaagtattcagcagtggctggactctggattctttgtctctgcaaatgaaaactttcaacaagtcattgaccgcactgtttctttgtatgaacaagggatggttcaaatgactgtgaaagactacatgagatctttgcatcagttttcagaaactcccatcctatccagagggaccagtttcaactcttgctattctactgcaagtgtaccacaaagcattcctgaatggctggaattttgggagatagatccagtggagattctcttggatctggggtttggtgctgatgagccagacatctgcatgcaaatcccagccagattccttggttgtggctcagcagccagaggaatcaacatccgtgtttttcttgaagctcaaaagcagcgaatggacattgagaaccccaacttgtacggtcgtttccgacagctggaaatcctggaccatgtgaccaatgccttctcatctctgctgagtgatgtcagcatcctgccaaacagagctgaagagaaagctggaggagagagtgtgcaaagaacctcagtgagtgccgccaaagagcatcgaagaagaatgggtaaactcttaaggagagcttccaaacagaacatcaggcgggattgtaacccagaggtatcagagtccttcaaggtgaaggatgaagtttttgttccctttacaaaaccatgggattgtggagcagagctagcagcaacctcaatcaaccacaagcaaaatcatttgtctctgtcagtagaacatcagtctctccaagcctgtgatgatttgctaccttatcctcctcatggtcttctgagcaagcagtggccttgctcatctatgccggccaagcaggctcctccttcctgtgtgtctgaggggtcagtcaagggcagaactcagaaggagaacttatttcagactaacaagctcaagagcttgtctcatcttgcaggcaaaggaccagactcatttgaaatggaagaggtccaaagctttgaagaagagactggtaatcctcttgacatgacttcaggaactgtaggtgccagggtggacagagcaaatagctgccagtctgacagcagcgggttcctggaggagccgctggaaccgctgcccctccagatgccttccttgccaaacagccagagtcctgctgagaatggaggtagaaagccaagagatcagagccacagcttagtatcatcccaggactgtcagctagagtcggatgggccagattccaaaagtagggcgagcatgtctttttcaagccaagaagcgaatgccttggaacaaagggcctcagtatctgtgatggaggaagagtttctgcttgaggccatggaggggccaccagagctgtatatcccagacatggcctgtgccaagaccaccacgaggggagaatgcccaaggaaagacagccatctgtggcagcttctgccaatgccccatgctgagtatgaggtcaccagacccacagccacttccaaatatgatcatcctctggggtttatggtaacccacgtcacagaaatgcaggacagttttgtgaggcctgagggagctggcaaagtgcaaagccaccacaatgagtctcaaaggtcacctggaaatgatcatactcaagacaagttccttcatgttgactctgaggccccacgagaagaggaaagcagtggattctgtcctcacaccaaccacagcttactcgtaccagaaagctcatcacagtgtatccccaagcacagtgaaatcacaccttatgcaactgaccttgctcaaacatctgaaaagctcattccccacctccataaactgcctggagatcctgcccaggtgaagtcaaggtctggtactttgggtcagatactacctgggacagaagctgagatggaaaaccttcctctaaatactggcagctccaggtctgtaatgacccagatgtcctccagcctggtgtcggctgctcagagggctgtggccttggggactggtcccagaggaacatctttagaatgcactgtgtgtgatcctgttaccgcaacagaaacaagactggggacaaaagcaagacagttaaatgatgcttccattcagacttcagctctaagcaacaagaccttgacacatgggccccagcccctcaccaaatccgtctctctagactcaggcttctctagtatctgcccaatgggcacctgccatgctatacctgcccactgctgcatctgctgtcatcaccaccctcactgccacggggagaggcaaagccctggccctgaaccctcagtctgtaggcactgcctgtgttcactaactggtcaccaggaagcccagttcatgacgactttgaaagcccttcaggacactacagtgagggagctatgttcctgcacagtccatgagatggaagccatgaagacgatatgccaaagtttccgggagtatttagaagaaattgaacagcaccttatgggacagcaggccctcttttccagggacatgtcagaggaggaaagggaggaggccgagcaactgcaaacgttacgtgaggccctgaggcagcaggtggcagagttggaatttcagttaggagaccgggctcagcaaatcagagaagggattttactgcagctggaggttctcacagcagagccacctgaacactattcaaatctgcatcaatataactggatagaagaaagcaatgggcagacttcatgttctaaaatccacccaggcatggccccgaggactgtgtttcctcccgatgatggccaggaggctccctgttcaggtgggacccagttggctgccttcactccacccaccttggagaacagcaccaggatgtctccttcatcatcagcttgggcaaagttaggtccaacccctttgtcaaattgtcctgttggagaaaaggatgcagatgtcttcctctagatcagagcaggtttgttaaccttcatacaaaatataaaggcccagaacagatgtagcaaggaaatttcaattttccccaaggagaagggtctgccaacccattgtcagctatatctctcatattctaccctttggttaaacccaagaggagtttagaatactctaatactcattcagtatagaataactgagcacctagtatgtgcctggcacagagtatgcaacagtgactaaatagtatacggtctctgccctgctagaacttacagtgtagtgggggagatagaattgcaaacaaaaagtatctgagacagacctcagtcaatatagaagtttattttgccaaggttaaggatacacacccagaagacaggtctgtgcctttctccaaagatgattttgaggccttcaacatttagtggggaaagggtgctaatggggaaagaggtgtgggtacataggaggcaaacagttgcatttttttgagtctgatcagcttttctcatgagagaaggggtagaggaactgtcacttatgcattcacctagctcagtggatctgcacttttacagaaggtaaaataaacatagggcagaggaagcaatcagatatgcatttgtctcgggggagcagagggatggctttgagttctgttctttgtcctgtacctattaagagaagctatcaatatactttgtcaggataaaattcaacagaactgttttagactaaagattttagggaccacaaggaatttcccagtgggcaaattgtgagggaggtatttagcttttaaaaaaatctttgtagctatctcatttagaaataaaatgggaggcagattgcctgatgcagctcct

SEQ ID NO: 1947 - DNA, 4109 bp, Homo sapiens
cgggccggggcggcgcgagcggctggagcaacgggccccgcggcagctgcgggcgacgcggtcgatggacatgggcacccagggatcggggcgcaagcggctccccaaccgggagcggctcacggcggaggacgacgcgctcaaccagatcgcgcgggaggcggaagcccggctcgctgcaaaacgggcggcccgcgcggaggctcgcgagatccgcatgaaggagctggagcggcagcagaaggagatctatcaggtccaaaagaaatattatgggctggatacaaaatggggtgacatcgagcagtggatggaagacagtgagcgctactctcgtagatccagaagaaacacatcggcttctgatgaagacgagcgcatgtcagtgggtagtcgtggaagcctgaggtcgcagcctgacttggagtatgggggtccttacgcctggacaaatggttatgatggagaattgtatggatcacagtccctgaatagaagatctggcaggccctcctgtctgtacagcgctgcccggccttcggggagttaccgggcgtctgtgttggatgaaggcagcttcggtgggacccgacggggcagcacctccggctcccgtgctccctcggagtacagcggccacctcaactccagctcccgcgcctcctccagggccagctcggcccgggccagccctgtggtagaagagagaccagaaaaagattttactgagaaggggtctcgtaacatgccgggcctgtctgcagccacgctggcctctctgggtgggacttcctctcggagaggcagcggagacacctccatctccatcgacaccgaggcatccatcagggaaatcaaggaactcaatgagttaaaggaccagattcaggatgtagaaggcaaatacatgcagggattgaaagagatgaaggactctctagcagaagttgaagagaaatataagaaggctatggtttccaatgctcagctagacaatgaaaagacaaacttcatgtaccaggttgataccctaaaagatatgttgctggagcttgaagaacagctggctgaatctaggcggcagtacgaagagaaaaacaaagaatttgaaagggaaaaacacgcccacagtatactgcaatttcagtttgctgaagtcaaggaggccctgaagcaaagagaggaaatgctcgaggaaatccgacagctacagcagaaacaggcgagttctatcagggagatttctgatcttcaggaaacaatagagtggaaagacaaaaagataggggcattagagaggcagaaagagttctttgattccgtaaggagtgaacgggatgatcttagagaagaagtagtcatgctgaaagaggaattaaagaaacatggaataatcctaaattcagaaatagctaccaatggagagacttccgacaccctcaataatgttggataccaaggtcctaccaagatgacaaaagaagagttaaatgccctcaagtcgacaggggatgggaccctagatattaggttgaaaaagctggttgatgaacgggaatgcttattggaacagattaagaaactcaaagggcagctggaggagagacagaagattggcaaactagacaatcttcgatctgaagatgatgtcttggaaaacgggacagacatgcatgtaatggacctacaaagggatgccaacagacagatcagcgacctcaaatttaaacttgcaaaatctgagcaagagataactgcattagaacaaaatgtaataaggttagagagtcaagtatcacgttacaaatcagcggctgaaaatgcagaaaaaatagaagatgaacttaaggcagaaaaacggaaactccaaagagagctccgctctgcattggataaaacagaagagctcgaggtgagcaacggccacttagtgaagcgtctggaaaaaatgaaagcaaatcggagtgcactcttgtcccagcagtaaattccagctctgatcaggcaactggttggtgactggagagcattgtttcataggcttttctctgtcctatctgggagcgctgcttcttcccctgccttccgagagacgaagaccgtggcgagcttggcgcttaggggctcccgtgccatggctcaccccagggagccccagcagccaccaggtgcctctgtctgcagacccctggcccgggctggcgccgacgctcagaacctgcaggtacttcataagcacacaggggcctcgagggagctctgtgtctgaccgcacagcagcctctgaatgccgctggaagtgatgatcaaagtaaagattcagttgggacttgagttttttttttttttcatgtgtcttgctgaagattaaggggaaatgttacagtgttgggacttcctttcatggcagaatctacaatttgagcgacttcagtagtatctcttagtctacgcttttcatacacaaaacactgtggaaccacaagccattaccaagcaaaactctttcactggaaacaagggggcagtctagaagtaaaagtgaccttaagaagactctttacaggcaacaaatgaagcttttctaagggatttttgcatcagttcagtcataagaatacttttttccagggtaattaggcaatagcttcactgaaaatgacagcttttcattgcattatttaatccttatatttggaattgaagtcgttaacttcttttaaagaatgtactattagaaaaattaaaaatgaaatgttgagagacttcagcaatgtggttctaatttttttccactgagaaagaagatctttaatttcatattaatggttctgtatattttgggtcatctttttattttttaagaatatcaagtcaattcatttttctttccctatttaaaaaaaaaggtgttttcacagaatgagtgcacttaaaaagtgaagtgaaggaggaggtaacagtagagacgatggcaatatcatcaaggacaaaagtaaaaacgtttagctacctgctgatttttagtgactgttcatatatgttgtatttcaagtatggctggtgaagccagtcagcttttcgggacgttagcaagtggaaactgagtcagtatcatccaaaaccatatctagtcttaacacatggagaatgctggagtgagggttgtgagttcagggtatataatcaagaaaacactcccagcataatgctaggggtcaccagtgtccatcccccagaactgtatggatctaggatatacacagctgcgttgcattaagaaagagatgaaatctctattaaaatacacaagatttttgtatctccttgtgcagaggatatttgccactgcccattgggaagcagacaagttatagggggctgggggccaacactggcaagtaggaaaccacgggtcggacaggtgagcaaaatgtgctggcaggtgggcaccactgggagacccacactgcacacccgggcaccgtatgaacaggaaagaggaaggaagctggacgaagcccctcagggaccctgtgctgaccatgctgggcccaccggcaaaagggagatattcagttccttgtctcatccttaaggtttcttccacaacatctgaatacaagcatgtttaactgggaaaatgtctatgtcatgcgtgaataacaccagcagcaaacactcacacatcacgcagacacggccggcagcatgctgacgcttttaggtatttttcactcatgcaattttcacatattttcactcatttcatttgcacggaaattctatgaggtagatgctgttatcaaatccacattacagatgagggacccagggtccaggaaggtgaactggcagaagtctcccagctggtagaacagggctgcaaggcatcgattcccaggtgtctcacagccctgagaagatggcgttttccctatcagtggctctgaggaagtcaagccttcagtctctacctctcccaccaattcttttggaaacagcaaaccaatgttacacacacttcctaatccagaggaagctagaacacgatttttaaatttatttagtaaaataaaactttttttgcagatgtaacgaaaaaaaaa

SEQ ID NO: 1948 - DNA, 5507 bp, Homo sapiens
gcggccgcgggctctcgcggggcggcgacgccgcggggaggatgctgcttgccgcgcccgcgtcctcaccgtcctcccgggccgcctgctggggctttgttgtggcccggacgccgcgggccaccccctgaagtcgcctgccgccgccgccgccgcacctagcggacgggcgggcgggcgcgcgtgtgcccaggagtgcgcgcctgtcgcggtggtgggtgcaggactggacccacgggcccattgtgcgcccgcccgcggcagccaggaccatgtgggtgaacccggaggaggtgttgctggccaacgcgctgtggatcaccgagagggccaacccatacttcatcctgcagcggaggaagggccacgccggcgatggaggcggcggcggcggactggcgggcctgctggtgggtacccttgatgttgtgttggactccagcgcccgggtcgctccttaccgaatcttgtaccagactccagactccctggtctactggaccatcgcctgtggtggttccaggaaagaaatcactgaacactgggaatggcttgagcaaaatctcttgcagacactctccatctttgaaaatgagaatgatatcaccacatttgtgagaggaaaaatacagggcatcattgcagaatacaacaaaatcaatgatgtaaaggaagatgatgacacggagaagtttaaagaagccattgtgaaatttcataggctgtttgggatgccagaggaagagaaactcgtcaactattactcttgcagctattggaaggggaaggtcccccgtcagggttggatgtacctcagcattaaccacctttgcttttattcttttcttatgggaagggaagcgaaactggtcatccggtgggtagacatcactcagcttgagaagaatgccaccctgcttctgcctgatgtgatcaaagtgagcacacggtccagtgagcatttcttctctgtattcctcaacatcaacgagaccttcaagttaatggagcagcttgccaacatagccatgaggcaactcttagacaatgagggatttgaacaagatcgatccctgcccaaactcaaaaggaaatctcctaaaaaagtgtctgctctaaaacgtgatcttgatgccagggcaaagagtgagagataccgtgcacttttccggctgcccaaagatgaaaaattagatggccacacagactgcactctctggactccatttaacaaaatgcacattttggggcagatgtttgtgtccacaaattacatctgttttaccagcaaggaggagaacttatgtagcctcattatcccgctccgtgaggtgacaattgtggaaaaggcagacagctccagtgtgctccccagtcccttatccatcagcacccgaaacaggatgaccttcctatttgccaacttgaaagatagagactttctagtgcagaggatctcagatttcctgcaacagactacttccaaaatatattctgacaaggagtttgcaggaagttacaacagttcagatgatgaggtgtactctcgacccagcagcctcgtctcctccagcccccagagaagcacgagctctgatgctgatggagagcgccagtttaacctaaatggcaacagcgtccccacagccacacagaccctgatgaccatgtatcggcggcggtctcccgaggagttcaacccgaaattggccaaagagtttctgaaagagcaagcctggaagattcactttgctgagtatgggcaagggatctgcatgtaccgcacagagaaaacgcgggagctggtgttgaagggcatcccggagagcatgcgtggggagctctggctgctgctgtcaggtgccatcaatgagaaggccacacatcctgggtactatgaagacctagtggagaagtccatggggaagtataatctcgccacggaggagattgagagggatttacaccgctcccttccagaacacccagcttttcagaatgaaatgggcattgctgcactaaggagagtcttaacagcttatgcttttcgaaatcccaacatagggtattgccaggccatgaatattgtcacttcagtgctgctgctttatgccaaagaggaggaagctttctggctgcttgtggctttgtgtgagcgcatgctcccagattactacaacaccagagttgtgggtgcactggtggaccaaggtgtctttgaggagctagcacgagactacgtcccacagctgtacgactgcatgcaagacctgggcgtgatttccaccatctccctgtcttggttcctcacactatttctcagtgtgatgccttttgagagtgcagttgtggttgttgactgtttcttctatgaaggaattaaagtgatattccagttggccctagctgtgctggatgcaaatgtggacaaactgttgaactgcaaggatgatggggaggccatgaccgttttgggaaggtatttagacagtgtgaccaataaagacagcacactgcctcccattcctcacctccactccttgctcagcgatgatgtggaaccttaccctgaggtagacatctttagactcatcagaacttcctacgagaaattcggaactatccgggcagatttgattgaacagatgagattcaaacagagactgaaagtgatccagacgctggaggatactacgaaacgcaacgtggtacgaaccattgtgacagaaacttcctttaccattgatgagctggaagaactttatgctcttttcaaggcagaacatctcaccagctgctactggggcgggagcagcaacgcgctggaccggcatgaccccagcctgccctacctggaacagtatcgcattgacttcgagcagttcaagggaatgtttgctcttctctttccttgggcatgtggaactcactctgacgttctggcctcccgcttgttccagttattagatgaaaatggagactctttgattaacttccgggagtttgtctctgggctaagtgctgcatgccatggggacctcacagagaagctcaaactcctgtacaaaatgcacgtcttgcctgagccatcctctgatcaagatgaaccagattctgcttttgaagcaactcagtacttctttgaagatattaccccagaatgtacacatgttgttggattggatagcagaagcaaacagggtgcagatgatggctttgttacggtgagcctaaagccagacaaagggaagagagcaaattcccaagaaaatcgtaattatttgagactgtggactccagaaaataaatctaagtcaaagaatgcaaaggatttacccaaattaaatcaggggcagttcattgaactgtgtaagacaatgtataacatgttcagcgaagaccccaatgagcaggagctgtaccacgccacggcagcagtgaccagcctcctgctggagattggggaggtcggcaagttgttcgtggcccagcctgcaaaggagggcgggagcggaggcagtgggccgtcctgccaccagggcatcccaggcgtgctcttccccaagaaagggccaggccagccttacgtggtggagtctgttgagcccctgccggccagcctggcccccgacagcgaggaacactcccttggaggacaaatggaggacatcaagctggaggactcctcgccccgggacaacggggcctgctcctccatgctgatctctgacgacgacaccaaggacgacagctccatgtcctcatactcggtgctgagtgccggctcccacgaggaggacaagctgcactgcgaggacatcggagaggacacggtcctggtgcggagcggccagggcacggcggcactgccccggagcaccagcctggaccgggactgggccatcaccttcgagcagttcctggcctccctcttaactgagcctgccctggtcaagtactttgacaagcccgtgtgcatgatggccaggattaccagtgcaaaaaacatccggatgatgggcaagcccctcacctcggccagtgactatgaaatctcggccatgtccggctgacacgggcgccttcccgggggagtgggaggagagggaggggagggattttttatgttcttctgtgttgagttttttctttctttcttttaaattaaatatttattagtacctggcttgaagcctagtgttttcataatgtaattcaatgaaaactgttggagaaatatttaaacacctcaatgtaggtacattacactcttgttgcggggaggggatttaccagaatacagtttatttcgtgaattctaaaaaacaaaaagatgaatctgtcagtgatatgtgtgtattataacttattaatcttgctgttgagctgtatacatggtttaaaaaatagtactgtttaatgctaagtaaggcagcagtcatttgtgtattcaggctttttaaataaaattagagctgtaaggaaaatgaaaagccacaaatgcaagactgttcttaaatggaaggcatagtcagcgagggtaaatcctataccactttaggaagtattaaaaatatttttaagatttgaaatatatttcatagaagtcctctattcaaaatcatattccacagatgttccccttcaaagggaaaacatttggggttctaaacagttatgaaagtaagtgatttttacatgattccagaataacacttgtattgaccaatttagacagataccagaccaattttgcatttaagaaattgttctgattatttacgtcaactcattagaattcagtgaaaagtaacagtcttttgtcacagagaatctgaaagtagcagcaaagacagagggctcatgacaggtttttgcttttgctttgcttttgtttttgaaagagtaaaagtactgatgcttctgatactggatgtttagcttcttactgcaaaaacataagtaaaacagtcaactttaccatttccgtattctccatagattgaagaaatttataccacatatcgcatatgaccatctttccatcaaatcaatgtagagataatgtaaactgaaaaaaaatctgcaagataatgtaactgaatgttttaaaaacagaacttgtcactttatataaaagaatagtatgctctatttcctgaatggatgtggaaatgaaagctagcgcacctgcactttgaattcttgcttcttttttattactgttatgattttgctttttacagatgttggacgattttttcttctgattgttgaattcataatcatggtctcatttcctttgcttctttggaatatttctttcaacacattcctttattttattatacattgtgtcctttttttagctattgctgctgttgttttttattctatttacaggatgatttttaaactgtcaaatgaagtagtgttaacctcaaataggctaaatgtgaacaaataaaatacagcaaatactcagaaaaaaaaaaaaaaaaaaaaaa

SEQ ID NO: 1949 - DNA, 5242 bp, Homo sapiens; identical to SEQ ID NO: 617

SEQ ID NO: 1950 - DNA, 3436 bp, Homo sapiens; identical to SEQ ID NO: 886

SEQ ID NO: 1951 - DNA, 1560 bp, Homo sapiens; identical to SEQ ID NO: 622

SEQ ID NO: 1952 - DNA, 6210 bp, Homo sapiens
ggtgctagaagtcggaccggaagtggaagtggtccccgaaggctatttcgccgctggcgtcaggactattttcacgttttaatgccgagaggtctctgtgacgattttggttcttgggtgtctctggggagtccctgggccagaccttcctccagactccagcccacctcttcggagcagctctgctgagttcacagatgaccactaaacttcaggcaccctagacaaaaagggttgagatccagtgtggccatgccagctagttggacctcaccccagaaatcctcagccctggctccagaggatcatggcagctcctatgagggatcagtgtccttcagggatgtggctatcgatttcagcagagaggaatggcggcacctggacctttctcagagaaacctgtaccgggatgtgatgctggagacctacagccacctgctctcagtagggtatcaagttcctaaaccagaggtggtcatgttggagcaaggaaaggaaccatgggcactgcagggtgagaggccacgtcacagctgcccaggagagaaattatgggaccataatcaacatagaaaaatcatcggttataaaccagcttcctctcaagatcaaaaaatttattctggggaaaaatcctatgagtgtgctgaatttggaaagagcttcacctggaagtcacagttcaaggtacatctgaaagttcctacaggagaaaaactctatgtatgtattgaatgtgggagggcttttgtacagaagccagaattcatcacacatcagaaaacccatatgagagagaagccctataagtgcaatgaatgtggaaaatccttttttcaagtatcgtctcttttcaggcatcacagaattcataccggagaaaaactatatgaatgtagtgaatgtgggaaaggtttcccttataactcagatctcagtatacatgagaaaattcatactggagagagacaccatgaatgcactgactgtggcaaagcgttcacacaaaagtccacactcaagattcatcagaaaatccatacaggcgagagatcctacatctgtattgaatgcgggcaggccttcatccagaaaacacaattgattgcacaccgaagaattcatagtggagaaaaaccatatgaatgcaataactgtggcaaatccttcatttccaagtcacaacttcaggtacatcaacgtgttcacacaagagtgaagccctatatatgtaccgaatatgggaaggtcttcagcaataattccaacctcattacacatgagaagattcaaagtagagagaaatcttccatatgtactgagtgtgggaaggcctttacctacaggtcagagttgattattcatcagagaattcacactggagagaaaccttatgaatgcagtgactgtgggagagccttcactcagaagtcagcactcacagtgcatcagagaattcatacaggagaaaaatcgtatatatgcatgaaatgtggactggccttcatccggaaggcacacttgattacacatcaaataattcatactggagagaaaccttataaatgtggtcactgtgggaaattgtttacttccaagtcacaactccatgttcataaacgaattcacacaggagaaaagccctatgtatgcaataaatgtgggaaggcattcaccaaccggtcaaatctcattacacatcagaaaactcatacaggagagaaatcttatatatgttccaaatgtggaaaggccttcacccagaggtcagacttgattacacatcagagaatccatactggggagaagccttatgaatgcaatacttgtggaaaagcctttactcagaagtcaaatcttaatatacatcagaaaattcacactggagagagacagtatgaatgccacgaatgtgggaaagccttcaaccagaaatcaatactcattgttcatcagaaaattcatacaggagagaaaccctatgtatgcactgagtgtggaagagctttcatccgcaagtcaaactttattactcatcaaagaattcatactggagagaagccttatgaatgcagtgactgtgggaagtcctttacctccaagtctcagctcctggtgcatcagccagttcacacaggagagaaaccctatgtgtgtgccgagtgtgggaaagcctttagtggcaggtcaaatctcagtaagcaccagaaaactcataccggagaaaagccctacatttgttctgaatgtgggaagacctttcgacagaagtcagagttgattacacatcacagaattcatactggagagaaaccttatgagtgcagtgactgtgggaagtctttcactaaaaaatcacagctccaagtgcatcagcgaattcacactggagagaagccttacgtgtgtgctgagtgtgggaaggcctttagcaacaggtccaatttgaataaacatcagacaacacacactggagacaaaccctacaagtgtggcatctgtgggaaaggcttcgttcagaaatcagtgttcagtgttcatcagagcagccacgcttgagagaaacagtgtgagaaaacccccctgagggttgggtctgattgtacactgttgcacgcatgcagcagaaaaatatgtatattattgtaaatagaaatgaccacatcagaatgtcacacatggctgttctggagagggcctctgagaaggcactgaatgaggcgagggacccttcctacattgtcaccatccccagtaaaccttgggtcattattcatactgacaaggaaccgagtcaatttggtgaataggaaaagccttctcatgaaaactacaatagaatactgttaccaaattcttcataagaaagatcatattatgggaatgataatcctgtttactgtggattaggtatagtgccaacagtttgaatggtaagacaacataatatatatgatagtgatgaatccttctgtgagttgtttgttccagaacacactgtctagtagaattgtgggtattttcttcttttgaatcgaacacagttgtgcatatccaattccccattgagtatttctatcaagcaagagatactgcaataagacaaactccctgtgtattcagacacagacctcagagcgtatgttgagtccccattgtcatagaaaaagacttacagtccccttcattatctgccaggactctctctgagccccacaggttctcagcacattgtgtttgacacccagcacagtgttttttctttttctttctttctttctctttctttctttctttctttctttctttctttctttctttctttctttctttctttctttccttctttctttctttttctttctttctctttctttctttctttctttctttctttctttctttctttctttctttctttctttctttttttgagacagagtcttgctctgtcgggcaagctagagtgcagtggcgctatcttggctcactgcaacctccgtctcccgggctcaagcaattctcctgcctcagcctcctgagtagctgggattgcgtgtgccaccacgcccagctaatttttgtatgtttagtagaaacgggggtttcaccatgctggccaggctggtctcgaactcctgacctcatgatccgcccgcctcggcctcccaaagtcctgggattacggacgtgagccactgcgcccggcccagcacagtgttttgtacactcccaccaccctcaagaaagcctttgaggttaggattttcaggtcatctgggagaacttaaattcttccttctgctattacaattcttctcactcagttgcctgcctcttttttttttttaatttacttgtgactgagttgaagcccagcattttactttccttaatgatctgactttcataagttgataagtcatgaaatcattatcttacattatatgagatatgagataaatcataaatcatatgaaattgataactcatatgaaaaccaaccccaccatatgttcactgtctacttgtgtccatcttcgtcccacgcaccccacaaggaccttccccgccatgtgcctcaaacatcagttcctgactcagggcctttgtatttgcagtgcccgttgcaaagagcacaattctttattttatctgtggcttgtccgtcatgtctttttttccatgacacctccacacaggccttccctgcctgcctggtttaaaattccagccccttacccttcctcctttattcttctccctagcaatttccaccatgctgcctggtgtattttcctcatttctctgtggcttctacactagaaaatatttcccttttgttcaccactatgagtctagacccatgactgccatacagcaggcattccataaatgcacctgtggagagttgacccatgcttgttgcgtgacttctgtctgatttttttctgtgttgcagcataagaagcgctaatagggagaaccaacttggctaaaacacaccaggctttttcacctctagtctgtacctgggctgtatcccttctcaaccctaaagctaaaaagtcattgtgaaccttttggtctgatgctaaagaagggaaaacaggtacaggaaatcccatgtggatgcttgcttccaggatttcctgccatgattccagaatcccacagctccaacatgattgcaaaagactccctgctcatttttcctcagcatgcacagcgctgtcctgtctcagttgcaactcgacagagccgcatttactccagaacccaatccacacacctgctcatcctgccccgagaggagtgcctgaagccaatagcagggaactagagcagacttgggtggatcttcattggatattaggtatcttgccctagataggcagcagtggccttacagatgctgacagatgatctgattagatgcacagttgctgggtggcgtctggggccagtctattggcagttctgggagtgggaactatttgggctctgcaaagatggtttcacctttaagaagggcagtatggggaggtgaagatggggcccaaaggatagaacatagtcaaagaagcagggccacaatgcccctttaattcccaagccctagttgggcagtgcttggtgacacatcccattacctcaccttagatcaatgtctactgagccatcattagctctgcttcctcacttcttcacagtatctgatggcccatcacatgctgctcaacatcttagaccaatgtctgctcacccattacctcccttcacctcatccagcactgtatctgaagcttcactattcttccttcagttttggatattttgtgatacaacattatccccaacttaggacaatgtcagctgactctcaggagggtgcctggagatcacctcttccttcctaacataccctagaacaaggtctggtccccttcattattcccattttaccttactcctaagtgtatcactcctcatgaattccaggaaatatggaggaaaacacatttcactgtacatgactttcaataatttctcctttatatttattgtaacgtgatattttagtgctgacatatatatgtatatgtatgcccatttatataaaagactagtttttagagaaattttaggttcacagcaaaatggggcagaaggtacagagatttcccatatatcccctaccctcacatatacacagcctcccccatcatcaacatcccccttcagagtggtacatttgttacaattgatgaaactacattgacactatcggccaaagtccatggtttaattagggttcagtcttgatgtgcattctgtgggttgagacaaatgaataatgacatgtatgcattattacagaaggataaagagccgtttcactgtcccaataatcctctgtgtttcgcctactcctctaaactcctggctattttcttttgtctccataattttgcctctgaaccataaagtatgcagccttttcagattgatttgtttcacttagtaatgtggatttaagtttcttccatgtcttttcgtagcttgctagctcttttttttttttttttctcattgaataatatgctattgtctggaagtaccatgacttatttatccattcacctactgaaggacaccttaattgcttccaagttttgttgattatgaataaagatgctataaaca

SEQ ID NO: 1953 - DNA, 4425 bp, Homo sapiens; identical to SEQ ID NO: 639

SEQ ID NO: 1954 - DNA, 7509 bp, Homo sapiens
ggcggtgtccaggcttccgggcgggtagtccttcggctccggagccgcgactgcgctcgcctaggtggtgggcggggagggaaggaagggagcgggcgcaaggcggcggcggcggctgcgggtgaggaacttgttgcgcccgcggctgcgcggtgcccctccctccgctccagttcgtcggggcgggcgcggcggcggcggcgaaggaggagcgcggccggggcgatgcggcgctacctgcgcgtcgtggtgctgtgtgtggcctgcggcttctgctcgctcctttacgctttcagccagctcgccgtgtccctggaagaaggaacgggcggcggtggcgggaagccgcaggccgcggtggcttcctggctcgcgggcggcggacgcggcgccgtgagaggcgccggcgtcgcgggccccgcagcgcatcccggcgtgtcggacaggtgtaaagatttctctctgtgttactggaatccctattggatgctgccctctgatgtttgtggaatgaactgcttttgggaagcggcttttaggtacagtctgaaaatacagcctgttgagaaaatgcatctagctgtagttgcctgtggtgaaagactggaagaaactatgaccatgttgaagtcagctatcattttcagcatcaaacctcttcaattccatatttttgctgaagatcagctacatcatagctttaaaggcagacttgacaactggtcatttctacaaacatttaattatacgttataccccataacctttccaagtgagaatgcagcagagtggaaaaaactctttaaaccatgtgcttcgcagagattgttcttgccgttaatcctgaaagaagttgactcactattgtatgtcgacactgatatcctttttttacgaccagttgatgatatttggtctttactaaagaaatttaattccacacaaattgctgcaatggcaccagaacatgaggaacctcgaataggatggtataatcgctttgctaggcatccatattatggaaaaactggagtaaactctggagttatgttgatgaacatgactcgaatgagaaggaagtatttcaagaatgatatgacaactgtacgactacaatggggagatatacttatgccattgcttaaaaaatacaaactaaacatcacatggggtgatcaagatctattgaatatcgtgttttttcataatccagaaagcctttttgtttttccgtgtcaatggaattatcgaccagatcattgtatatatggaagcaattgccaagaagcagaagaaggaggaatctttattcttcatgggaacagaggtgtttaccatgacgataagcaaccagcatttagagctgtttatgaagcactgagaaattgttcttttgaagatgacaacatccgttccttattaaaacctttagaactggaactacaaaaaacagtgcatacatactgtggaaaaatttacaaaatatttatcaaacaactagcaaaaagtgtaagagatcgttatgccagatcaccaaaggaaaagtgattcttggtgactgcttaatcaaatggatgaaaacaaagaatcagaagataagtgtgaaggaatcgtcttggatgaagtattcaggaaggaattactcatctccagaataattttttttttcctaaagaagttaagtaagcagtattttcaggtaatgaagaataagttaaaatcttgggcctcaacattgaacattttttatctctgatgttttgtaatgttacttgctatcattccagtattgatgaaaatactattgaatgggtttaacctgcagacttctgttgactcatactctcaagagtggtaggggtgtgtagatggagaaaatgtacctcaaacagtgccaacactcaagactgtgagtagagcaataattttatgtcagcactaacctcactttaaaagtgtgagaaaaaagtttgtttacaggagcagaaacaggtctgttgtttctgaagaaatgtgatgtaactgatgtaaccattgacaatctatgtgtgcctttatacatttcatctctgttttaaaatatttttatgacaatcatgtttaaaattatttttagattacaagtaagctgcatgttaaaaattgagctgtgtaaggtagaggaaaaatagtgaaaactttgggattttaatctgtgtgtgcgtgtttgtgtgtgagagagagtgagaaatgtagtgtttcattttgtatgcattaaactgtcttgccaaaactcagatctaagattgttaaatagatatttggggaatttttttttaatcactttaaatgaaaaacgtcagctttactgggcattctggaagcaaaatatattatgctgatggtaaagtgagaaccttaagagtatactcatgatggtggaaagtgtgatggaccaaaatgcataagctatatacttcctgtgagtagtaattttagttacaatggagtagaaaaatatggtccatttaaacttgtcttctacctcataacggccttgcaagatacttttgaagaagcaaatgtctagagccttactttaagtaagttaaacaacttaagtggatgatttggaataagattgttacatccagctgtagaaaatgtggttttaattgggttgatgtgcatttttgaatatcacctaagacagttaatttttttaaatcttgagaaattacttctttggcattcttgacctgttagctaatataactatagattctgaatacttagcatatactatgctggggcacatatcttattttaccaacaatatgattatctatatggttatcttctttttctccctgatattttaatgctcaagtagaaaatggaaaatcatgaaggaaaaatacaacctgtgaaaattgtggcagttagctttgtgaagacacagtgacctctgtggagacatggaatatgcagaaagagatggttagtacagttgttctgtcgtctgcagttcagtcagggacaaattgagagaggaaagtttaagcagggtgcattagaagttgataaccagtccagcattcttagaacagatgggtttagagaacacgagttgtagttccttggcagaatgccatggtgaatataagaaactgtgaaattgagcttactgagtagaaaatgagaatactaaaaatgtgaagtttggagggtatgtattagatcatttctaatggtcctcaaataatgatcattgcctgcctgactatgtaagattcttgttgggagcttaagaatagattcctgagctaggcctttggagactctggcatgctgtgtctaggagggagtctgtaaaacaatttttaatgaagaaatttaaaaattacacaaaactagaatagtgcattggtactcaacatccagatctgacacttatcactatcttaccatgtttgcttcatttgtcatttttttgtttgcttaagtatcttaaaatcccatacattgtgttatttcactgctgtgaacactttgggtagataccacgatatcacacctaacagaggcagcagcagtccttcggcttcatctcatagccagtccttaagcaaatttccctgattatctcaaaaatcatcttctagttggtttgttagaatcaacagaatataagtcacatgatgatttcgtttttaacaatcacctcagatgactttgatgttagctactttgagaaccactggaaattattttgccaacttgaaagttcaagttaggataccacaattcttggcacgtttggtggattataaatgtgattttgaaatattagaggaagcatttggggttaatgacaggatatgaatttatattagtaagtttgataagataaaatttcctcagtgaacggagaatctcagccccatgggctctaattgattgggacttgtgtagagcgtggtcacagtttaatccaactggactgtatgctgtggtctcactcatgttgtggcttatttacactgtcacacacactacattgtggatcagttggaaggttcttcatctggtttatttagacctgacctaattgatcattttaccataaattgaattatagtgaaaactgtcttttgggtactgtttctacctaaaattaaaggtatcacaaaatatgtataataatttttaaatgaattttctgaatttatctttagacaaggtaattcttttgaattctaaagaaatgcagttcttggagttgatgagaggttaaattatagatggacaacttagagaacgtattccatcttcatataaatggtctttcataaaacatagtgtatctatgcagtttatataaactacatgatttattatttgagtctatgtattctgacctcagaactatctctgggctacagtattaccaaagtgggatgcctttaaaatgcagtcaaacttcatttgtatgaagtagaaaagaacttgggaaacctttaaaaatatatattgtgatttatgctttaagaaaatgcatacttttttctaatgaagagtagttcataatatataagggttttaaggccctgaaataacattagtgcttactcattgctctctcatcttgcctccagtcagatgttattggtatagtgaaaagaagaccagattttgaactagatctggattctctttttagtaactcaggcatgttatttacccttctctgtgccttaggtttttaagtacaatcagtgtacccttcaaacctcacaagatgaaactcagaagagataatggatttggaagcattttgcgtggcttatattatgccacgccagtgttactgttgaagttctgttttgttcgttgttttctgtacagagcgttcagtttactcaggctgaatgttttctgacatatatctccagtatgaatttgtttatgtaaggaagagtttttcaggaagagaaagtagagaagaaaagaatgatgtaactaaatcaaaaaagaaggaaaagagaggaagtgagaaaaggggtgaggaaagagaaaggagtaagaatggggatggcaaagggcagagtaagagaaaagatggaatgagtgtatggaaaattgagaagtagagatggagagaaatggtgtggaaacatttactttttgagttgtagccctcacactacatcagtttgcttgcctgggctctctggggtcaggaaaggtgctgacttccatggaatggggcagcagggcctgctgtatttggtttgttagtactagagttgtttcccaatcaccctactcactgatcatttagtgccaattcaacattttatgtcttttttttttagtggatcccagtttgtgagctaggacctgtggaaatacaagtatcttcctttttaactttattgttttagccatcccaagtgttagactgcaagactaactacatattccccagtggaggttggaagtggaggggactgcttcattaggtctgaagggggccaaggaatgtgttgcagcagttttcgcagatgatactgacgagaggccaggtttgggaatcactgccctgccttggatggcaaattaagcaataaattacacctatttattcctcagttgggatactttcagttgaaccattctgagtagatttaagagaacaaaagacagcagaaataccttaaaagatattattggctgtcttatttttcagatatttgtatttaataaataccttagtagtagtcagaacctctttgagatgtttttagaaagaccactgatttgttttttaaaataatttttttggttccttagagtagagaagaaaagtaggggtgcaatatgtcaggtgtggggccagttatccatttattaaatgcaatttcaagtgtcttaaaaacaataattgccttattgcattttaatatttaataaagtagattaaataaagatttgtattataacagttattcttttatccattgccaaagcaacccttttttgcctattaaaatctggctaaactgttctgatgttgtttcttaattcattaaacatgaaactaggttttacaaactaaattatataaagacagaagtctaaaaatggtaccagaaaatttttttttaaaaaattaatgtgttattcaaatatccagcaattaaagactcatgagaaaaacagaatagcatattagatgtaacagtttaaaatggattgcaaatcaatgtcagacttaaatagaaaatatttattatcacctcatttctaccaataatttcagatgtttaatgggactttgaaaagataggaaaaaatagaaatgaaaatttatctcacctttaatactgtgaatactatttggagggtccctggtcagacatttaaatatcaaacttaagaactgacatggagcctttgattagtttatatacaggatctgaatatttacacacatagcacactatagcaacctcttgtaaaaaatcatgaagatagaattcaacagtgtatattctattaaaaagtaaattggctgggtgtggtggctcatgcatgtaatcccagcactttgggaggccgaggcaggaggatcgcttgagcccaagagtttgagaccagcctaggtgacaaagtgagaccccatctctacaaaaaaattaaaaaattatccagatgtggtggtgtttgcctgcggtcctagctacacaggaagttgaggcaggaggattgcttgagtgcaagagtttgaggctgcagagagccaagattgcaccattgcactccagcctgggtgacagagcgagaccctgtctcaaaaaataaaggaaattggctttgactatgaaaaacagccattttcaacctttttataaaacctcttcagggaatattggaatattatttttgtcaggcaaaaataatccagggcttgagcattgctgtagaatatgttatctgttcaaaacttagcagagcacgcatgcatcacatgcattgtcatcagtatttgagagctgaaccaatggtttttgatggttgccgtaacagaagatctgtgaagaggatggtggtttgcacctgttcctgaagtcaaactggaaaaggttgcaggtatttcaattttctcaatcattttgcataaatgtattaatattttgagtagtaatagttctaaacctgcaggaaggcatcattgtatactgtggtatgtagagaatactactcttacactgctctttatcttaaaatgttttggtatactgtgaatattttcctctaagtatttggtgtattttgacagttattaaaggagaatataaaattaaagattctggtctaaactaagaataatggaaagttgcttcgtcctgccttagaggagttttcagttcatcctcttcttgagaaactatgtgttgctgttactaaataaacatttactcaataaacgttttatttcctcaaaaaaaaaaaaaaaaaaaaaaa

SEQ ID NO: 1955 - DNA, 4594 bp, Homo sapiens; identical to SEQ ID NO: 1492

SEQ ID NO: 1956 - DNA, 5253 bp, Homo sapiens; identical to SEQ ID NO: 610

SEQ ID NO: 1957 - DNA, 951 bp, Homo sapiens; identical to SEQ ID NO: 1517

SEQ ID NO: 1958 - DNA, 4952 bp, Homo sapiens
tcagtctggtactcttttttgaatgttgtcaaaactagttaattggaagttaacggtactatttatactaaaagagtaccagactgtcttcgccttcttgcacttcgcgggagaagttgttggcgcgaatggatcctgagcctcgataacagattcctcaaccggcccacccgccagccagccagcgccttcatcctggggctgcgatggacattcggaaattctttggagtaataccaagtggaaagaaacttgtaagtgaaacagtaaagaagaatgagaaaacaaagtctgatgaagaaactttaaaagcaaagaaaggaataaaggaaatcaaggtaaatagctcccgtaaagaggatgacttcaaacaaaagcaaccaagcaagaaaaagaggatcatctatgattcagattcagagtcagaggagacgttgcaggtaaaaaatgccaaaaagccaccagaaaaactgccagtatcttctaaacctggtaaaatttcacggcaggatcctgttacatacatttcagaaacagatgaagaagatgactttatgtgtaagaaggcggcctctaaatcaaaagagaatggaagatctacaaatagtcatcttggaacatcaaacatgaaaaagaatgaagaaaacactaagaccaagaataagcctttatcaccaataaaacttacacccacatcagtacttgattattttggaactggaagtgtccaaagatctaataagaagatggtggcaagcaaaagaaaagagctttcacaaaatacagatgagtctggattaaatgatgaagccatcgccaagcaattacagcttgatgaagatgcggagctggagaggcagttgcatgaagatgaagagtttgccagaacattagccatgttggatgaagaacccaagaccaaaaaggctcgaaaggacacagaagcgggagaaacgttttcatctgtccaagccaatttaagtaaagcagaaaaacataaatatcctcataaagtaaaaacagcacaagtttcagatgaaagaaagagctacagtcctaggaagcaaagtaaatatgaaagttcaaaagaatctcagcaacattccaagtcatcagctgacaaaataggagaagtctcttctcccaaggccagttctaagctggcaattatgaaaagaaaaaaagagagctcttataaagaaatagagcctgtggcctcaaaaagaaaagaaaatgccattaaattgaaaggagagacaaaaactcctaagaaaaccaaaagttctccagctaaaaaagagtctgtaagtcctgaagattctgaaaagaaacgcactaattatcaagcttatcgaagctacttaaatcgagaaggtcccaaggctctgggctccaaagaaataccaaagggagctgaaaattgcttggaaggccttatatttgtaatcacaggcgtgctggagtctattgaacgagatgaggccaagtctctaattgaacgttatgggggaaaagtaacaggaaatgtcagcaagaaaacaaattatcttgtcatgggtcgtgatagtggacagtccaagagtgataaggccgcagccttggggacaaaaattattgatgaagatggcctgttgaatctgattcggactatgccaggcaagaaatccaagtatgaaatagcagttgaaactgagatgaagaaagagtccaaactggagagaacaccccaaaaaaatgtccaaggaaaaagaaaaattagtccatctaaaaaggaatcagaatctaaaaagagcaggccgacttccaaaagggacagtttggcaaagacaataaaaaaggaaacagatgtgttttggaaaagcctggatttcaaggagcaggtggctgaggagacaagtggtgacagcaaggctaggaatttggctgatgacagcagtgaaaacaaagtggaaaatttgctctgggtggataaatataagccaacctcgctcaagaccataattggacagcaaggtgaccagagctgtgccaacaaactcctacgctggctccgaaactggcaaaagagttcttccgaagataaaaaacacgcagcaaagtttggtaaattttccggcaaagatgatggctctagttttaaagcagcgttgctgtcaggccctcctggtgttggcaaaaccaccacagcttccctggtgtgtcaggagttgggatacagctacgtggaactgaatgcaagtgacacccggagtaagagcagtttgaaagcgattgttgctgagtcactgaacaataccagcatcaaaggcttttattcaaatggagcagcctcttcagtaagcacgaaacatgctctcatcatggatgaagtagatggcatggcaggcaatgaggataggggaggaattcaggaattaattggcctgataaaacatactaaaattcccattatttgtatgtgcaatgatagaaatcatcccaagattcgctctctggttcattattgttttgatcttcgttttcaaagacctcgggttgaacagattaagggtgctatgatgtctattgcatttaaagaaggtttaaagattccccctccagctatgaatgaaataattttgggagccaatcaagatatcagacaggttttacataatctgagtatgtggtgtgcacgaagtaaagcattaacctatgaccaggccaaagctgattctcacagagccaaaaaggatatcaaaatgggcccatttgatgttgcccggaaagtgtttgcagctggagaggagactgctcacatgtcacttgtggacaagtcagatctcttttttcatgattattcaatagcacccctcttcgtccaggaaaattacatacacgtgaagcctgtagcagcagggggtgacatgaaaaagcacctgatgcttttaagcagagcagcagacagcatatgcgatggtgacctagtggacagccagatccggagtaagcaaaactggagtcttctgcctgcgcaggccatttatgccagtgttcttcctggagagttgatgagggggtacatgacccagtttcccaccttcccaagctggctggggaagcactcgtctacaggcaaacatgatcgtattgttcaggacctggccttgcatatgagtctcagaacttactccagcaaaaggactgtaaacatggattatctgtcgcttctaagggatgcacttgtacagcccttgacctcacaaggagtagacggagtacaggatgttgttgcacttatggacacatattatttgatgaaagaagactttgagaatatcatggaaatcagcagctggggtggcaaacctagtcccttttcaaagctggatcccaaggtgaaagcagccttcacaagagcttacaataaggaagcccaccttactccatactcacttcaagctataaaggcatctagacacagcacaagcccatccctggattcggaatacaatgaagaattaaatgaagatgactctcaatctgatgagaaagaccaagatgctatagaaactgatgccatgatcaagaaaaagacaaaatcttcaaagccttcaaaaccagaaaaagataaggagcccagaaaaggaaaaggaaaaagttcgaagaaatgaaaccatttttcactagcgacagccactttttactctccctcctgaccagtccagctggtctagagaaagccttgttttttcccagagcaaccatgttttagcataatgggatgacctggtgtcccattataaataaagggtggtatggctagaagggtatgagcagtaggcttatgtacacctcttatagaggttgataggactgcttgggtcctccactgtcctctgtcaatctagttagacgtgcttctgaatgactgtagaattggaactagaaactacacctgggctttggagtcagattttagttaacaataatgagcctggagcagtagtactaaggcgtcttttgtaggcttaagaatttatcctaatggcctttataggaccaatgctgattttttttaaaggcagttcctattatgtggtgaaattttgtaaataaatgattatacaaaacagtcaccacctagaactgggtattctttgtacattgtcagatatctttcaaagtataaattaggaataaaaatgttccacatgatatgtgtacaaattctttttaagattgtcatcttgtacagcaaaatattatgttggtatattacttccttattaatttgcaaatgattggattaaaaaagctcactgtattccttactaacctgttgtgtgaaacataacattggcagtcgaggagtcagaactcggattcccagcctcactccctctgtgtgtgttgaccacgtctctgctgtgaataggatttcatgcagtggtctgttatggggctttgcagcgtggggggctgcagaagattctcagacattcttatccttctggagtctcaacccatcaggttcagaccagtaggaaccaggctgggtcaggctcttaatttcactacggtgggggacaaaatgaacactggcttttgttcactttgcccctgagagatctagtcctgtcctgtgatggcttccacaaaccctgttggaagtttgggttattcctataactgtatgtgttgagtggccgtgacgtatggacctagcctggaatttagatgtctagctattttttaatcttgttggtaaatgctcagaggtctgtgctacctctgtgaggtatatactaaaatgaatgtaaaataaggatcgtattccctgctttaaggaactggtagtcttgtttgggtgatgagacaaagttcttgagacatttaaactgtatttaccagtgtgaaaaatgtcatttatggagattaattcattatggaaataaaacattgcctaagca

SEQ ID NO: 1959 - DNA, 2668 bp, Homo sapiens
aagacctgggacttccgtttcggtccagccgggctgcggccattgtttgtgtggactgagtgttttggccatcccggtccactctcacaggctccgttaagtgacatgaactctcaggaggactgagccagaagcggacagggcaagacgagctgtgcttgaaggaagaggggcagaaaatcgagggtcagggactgagaagctactccggtttagaaaccccagagacacccgtgtagatgggtacatcacggcttctctcccacgttaagacttaataaagaaagcctgatctttgaccagatggcagtaacatttgaagatgtgactattatttttacatgggaggagtggaaattcctggattcttctcaaaaaagactctacagggaggtcatgtgggagaactacacaaatgtcatgtcagtagaaaactggaatgagagctacaaatcccaagaagaaaaattcagatacttagaatatgaaaatttttcctactggcaaggctggtggaatgctggcgcccagatgtatgagaatcagaactatggggaaactgttcaagggacagattccaaagacctcacacagcaagatcgttcccagtgtcaggaatggttaatactctccacacaagtaccagggtatgggaactatgaactgacttttgaaagcaaaagtctcaggaacttaaaatataaaaattttatgccttggcagtccttagaaacaaaaaccactcaagactatggtagagaaatctacatgagtggttcacatggttttcaagggggcagataccgtcttggcatatccaggaaaaacctctccatggaaaaagaacagaagctcatagttcagcattcttatatcccagtggaggaagcccttccacagtatgttggggtgatatgtcaagaagacctactgagagattcaatggaagaaaagtactgtggatgtaataaatgtaaaggaatttattattggaactcacggtgtgttttccacaagagaaatcaacctggagaaaacctctgtcaatgctccatctgtaaagcatgcttctctcagagatcagacttgtatagacatccaagaaaccacataggtaagaagctgtacggatgtgatgaagttgacggtaactttcatcagagctccggagttcactttcatcagagagttcacataggggaggtaccttatagctgtaatgcatgtggtaagagcttcagccagatctctagtcttcacaatcatcaaagagtccacacagaagagaaattctataaaattgagtgtgataaagacctcagtagaaattcattacttcacattcaccagagacttcacataggagagaagccttttaaatgtaatcagtgtggtaagagttttaatcggagttcagtacttcatgttcatcagagagtccacacaggagaaaaaccatataagtgtgatgagtgtggtaagggtttcagccagagctcaaatcttcgaattcatcagttagtacacacaggagagaagtcttataaatgtgaagactgtggtaaaggctttacccagcgctcaaatcttcaaattcatcagagagtgcatacaggagagaaaccttataaatgtgatgactgtggaaaggactttagtcacagctcagatcttcgcattcatcagagagtccatacaggggagaaaccctatacttgtcctgaatgtgggaagggcttcagtaagagttcaaagcttcacactcatcaaagagtacatactggagagaaaccctacaaatgtgaagagtgtggcaagggattcagtcagcgttcacatcttctcattcatcagagagtccatacaggagaaaagccctataaatgtcatgattgtggaaagggttttagtcacagttctaatcttcacattcatcagagggtccatacaggagagaagccttatcaatgtgctaagtgtggtaaaggtttcagtcatagctcagctcttcgaattcatcaaagagtccatgcaggagagaaaccttacaaatgccgtgaatattataagggatttgatcataattcacatcttcacaataatcatagaagaggaaacttataaatattgttcatttagttaacagctttaatcaaagtttacctaacctttaaaccctataaatcctgctgttaaggaaatcttataaataacacaagtaatcccaagcaacatttatagtttcccctatctcccactaagaattatttgcttcaaaaggagatctttagaaaaaaccctatatatttaaaattatagtgtatttttctttacctactataaatataatacagtcataaatatattaaacatttaaggagaaaactcttcattctatttcattctagtctttttttctgtgcattttaatgtgcatgaaattgtgtgttcaattttgtattttcactgtcttcaaaatatttacttaaattttggtttgaattgaaactggttggccaactgttaaacgacatctcttaactcccctaaaaactccctaggaagtaacagaaaagatggaaacacatagaacttaaaactcagttttggccggtagaattcaattgtttatggacaaaagccacctaataaaagataggaaagcatt

SEQ ID NO: 1960 - DNA, 1040 bp, Homo sapiens
agcaatttgaggctctgtcatcagtttctgctacgtttcaaagatcctggagaagcctagtgttgtgtcaagacgccgatggacccatcacagtttaatccaacctacatcccagggtctccacaaatgctcaccgaagaaaattcccgggacgattcaggggcctctcaaatctcctccgagacgttgataaagaaccttagtaacttgactatcaacgctagtagcgaatctgtttcccctctatcggaagctttactccgtcgagagtctgtaggagcagcagtcctcagggaaatcgaagatgagtggctttacagcaggagaggagtaagaacattgctgtctgtgcagagagaaaagatggcaagattgagatacatgttactcggcggagttcgtacgcatgaaagaagaccaacaaacaaggagcctaagggagttaagaaggaatcaagaccattcaaatgtccctgcagtttctgcgtgtctaatggatgggatccttctgagaatgctagaatagggaatcaagacaccaagccacttcagccataaatcttattcttgcacctttttttcttgctagtaattttatatagcaggttgagaaagctactctatgctagtatagactatacaccaataattttgataatgagttctaggatgtatttttcttgtatctttttcttcctactatgatactagtaattcataagggatctgtgtaatctgaatgtatttgaataactttagctctactgtttgatttgacccaaagaagccaagatgatataagtattcccatgtgtcttagaagcccaaagtcagtgagatgaaacccaacatcaagaaattgaagcaaagttacttatggataaagaaagcattaggtagttgggctatagcataattagattttctggctttcaaaaatttggattgcaatcacagcaaactttgttatttttacagttttcagtacaaaagtgtttatatagaaacaataaagttgacatttgagtaccttttaaaaa

SEQ ID NO: 1961 - DNA, 3655 bp, Homo sapiens
agcaatcctttctttcagctggagtgctcctcaggagccagccccacccttagaaaagatgttttccatgaggatcgtctgcctggtcctaagtgtggtgggcacagcatggactgcagatagtggtgaaggtgactttctagctgaaggaggaggcgtgcgtggcccaagggttgtggaaagacatcaatctgcctgcaaagattcagactggcccttctgctctgatgaagactggaactacaaatgcccttctggctgcaggatgaaagggttgattgatgaagtcaatcaagattttacaaacagaataaataagctcaaaaattcactatttgaatatcagaagaacaataaggattctcattcgttgaccactaatataatggaaattttgagaggcgatttttcctcagccaataaccgtgataatacctacaaccgagtgtcagaggatctgagaagcagaattgaagtcctgaagcgcaaagtcatagaaaaagtacagcatatccagcttctgcagaaaaatgttagagctcagttggttgatatgaaacgactggaggtggacattgatattaagatccgatcttgtcgagggtcatgcagtagggctttagctcgtgaagtagatctgaaggactatgaagatcagcagaagcaacttgaacaggtcattgccaaagacttacttccctctagagataggcaacacttaccactgataaaaatgaaaccagttccagacttggttcccggaaattttaagagccagcttcagaaggtacccccagagtggaaggcattaacagacatgccgcagatgagaatggagttagagagacctggtggaaatgagattactcgaggaggctccacctcttatggaaccggatcagagacggaaagccccaggaaccctagcagtgctggaagctggaactctgggagctctggacctggaagtactggaaaccgaaaccctgggagctctgggactggagggactgcaacctggaaacctgggagctctggacctggaagtactggaagctggaactctgggagctctggaactggaagtactggaaaccaaaaccctgggagccctagacctggtagtaccggaacctggaatcctggcagctctgaacgcggaagtgctgggcactggacctctgagagctctgtatctggtagtactggacaatggcactctgaatctggaagttttaggccagatagcccaggctctgggaacgcgaggcctaacaacccagactggggcacatttgaagaggtgtcaggaaatgtaagtccagggacaaggagagagtaccacacagaaaaactggtcacttctaaaggagataaagagctcaggactggtaaagagaaggtcacctctggtagcacaaccaccacgcgtcgttcatgctctaaaaccgttactaagactgttattggtcctgatggtcacaaagaagttaccaaagaagtggtgacctccgaagatggttctgactgtcccgaggcaatggatttaggcacattgtctggcataggtactctggatgggttccgccataggcaccctgatgaagctgccttcttcgacactgcctcaactggaaaaacattcccaggtttcttctcacctatgttaggagagtttgtcagtgagactgagtctaggggctcagaatctggcatcttcacaaatacaaaggaatccagttctcatcaccctgggatagctgaattcccttcccgtggtaaatcttcaagttacagcaaacaatttactagtagcacgagttacaacagaggagactccacatttgaaagcaagagctataaaatggcagatgaggccggaagtgaagccgatcatgaaggaacacatagcaccaagagaggccatgctaaatctcgccctgtcagagactgtgatgatgtcctccaaacacatccttcaggtacccaaagtggcattttcaatatcaagctaccgggatccagtaagattttttctgtttattgcgatcaagagaccagtttgggaggatggcttttgatccagcaaagaatggatggatcactgaattttaaccggacctggcaagactacaagagaggtttcggcagcctgaatgacgagggggaaggagaattctggctaggcaatgactacctccacttactaacccaaaggggctctgttcttagggttgaattagaggactgggctgggaatgaagcttatgcagaatatcacttccgggtaggctctgaggctgaaggctatgccctccaagtctcctcctatgaaggcactgcgggtgatgctctgattgagggttccgtagaggaaggggcagagtacacctctcacaacaacatgcagttcagcacctttgacagggatgcagaccagtgggaagagaactgtgcagaagtctatgggggaggctggtggtataataactgccaagcagccaatctcaatggaatctactaccctgggggctcctatgacccaaggaataacagtccttatgagattgagaatggagtggtctgggtttcctttagaggggcagattattccctcagggctgttcgcatgaaaattaggccccttgtgacccaataggctgaagaagtgggaatgggagcactctgtcttctttgctagagaagtggagagaaaatacaaaaggtaaagcagttgagattctctacaacctaaaaaattcctaggtgctattttcttatcctttgtactgtagctaaatgtacctgagacatattagtctttgaaaaataaagttatgtaaggttttttttatctttaaatagctctgtgggttttaacatttttataaagatataccaagggccattcagtacatcaggaaagtggcagacagaagcttctctctgcaaccttgaagactattggtttgagaacttctcttcccataccacccaaaatcataatgccattggaaagcaaaaagttgttttatccatttgatttgaattgttttaagccaatattttaaggtaaaactcactgaatctaaccatagctgacctttgtagtagaatttacaacttataattacaatgcacaatttataattacaatatgtatttatgtcttttgctatggagcaaatccaggaaggcaagagaaacattctttcctaaatataaatgaaaatctatcctttaaactcttccactagacgttgtaatgcacacttatttttttcccaaggagtaaccaatttctttctaaaacacatttaaaattttaaaactatttatgaatattaaaaaaagacataattcacacattaataaacaatctcccaagtattgatttaacttcatttttctaataatcataaactatattctgtgacatgctaattattattaaatgtaagtcgttagttcgaaagcctctcactaagtatgatctatgctatattcaaaattcaacccatttactttggtcaatatttgatctaagttgcatctttaatcctggtggtcttgccttctgatttttaatttgtatccttttctattaagatatatttgtcattttctcttgaatatgtattaaaatatcccaagc

SEQ ID NO: 1962 - DNA, 4131 bp, Homo sapiens
atcccgcccgcatacagcccgcatcccgccggggaagcgagcccagtccagcgctgcccgtccagtcctcgcccaagatttaaagcccgcaagttttgttcttgagaccagcgactttagctccgatgcgggaaggaaagccgacctccgatttggacatttaaagagctgggcttgaacttcgtgagtttcgctctaaactgcccttgaaatgaagctggacttggaggtggcatggaatattcacatgggagagccgcatgaggccgcccaccacgcttcctgaaggatgcccgtgtggaagaattttgacgtgccagtgtcctcgttctacagggtgttccattcttccgcaatctcagaaaaatgggactaaaagaaactattttgtaaaataagaagacttccatttttaatgaccaacatgtattaagatggacacctactctacgaaacacgaagttctatggtctcgaagaagcccgtgcctgtttaaaactgatcctaactaaaaacagacttgagtggatatgagaatgttggttagtggcagaagagtcaaaaaatggcagttaattattcagttatttgctacttgttttttagcgagcctcatgtttttttgggaaccaatcgataatcacattgtgagccatatgaagtcatattcttacagatacctcataaatagctatgactttgtgaatgataccctgtctcttaagcacacctcagcggggcctcgctaccaatacttgattaaccacaaggaaaagtgtcaagctcaagacgtcctccttttactgtttgtaaaaactgctcctgaaaactatgatcgacgttccggaattagaaggacgtggggcaatgaaaattatgttcggtctcagctgaatgccaacatcaaaactctgtttgccttaggaactcctaatccactggagggagaagaactacaaagaaaactggcttgggaagatcaaaggtacaatgatataattcagcaagactttgttgattctttctacaatcttactctgaaattacttatgcagttcagttgggcaaatacctattgtccacatgccaaatttcttatgactgctgatgatgacatatttattcacatgccaaatctgattgagtaccttcaaagtttagaacaaattggtgttcaagacttttggattggtcgtgttcatcgtggtgcccctcccattagagataaaagcagcaaatactacgtgtcctatgaaatgtaccagtggccagcttaccctgactacacagccggagctgcctatgtaatctccggtgatgtagctgccaaagtctatgaggcatcacagacactaaattcaagtctttacatagacgatgtgttcatgggcctctgtgccaataaaatagggatagtaccgcaggaccatgtgtttttttctggagagggtaaaactccttatcatccctgcatctatgaaaaaatgatgacatctcatggacacttagaagatctccaggacctttggaagaatgctacagatcctaaagtaaaaaccatttccaaaggtttttttggtcaaatatactgcagattaatgaagataattctcctttgtaaaattagctatgtggacacatacccttgtagggctgcgtttatctaatagtacttgaatgttgtatgttttcactgtcactgagtcaaacctggatgaaaaaaacctttaaatgttcgtctataccctaagtaaaatgaggacgaaagacaaatattttgaaagcctagtccatcagaatgtttctttgattctagaagctgtttaatatcacttatctacttcattgcctaagttcatttcaaagaatttgtatttagaaaaggtttatattattagtgaaaacaaaactaaagggaagttcaagttctcatgtaatgccacatatatacttgaggtgtagagatgttattaagaagttttgatgttagaataattgcttttggaaaataccaaatgaacgtacagtacaacatttcaaggaaatgaatatattgttagaccaggtaagcaagtttatttttgttaaagagcacttggtggaggtagtaggggcagggaaaggtcagcataggagagaaagttcatgaatctggtaaaacagtctcttgttcttaagaggagatgtagaaaaatgtgtacaatgttattataaacagacaaatcacgtcttaccacatccatgtagctactggtgttagagtcattaaaatacctttttttgcatcttttttcaaagtttaatgtgaacttttagaaaagtgattaatgttgccctaatactttatatgtttttaatggatttttttttaagtattagaaaatgacacataacacgggcagctggttgctcatagggtccttctctagggagaaaccattgttaattcaaataagctgattttaatgacgttttcaactggtttttaaatattcaatattggtctgtgtttaagtttgttatttgaatgtaatttacatagaggaatataataatggagagacttcaaatggaaagacagaacattacaagcctaatgtctccataattttataaaatgaaatcttagtgtctaaatccttgtactgattactaaaattaacccactcctccccaacaaggtcttataaaccacagcactttgttccaagttcagagttttaaattgagagcattaaacatcaaagttataatatctaaaacaatttatttttcatcaataactgtcagaggtgatctttattttctaaatatttcaaacttgaaaacagagtaaaaaagtgatagaaaagttgccagtttggggttaaagcatttttaaagctgcatgttccttgtaatcaaagagatgtgtctgagatctaatagagtaagttacatttattttacaaagcaggataaaaatgtggctataatacacactacctcccttcactacagaaagaactaggtggtgtctactgctagggagattatatgaaggccaaaataatgacttcagcaagagtgactgaactcactctaaggcctttgactgcagaggcacctgttagggaaaatcagatgtctcatataataaggtgatgtcggaaacacgcaaaacaaaacgaaaaaagatttctcagtatacacaactgaatgatgatacttacaatttttagcaggtagctttttaatgtttacagaaattttaatttttttctattttgaaatttgaggcttgtttacattgcttagataatttagaatttttaactaatgtcaaaactacagtgtcaaacattctaggttgtagttactttcagagtagatacagggttttagatcattacagtttaagttttctgaccaattaaaaaaacatagagaacaaaagcatatttgaccaagcaacaagcttataattaatttttattagttgattgattaatgatgtattgccttttgcccatatataccctgtgtatctatacttggaagtgtttaaggttgccattggttgaaaacataagtgtctctggccatcaaagtgatcttgtttacagcagtgcttttgtgaaacaattatttatttgctgaaagagctcttctgaactgtgtccttttaatttttgcttagaatagaatggaacaagtttaaatttcaaggaaatatgaaggcacttcctttttttctaagaaggaagttgctagatgattccttcatcacacttacttaaagtactgagaagagtatctgtaaataaaagggttccaaccttttaaaaaagaaggaaaaaactttttggtgctccagtgtagggctatctttttaaaaaatgtcaacaaagggaaaataaactatcagcttggatggtcacttgaatagaagatggttatacacagtgttattgttaaaatttttttaccttttggttggtttgcatcttttttccatattgttaattttataccaaaatgttaaatatttgtattacttgaattttgctcttgtatggcaaaataattagtgagtttaaaaaaaatctatagtttccaataaacaactgaaaaattatcatgaaaaaaaaa

SEQ ID NO: 1963 - DNA, 6595 bp, Homo sapiens
gctccctgggctgctggtcttctttaccttccagctgctcacagaacagagagtttctacatacaagcagaagatgtgaaaatattgggaataaataaagtatatgcttataaacaagttgtggctgctcctggttacgttgtgcctgaccgaggaactggcagcagcgggagagaagtcttatggaaagccatgtgggggccaggactgcagtgggagctgtcagtgttttcctgagaaaggagcgagaggacgacctggaccaattggaattcaaggcccaacaggtcctcaaggattcactggctctactggtttatcgggattgaaaggagaaaggggtttcccaggccttctgggaccttatggaccaaaaggagataagggtcccatgggagttcctggctttcttggcatcaatgggattccgggccaccctggacaaccaggccccagaggcccacctggtctggatggctgtaatggaactcaaggagctgttggatttccaggccctgatggctatcctgggcttctcggaccacccgggcttcctggtcagaaaggatcaaaaggtgaccctgtccttgctccaggtagtttcaaaggaatgaagggggatcctgggctgcctggactggatggaatcactggcccacaaggagcacccggatttcctggagctgtaggacctgcaggaccaccaggattacaaggtcctccagggcctcctggtcctcttggtcctgatgggaatatggggctaggttttcaaggagagaaaggagtcaagggggatgttggcctccctggcccagcaggacctccaccatctactggagagctggaattcatgggattccccaaagggaagaaaggatccaagggtgaaccagggcctaagggttttccaggcataagtggccctccaggcttcccgggccttggaactactggagaaaagggagaaaagggagaaaagggaatccctggtttgccaggacctaggggtcccatgggttcagaaggagtccaaggccctccagggcaacagggcaagaaagggaccctgggatttcctgggcttaatggattccaaggaattgagggtcaaaagggtgacattggcctgccaggcccagatgttttcatcgatatagatggtgctgtgatctcaggtaatcctggagatcctggtgtacctggcctcccaggccttaaaggagatgaaggcatccaaggcctacgtggcccttctggtgtccctggattgccagcattatcaggtgtcccaggagccctagggcctcagggatttccagggctgaagggggaccaaggaaacccaggccgtaccacaattggagcagctggcctccctggcagagatggtttgccaggcccaccaggtccaccaggcccacctagtccagaatttgagactgaaactctacacaacaaagagtcagggttccctggtctccgaggagaacaaggtccaaaaggaaacctaggcctcaaaggaataaaaggagactcaggtttctgtgcttgtgacggtggtgttcccaacactggaccacccggggaaccaggcccacctggtccatggggtctcataggccttccaggccttaaaggagccagaggagatcgaggctctgggggtgcacagggcccagcaggggctccaggcttagttgggcctctgggtccttcaggacccaaaggaaagaagggggaaccaattctcagtacaatccaaggaatgccaggagatcggggtgattctggctcccagggcttccgtggtgtaataggagaaccaggcaaggacggagtaccaggtttaccaggtctgccaggccttccgggtgatggtggacagggcttcccaggtgaaaaggggttacctggacttcctggtgaaaaaggccatcctggtccacctggcctcccaggaaatgggttaccaggacttcctggaccccgtgggcttcctggagataaaggcaaggatggattaccgggacaacaaggccttcccggatctaagggaatcaccctgccctgtattattcctgggtcatacggtccatcaggatttccaggcactcccggattcccaggccctaaagggtctcgaggcctccctgggaccccaggccagcctgggtcaagtggaagtaaaggagagccagggagtccaggattggttcatcttcctgaattaccaggatttcctggacctcgtggggagaagggcttgcctgggtttcctgggctccctggaaaagatggcttgcctgggatgattggcagtccaggcttacctggttccaagggagccactggtgacatctttggtgctgaaaatggtgctccgggggaacaaggcctacaaggattaacagggcacaaaggatttcttggagactctggccttccaggactcaagggtgtgcacgggaagcctggcttactaggccccaaaggtgagcggggcagccctgggacaccaggacaggtgggacagccaggcaccccaggatctagtggtccatatggcatcaagggcaaatctgggctcccaggagcaccaggcttcccaggcatctcaggacatcctggaaagaaaggaacaagaggcaagaaaggtcctcctggatcaattgtaaagaaagggctgccagggctaaaaggccttcctggaaatccaggcctagtaggactgaaaggaagcccaggctctccaggggtcgctgggttgccagccctctctggacccaagggagagaaggggtctgttggattcgtaggttttccaggaataccaggtctgcctggtattcctggaacaagaggattaaaaggaattccaggatcaactggaaaaatgggaccatctggacgtgctggtactcctggtgaaaagggagacagaggcaatccggggccagtcggaatacctagtccaagacgtccaatgtcaaacctttggctcaaaggagacaaaggctctcaaggctcagccggatccaatggatttcctgggccaagaggtgacaaaggagaggctggtcgacctggaccaccaggcctacctggagctcctggcctcccaggcattatcaaaggagttagtggaaagccagggccccctggcttcatgggaatccggggcttacctggcctgaaggggtcctctgggatcacaggtttcccaggaatgccaggagaaagtggttcacaaggtatcagagggtcgcctggactcccaggagcatctggtctcccaggcctgaaaggagacaacggccagacagttgaaatttccggtagcccaggacccaagggacagcctggcgaatctggttttaaaggcacaaaaggaagagatggactaataggcaatataggcttccctggaaacaaaggtgaagatggaaaagttggtgtttctggagatgttggccttcctggagctccaggatttccaggagttgccggcatgagaggagaaccaggacttccaggttcttctggtcaccaaggggcaattgggcctctaggatcccccggattaataggacccaaaggcttccctggatttcctggtttacatggactgaatgggcttccgggcaccaagggtacccatggcactccaggacctagtatcaccggtgtgcctgggcctgctggtctccctggacccaaaggagaaaaaggatatccaggaattggcatcggagctccagggaagccgggcctgagagggcaaaaaggtgatcgaggtttcccaggtctccagggccctgctggtctccccggtgccccaggcatctccttgccctcactcatagcaggacagcctggtgaccccgggcgaccaggcctagatggagaacgaggccgcccaggccccgctggacccccaggtccccctgggccatcctcgaatcaaggcgacaccggagaccctggcttccctggaattcctggacctaaagggcctaagggagaccaaggaattccaggtttttctggcctccctggagagctaggactgaaaggcatgagaggtgagcctggcttcatggggactccaggcaaggttgggccacctggagacccaggatttcccggaatgaaggggaaggcagggccaagaggctcttctggcctccaaggtgatcctggacaaacaccaactgcagaagctgtccaggttcctcctggacccttgggtctaccagggatcgatggcatccctggcctcactggggaccctggggctcaaggccctgtaggcctacaaggctccaaaggtttacctggcatccccggtaaagatggccccagtgggctcccaggcccacctggggctcttggtgatcctggtctgcctggactgcaaggccctccaggatttgaaggagctccagggcagcaaggccccttcgggatgcctggaatgcctggccagagcatgagagtgggctacacgttggtaaagcacagccagtcggaacaggtgcccccgtgtcccatcgggatgagccagctgtgggtggggtacagcttactgtttgtggaggggcaagagaaagcccacaaccaggacctgggctttgctggctcctgtctgccccgcttcagcaccatgcccttcatctactgcaacatcaacgaggtgtgccactatgccaggcgcaatgataaatcttactggctctccactaccgcccctatccccatgatgcccgtcagccagacccagattccccagtacatcagccgctgctctgtgtgtgaggcaccctcgcaagccattgctgtgcacagccaggacatcaccatcccgcagtgccccctgggctggcgcagcctctggattgggtactctttcctcatgcacactgccgctggtgccgagggtggaggccagtccctggtctcacctggctcctgcctagaggactttcgggccactcctttcatcgaatgcagtggtgcccgaggcacctgccactactttgcaaacaagtacagtttctggttgaccacagtggaggagaggcagcagtttggggagttgcctgtgtctgaaacgctgaaagctgggcagctccacactcgagtcagtcgctgccaggtgtgtatgaaaagcctgtagggtggcacctgccactctgccccttgccctcccctgcccctcacaacagtcacctcacaaacctgaatggtctgaagaaggaaggcctgagcccctttgcctgtcaagttgtacattggagtctcatttgggctagactaccggacactcgtcaccccagccctcgggtccatagagatgagcccaccctgctgagatctgctgtcctgtttctgtcaagctggtgctactgtttgatttggatgattgtgtgactattcatggctacctcagaaagatttgatgggccacaactgtcttagactgctagctttctccttaccgtcttgatcggaaagctcttcctaatcgctaatcagtcatttcttcatgtacagaggtcagcacacattatttggcttaaaccagaacccagtgtttccacacttaaattctctaaccgaatattcatggatggctcaagtctgcacagagcaagtcctcactcttcaaggaggcccactgtgtctaggcaggcaagagaattgaaatgaggtgccacccagtagcccagagtgagctttagctctctctagaatgagcaagactgggccccacatggcttagagaggcttgaaggccagcagctgggttgggggtggtggtcattaatggcatatggtcctagacaaaccatctcctccttgccggctccccctccagccagagacagaggatgtggcctggttcaaagtaaagcagaggatgcaacaaatgtggccaagcctatcaaaggaaatgagaatgacagccttttttcctgggccagaagtagaggggtgggtgcgtaaggatgtgtgagttttgcttttgactccaggaacaaaaaggtaaatcccacatcccagtttctcagaagtccctgtttattccaaatgccatccagatgtgtgcaatgtggcaaactgaagctgcacagtgttggtttccttgtattctgaggatgttaaagactttgttaaatggttatccaattgctctttcacaggtagcctattaaactattttaatatgtttttttaaacctcataaaaatctagcacactcttctcttgagcagttagcagacctaaagcaagcctgaattggctatgcagtacattgtattctgtttgggggaatttgttttagccattttctttaattaccagttttccagaacactcttagctatgttgacatgaggcagttccttccaggtgattctgtttccttaagtattatataaactgtgccaatacagacaaagcataatcaatataatctgaattattgttatctttacctcctgagtaataagcatggtgtcagttttgtacatagcaaataaaataaatgaaatctgaacatgtgaaaaaaaaaaaaaaaaaaaaaaaa

SEQ ID NO: 1964 - DNA, 3974 bp, Homo sapiens; identical to SEQ ID NO: 565

SEQ ID NO: 1965 - DNA, 7394 bp, Homo sapiens; identical to SEQ ID NO: 573

SEQ ID NO: 1966 - DNA, 2344 bp, Homo sapiens
aaaatcgattgctctctgccacaaaccggagacccttcttgggcgatccgctttctcagcatgtggaaggtttttctctctctcttctttttctactaaaccttccgctcctaaacccattcctcgtgtgtatccctgtcctgaattctttctcgaccatgacaaagaaccagcttccactgcagagaggtccattccaactgctcagatgaagctgaaaagagcccgactcgccgatgatctcaatgaaaaaattgctctacgaccagggccactggagctggtggaaaaaaacattcttcctgtggattctgctgtgaaagaggccataaaaggtaaccaggtgagtttctccaaatccacggatgcttttgcctttgaagaggacagcagcagcgatgggctttctccggatcagactcgaagtgaagacccccaaaactcagcgggatccccgccagacgctaaagcctcagataccccttcgacaggttctctggggacaaaccaggatcttgcttctggctcagaaaatgacagaaatgactcagcctcacagcccagccaccagtcagatgcggggaagcaggggcttggcccccccagcacccccatagccgtgcatgctgctgtaaagtccaaatccttgggtgacagtaagaaccgccacaaaaagcccaaggaccccaagccaaaggtgaagaagcttaaatatcaccagtacattcccccagaccagaaggcagagaagtcccctccacctatggactcagcctacgctcggctgctccagcaacagcagctgttcctgcagctccaaatcctcagccagcagcagcagcagcagcaacaccgattcagctacctagggatgcaccaagctcagcttaaggaaccaaatgaacagatggtcagaaatccaaactcttcttcaacgccactgagcaatacccccttgtctcctgtcaaaaacagtttttctggacaaactggtgtctcttctttcaaaccaggcccactcccacctaacctggatgatctgaaggtctctgaattaagacaacagcttcgaattcggggcttgcctgtgtcaggcaccaaaacggctctcatggaccggcttcgacccttccaggactgctctggcaacccagtgccgaactttggggatataacgactgtcacttttcctgtcacacccaacacgctgcccaattaccagtcttcctcttctaccagtgccctgtccaacggcttctaccactttggcagcaccagctccagccccccgatctccccagcctcctctgacctgtcagtcgctgggtccctgccggacaccttcaatgatgcctccccctccttcggcctgcacccgtccccagtccacgtgtgcacggaggaaagtctcatgagcagcctgaatgggggctctgttccttctgagctggatgggctggactccgagaaggacaagatgctggtggagaagcagaaggtgatcaatgaactcacctggaaactccagcaagagcagaggcaggtggaggagctgaggatgcagcttcagaagcagaaaaggaataactgttcagagaagaagccgctgcctttcctggctgcctccatcaagcaggaagaggctgtctccagctgtccttttgcatcccaagtacctgtgaaaagacaaagcagcagctcagagtgtcacccaccggcttgtgaagctgctcaactccagcctcttggaaatgctcattgtgtggagtcctcagatcaaaccaatgtactttcttccacatttctcagcccccagtgttcccctcagcattcaccgctgggggctgtgaaaagcccacagcacatcagtttgcccccatcacccaacaaccctcactttctgccctcatcctccggggcccagggagaagggcacagggtctcctcgcccatcagcagccaggtgtgcactgcacagaactcaggagcacacgatggccatcctccaagcttctctccccattcttccagcctccacccgcccttctctggagcccaagcagacagcagtcatggtgccgggggaaacccttgtcccaaaagcccatgtgtacagcaaaagatggctggtttacactcttctgataaggtggggccaaagttttcaattccatccccaactttttctaagtcaagttcagcaatttcagaggtaacacagcctccatcctatgaagatgccgtaaagcaggtaaccatgtgatttgttctttatggaagaatagactgactcaatgaacagacattgtttgatatgattaaacttcacgcagtttgtaaattc

SEQ ID NO: 1967 - DNA, 2649 bp, Homo sapiens
ctataaagttctcgctgccccggaggctatgctactgcgaggagccggcgcagggtggcccgggaggggtgagcagggtgccgctggctgctggggtctgcaggtcaccgagtccccaggagaggggactcctaagaagccacctgcctgtgtttacccggcagcgagcgcgcaggcccccgcgaactcctggcagcgctcaggaaaggccgttgcgcctcgcgaaggaaacagagccgttgaccatggttgcaactggcagtttgagcagcaagaacccggccagcatttcagaattgctggactgtggctatcacccagagagcctgctaagtgattttgactactgggattatgttgttcctgaacccaacctcaacgaggtaatatttgaggaatcaacttgccagaatttggttaaaatgctggagaactgtctgtccaaatcaaagcaaactaaacttggttgctcaaaggtccttgtccctgagaaactgacccagagaattgctcaagatgtcctgcggctttcctcaacggagccctgcggcttgcgaggttgtgttatgcacgtgaacttggaaattgaaaatgtatgtaaaaagctggataggattgtgtgtgattctagcgtcgtacctacttttgagcttacacttgtgtttaagcaggagaactgctcatggactagcttcagggactttttctttagtagaggtcgcttctcctctggtttcaggagaactctgatcctcagctcaggatttcgacttgttaagaaaaaactttactcactgattggaacaacagtgattgaagggtcctaaaaagggaaaatatataaagattatttcatgattgggtagtaaaactattcagctagtcagctaaagtcatttgtagtttgccccacctgccctaaataagaaaccccaaatgtagtctcttttctttctgtgtttcacattcatagcaactgcagctaacaggctgattttctggcctttggagaagtgattcaaaatagtgtagattttctgcatagatcccatttttgtacagaattgaatgggatggaataggtaagcaaaagtagaagcccatttgagttttacatttgattccacaatttggtttcaggtaggcttggtaatagactatataaaccagatttgcctattttgattttcatatggcttttttttctgtaagttttcagaggattttttaaatcacagaatcatactaaatgatatttagcctatcaaaacttccaaaagcccacaccaccagttcctgactcaaatttgaagggtttttagacaggagggtaggattaagtaggtgagtttaattaaagcttaaccctaggtaagagtaaatgagaaatattacggcaataatggaactgcttcactgtttcttggtgacttcctcactctaatgttttaaagaggcaacaaaagcttgtggtgccatttcagtaaccacggtgttgttttagatgcctttataagctcagtttcccctgttcttaagtgttgaatactgtctttaaactagaaaaatgcaaaatattgaactgatatttttgtgtgtagttgattactcttccattgagtgaatgatgaatacctgtgaggataggaaattagttctgagatctagtccctctctgattcacttagtaatctatcctcttttcagtattacatgtgcttaatctcagatgaaccatttcaccatggcagtgttatctcatctctgggcttttctgggaattgaagtatctctccttaaccccaattgtcaagggtagtagctgtatactaccactttgaattattgaaacgggtcaatttacgaagtctgcattggctatggagatatggtttatagtacagcctagagaatgaaactcaccgtccagataaccatgcatgcacccagattttttccaccttggatacctgtcactagggaataataaaggcctgattttttgtcttattccaactaagtagatcattatctctttccttttttatgttaatgagagaatttagcctccactcaacaatgttcaattcagcaaggctttcatatccttgctgtgggtcgtggataaggagcttattcaggtttcctgccctagctattagctccacttcacatgctggagaccggcgtagggacagatgtattcatcctggtgttactgaaaaacaggtgtgatcctgttactgatactataagtgacctaaaatgtcactgttcaaattagccagtgttctaacaaactaaactcttcaaatgcttggaaagatactacaaagccaatctttatagaattgggccaagataaatctatgttgttttgcatggctattgttaagctccaaaggttcactgtgtttctgccgctgtcctggagttgtcaccactgactgggcaaggcttcttgggcatggatgtagaactgttgtccttttcccactaacagttatctttgactctcttgcctgttatgcttacaaaatggtgatggcttatggaaggctgttaaattaatattcctgttaaaggaaattaaagtttgtctatttttgacaataaaacattatatatttttaaaaaaaaaaaaaaaaa

SEQ ID NO: 1968 - DNA, 7739 bp, Homo sapiens; identical to SEQ ID NO: 1380

SEQ ID NO: 1969 - DNA, 6063 bp, Homo sapiens; identical to SEQ ID NO: 1917

SEQ ID NO: 1970 - DNA, 4841 bp, Homo sapiens; identical to SEQ ID NO: 606

SEQ ID NO: 1971 - DNA, 980 bp, Homo sapiens
gcggcggcgggcagcagctgcgctgcgactgctctggaaggagaggacggggcacaaaccctgaccatgaccccccacaggctgctgccaccgctgctgctgctgctagctctgctgctcgctgccagcccaggaggcgccttggcgcggtgcccaggctgcgggcaaggggtgcaggcgggttgtccagggggctgcgtggaggaggaggatggggggtcgccagccgagggctgcgcggaagctgagggctgtctcaggagggaggggcaggagtgcggggtctacacccctaactgcgccccaggactgcagtgccatccgcccaaggacgacgaggcgcctttgcgggcgctgctgctcggccgaggccgctgccttccggcccgcgcgcctgctgttgcagaggagaatcctaaggagagtaaaccccaagcaggcactgcccgcccacaggatgtgaaccgcagagaccaacagaggaatccaggcacctctaccacgccctcccagcccaattctgcgggtgtccaagacactgagatgggcccatgccgtagacatctggactcagtgctgcagcaactccagactgaggtctaccgaggggctcaaacactctacgtgcccaattgtgaccatcgaggcttctaccggaagcggcagtgccgctcctcccaggggcagcgccgaggtccctgctggtgtgtggatcggatgggcaagtccctgccagggtctccagatggcaatggaagctcctcctgccccactgggagtagcggctaaagctgggggatagaggggctgcagggccactggaaggaacatggagctgtcatcactcaacaaaaaaccgaggccctcaatccaccttcaggccccgccccatgggcccctcaccgctggttggaaagagtgttggtgttggctggggtgtcaataaagctgtgcttggggtcgctgaaaaaaaaaaaaaa

SEQ ID NO: 1972 - DNA, 1374 bp, Homo sapiens; identical to SEQ ID NO: 542

SEQ ID NO: 1973 - DNA, 1929 bp, Homo sapiens; identical to SEQ ID NO: 596

SEQ ID NO: 1974 - DNA, 3556 bp, Homo sapiens
gctgctctgccaataacaaaggcacagcattttccctctgtgcatctccaacatggatgcttttcagggcattttaaaattcttccttaatcagaaaactgttattggctacagcttcatggctctgctgaccgtgggaagtgagcgtctcttttctgttgtggcttttaagtgcccctgcagcactgagaatatgacctatgggctggttttcctctttgctcctgcctgggtgttactgatcctgggattctttctgaacaataggtcgtggagactcttcacaggctgctgtgtgaatcccaggaaaatctttcccagaggccacagctgccgtttcttctacgtcctcggccagatcactctgagctcattggtggctccagtgatgtggctttctgtggctctgctcaatggaactttctatgaatgtgccatgagcgggacgagaagttcaggactcctggaactgatttgcaagggtaagcccaaagagtgctgggaagaacttcacaaagtatcttgtggcaaaactagcatgctacctaccgtcaatgaagaactgaaactctcccttcaggcccagtctcagattctaggatggtgcctgatttgttcagcgtctttcttctctctgctcaccacatgttatgctcgctgccgatctaaagttagctaccttcagctgagtttttggaagacatatgcacaaaaggagaaggagcagttggaaaatacatttctggactatgccaacaagctgagcgagaggaacctgaaatgtttttttgaaaacaagaggccagatccttttcccatgcctacgtttgctgcctgggaggctgcttcagagctgcattctttccaccaaagccagcaacactatagcaccctccacagagtggtggacaatggtctgcaacttagccctgaggatgatgagacgacaatggtccttgtgggtactgcccacaatatgtagctcatccaccatcaatgactcatggtgttgagtggcatgctcattctgtgatcctcctaacgtatcaccagcaacctgtgtgtctctgtattttcttacatttggagtatgtttacaagacaataacacaaaggaaactgctttgaagctctcaagtggaacatcaggatgtgctcaaattgatgctgaggggtgacaaaggtgctcttgcattggtggagaggggctcagtaggcctaaatgttgctccaagatctaagattttatcattcaacagacagactcatgtgagagggctcatcagtctctgtaaatattggttgcagaatttaggggcagaagcaatggcttgtgagtgagcaagttactcttaacataggttgccctacacagtggctcctgcagtgtgatcagcaggagtctctgtcctacaaatctacacttttaaggatgtatgaaattgtggaattcattccctcaggatctgaagatctcagttctcaaaaatcacaagttgcaagaatatgatacctaaaattgaaagtttttcacatgttttcactgtatactgaaaatactcccctggaagcagggctgcatcataatttttgtgggctttatgtacttttgcctttgcgaaccatttcctacattcaaaatagtagtaacaaatatatatatatatatatatatatatatatatatatatatatatatatacacacacacagaaatatatatttataactgcattgataaaaggtgaatatattagcattttcttcaacctaaaagtttatgtattttcttctgattttaaaagaaattaaaaacattttagtgggcccttacaagtattatggtccttaggcacagtgcttactaggccgtgggtatgtcttagtgcgtttgggctactataacaaaatatcatagataggtggcttatacaaaatagaaatttatttctcacagttctggaggctgggaagtccgaggtcaggctgccagcatgctcaggttctggtgagagcaattttccaggttgcaaactgcttgctgacttctcagtgtccttccatggtggaaagtgcaaataagctcccttgagcatttttataaggcactaatcccattcctggaggctccaccttcatgacccaattacttctcaaggctctgcttcttagtactatcagcttgggggttaagatttcaacatatgaaattgggggagacacaaacattcagactatagtagggtaaattgaccttggctaaaggtctggggacactgtccaaagcagtactggcataaaactgcattgcagtcttacatttatcagaaataatgcaaatcttgcattctacaatgtactatatccatgttagtatgtacatatatatgtgtatgtatatatgtacataaattctccttaaatctctgagaagaattgtgctttaaaaaagaactatgttttgtgctgtggctcataccttacagtggtagtctatgtctcttagtttgagaaagctgaatattaacttcttattaacatgaaacatgatggcaaactgaatcctacaagtataggacccagaacatatctatgttattgtcatttacaagaagaaatatgtatttggtctttcttcctattcctggtgcagagctcctaaaacctttgggacctcccaagtgatgtgtctggtagtacgcgaatgagatgactgatagttaggggcttctgaatggcctcagaatagggtctggttgccacgggaaccaaccatgtgtttagagggttggaactttcagccccactcccagaccttggggaaggaagaggggctgaaggttgagtcgatcacaaatggataatgatttaatcaatcatgcctaagaataaagcttcccataaaaatctaaaggacaaggttcagagagcttctgcattgctcaatacatgaggagtggtgagcccaaaggggccgtggaagctccgtgccccttcccccaaacctgttcctgtgcctccatctggctgtttctgagttatattattttataatagactgatgatagtaaataaagccctttcctgagttctgtgagctactctagcaaatggtgaaatctgagaaggaaatcatgggaacctctgctttgtagccacgtcagatagaagatgtgagtaactttggaacctactgcttgtgactggtgtctgaagttgggggagatcttatgggactgagctcttaacctgctggggatctgcacttaatgccgattaatgccagaattgaattgtatgatatccagttggtattggagaattggccagtgtgggagaaaacccacacagttggtggcaaggagtgttcagtgttgagtgtgaatgtcaataaaaaaaggtttgttttttctacgtacaatatctttgggaacttggaggtgcagggtcagacgtctgtgtgtgtatgtggcagggacagaacagggattagggatgtgagggggtagagttttcagaataaagggagagaaaattcaaaaaaaaaaaaaaaaaa

SEQ ID NO: 1975 - DNA, 2688 bp, Homo sapiens; identical to SEQ ID NO: 620

SEQ ID NO: 1976 - DNA, 2399 bp, Homo sapiens; identical to SEQ ID NO: 582

SEQ ID NO: 1977 - DNA, 5408 bp, Homo sapiens
gttggctggagagtttgtgaaaagttgtgagccgagcaggaggaagtagggagagaggagttgggctgtgccggaggccgaggaccgagagggctcaggtgacccctggaaagcctgggtggctggaaaggagcctagcgcctgcatgaaaggaagaacctgctgggaagtacctgagctcgagctgtgggttccgccgcccttcccctgcgtggtggcttggtggccgcgtctgcgcctcagccctgagaatccggatggcggtgaggtggacttgggcaggcaagagctgcctgctgctggcgtttttaacagtggcctatatcttcgtggagctcttggtctctacttttcatgcctccgcaggagccggccgtgccagggagctggggtcaagaaggctctcagacctccagaaaaatacggaggatttgtctcgaccgctttataagaagccccctgcagattcccgtgcacttggggagtgggggaaagccagcaaactccagctcaacgaggatgaactgaagcagcaagaagaactcattgagagatacgccatcaatatttacctcagtgacaggatttccctgcatcgacacatagaggataaaagaatgtatgagtgtaagtcccagaagttcaactataggacacttcctaccacctctgttatcattgctttctataacgaagcctggtcgactttgctccgtaccattcacagtgttttagaaacttctcctgcagttcttttgaaagagatcatcttggtggatgacttgagtgacagagtttatttgaagacacaacttgaaacttacatcagcaatcttgatagagtacgcttgattaggaccaataagcgagaggggctggttagggcccgtctgattggggccactttcgccactggggacgtcctcactttcctggattgtcactgtgagtgtaattccggttggctggaaccgcttttggaaaggattgggagagatgaaacagcagttgtgtgtcctgttatagacacaattgattggaatacttttgaattctatatgcagataggggagcccatgattggtgggtttgactggcgtttaacatttcagtggcattctgtccccaaacaggaaagggacaggcggatatcaagaattgaccccatcagatcacctaccatggctggaggactgtttgctgtcagcaagaaatattttcagtaccttggaacgtatgacacaggaatggaagtgtggggaggtgaaaaccttgagctgtcttttagggtgtggcagtgtggtggcaaattggagatccacccgtgttcccacgtgggccatgtgttccccaagcgggcaccatatgctcgccccaatttcctacagaatactgctcgggcagcagaagtttggatggatgaatacaaagagcacttctacaatagaaaccctccagcaagaaaagaagcttatggtgatatttctgaaagaaaattactacgagagcggttgagatgcaagagctttgactggtatttgaaaaacgtttttcctaatttacatgttccagaggatagaccaggctggcatggggctattcgcagtagagggatctcgtctgaatgtttagattataattctcctgacaacaaccccacaggtgctaacctttcactgtttggatgccatggtcaaggaggcaatcaattctttgaatatacttcaaacaaagaaataaggtttaattctgtgacagagttatgtgcagaggtacctgagcaaaaaaattatgtgggaatgcaaaattgtcccaaagatgggttccctgtaccagcaaacattatttggcattttaaagaagatggaactatttttcacccacactcaggactgtgtcttagtgcttatcggacaccggagggccgacctgatgtacaaatgagaacttgtgatgctctagataaaaatcaaatttggagttttgagaaatagagcacaacagcactttcgtcatgagctgacagtagtgtcaagaaagtcaaagagccttaagagcctcagtgaagattgtattttattttatcaaaagccacctagcagtcatctgtggagcactggaaagctggggttcattttggtatatcacactgaaactgggtacccagagtgctgctgtttaatatttcacaatgccttacttattggttgttttatataagagttttgtcaatatggtctcttcttaaaagaagttgactatgaattgaaacacacaaaacatttaagtgccagacttaatattaaagaatgtaaaggtccaagtaaaatgaggtatgatttatgttgatgtgtaagttcaccgcacatcccactttttaacaaaactcatgaatgtgcagtttgagccattgctattttgattacatagaatttgtatttcttttttagccagcacattaaattttagattttattttttaatctaatttttttctaatcaaaaagaaaattgagcttaaggcaaaaggcctggttttagagatatgtgtaattggaagagggcatttgtttgagtgtgagtttggaggcctttttaacatgcagacatacccatatttaaatgaaatggggagatatttacattccgtactttgtaaacttgagctattggacttcactgatgtatatattaatacctcagattcctctgattttgtaagctgtcttctctgtgaacgtgtttgtgtgtgtagggcattttctgattgcacttccttaagttatgaatgtactagaaagggactcatccagaatactatgcctccctttgttaatgcttaatcatttaaagtaaacacaattgaagcctctctgaagttaaacccaactatgtttattaaaatgtgtgaaactgaaagtgggctaggttctaccaaggctgtggaactctcctacgagttctgctgatcaggaaatttaagaatttatcttaaaaatgcaaggaaaaaagactgccttggcaattgtgaatggtgctttcaatctcctagcaccgagcctggcacttaggcagctttcagtaagtgggtgaatgaatgactgaatgaatgaatgaatggctcagctgaggaatgtaactttggtcaagttattatgatgtgtttgggcttagttttctcattggtaaaatgtgggtgctggattggatcttaaagatcccttccagctctgaaatgctgattgtacagtatattcttcccagattgactcactgtgcaatctttacaatactttttatcttttcacttttgacataggtaatgttgttgagcagttgagcaatgttcagtccagttgtgaagctggagaagagaaatgggttttaaaaattaagtgaggggaggccgggtgcggtggctcacgcatgtaatcccagcactttgggaggccaaggcaggtggatcacgaggtcaggagatccagaccatcctggctaacatggtgaaacctcgtctctactaaaaatacaaaaaattagccagctgtggtggcgggcgcctgtagtcccagctactcaggaggctgaggcaggagaatggcgtgaacctgtgaggcagagcttacagtgagccgagatcgtgccactgcactccagcctgggcgacagagcaagactctgtctcaaaaaaaaaaaataataataaaataagtgagctgaactcacctgaagtggtttacttctgtgggttaagaagttctagtcagtgttcatagtcgtttcgttttgataattgttgaaccaattttgtttttaaaacctttagactctgaaagtaatattttgactaagaatgtaaatatttccaaactaaattactcgggaagtaaacgctttttttaaaagtatttttactggttttataccaatattatatgcagaaatcacaggatgaatttagaattaaatctcaattagttcactttggcctagatttatgaaaaatgcatgcctcgtaaagagtccactgtattcacgagtaaagttgcttttagtgttcacttgatgacttggagagtaggaattttgcaaaatctgaatttaaggaaattctttaggataaccatttcaaaaaataaaattgctatgcaatcttgaatattttctcttttgcctcgtaaaatgaaaatgcattcacagtttctgtaaattatttagcagccttaaagtttatcaaaaaattgtccagattccacgtgcagcatgcttggccctgcatttaatttaagaaggattaataataatgctctgaatttttcgaaagggattctcctaaacccacccacttctcttgcccaggctgctttttaaaaatatttttttattttttacttatttttaaattttctctttttatttatttttggttttcttgttagccacctgttatatgggagaacgaaaattgttatattttgaaagtacttattacattatttttattttagtatcttgatgctcctgtcaaaagggaaatgaggcttttaaaaataaagtaccttaattctttattgactttttgccctaaattgctaggtgtgacccagcaatcttttaggaagagattttacagtggtgctttatttatatcaataatccagtatagttaggctgttcattcctcataatagagtacataacagaaaagtgggactttcacattttcatatttaggcacgttccaatttaattccaaaaatactctgtaattctacatctaaaaaaaccgattccctaattcgaatttattggtaccaaagctctctttggctatagacaattaagagttgaccttttaagttaatgtatatgcttaaaaacagttttaggaaaatatttggtagacaaagagtttcaactttaaatgttcactatgtcatttagtgtccaactttacggataggttgactatctaaataggcatttttagtcattaaaaaaaatctagtcaccaggaggatccctataactcaaaataacttgtttgtaaaagaaaatttgtttacttacccattagtaagttcctgcatattcattataagatggcaaatcaaacttttctaggatgaagacagcttatttttaagttgtatagtcttagttggtttagggtctcaattttaattaataaaatacttggtttttatttgcttgtccttttgaattcctgttttaataattttaaaatgagcacaaagaacgttgaagttcagattaatctcttctgaatgatgtttttttcctctgtgatgagttgtttctgacttttttccttttgtatttgtaatgttgattaagatgtaaaataaaaagtgtgcctgattatttttgcaaaaaaaaaaaaaaaa

SEQ ID NO: 1978 - DNA, 4542 bp, Homo sapiens; identical to SEQ ID NO: 662

SEQ ID NO: 1979 - DNA, 7303 bp, Homo sapiens; identical to SEQ ID NO: 1391

SEQ ID NO: 1980 - DNA, 2978 bp, Homo sapiens
gacaataataccccacttttattcgctataatttgcaagaaagagaaaatggtggaatttttattgaaaaacaaagcaagtacacatgccgttgatagcctgagatgagaacagcccttatgcttgctgtgcactatgactcaccgggtattgtcaacatccttcttaaacaaaatattaatgtctttactcaagacgtgtggacaagatgcagaagattacgctatttctcgctgtttgacagaattcaacaacaaattttggaacataaaaagatgatacttaaaaatgaatgttggaagttctgatgaatctgcagtcagcattttccatgaactgtgtgtggattcattgcctgcattagatgacgaagtcttgagtgttgctgctaagcagtgtgtccccgagaaagtgtcagagcctttatgtggaccttcccatggaaaaggaaaacagaatagtcaatggaaaaggagaagggcctcctgcaaaacatccttccttgaagcctagcactgaaatggaagatcctgctgtgaaaggagcagtacaaagaaagaatgtacagacattgagagcagaacaagccttaccagtggcttcagaggaagagcaacaaagacgtgaaagaagtgaaaagaagcaaccacaggtcaaagaaggaaataatacatacaaaagtgaaaaaatacaactatcagaaaatatatgtcatagtacatcttctgctgctgctgacagattaacccaacaaagaaagattaggaaaacaatgcaccttacaacaagaaaatgaagaaaaaacaaatgttaatatgctgtacaaaaaaaatagagaagaattagaaaggaaagagaaacaatataacaaagaagttgaagcaaaacaacttgaaccaactgttcaatcactagagatgaaaccgaagactgcaagaaatactccaaatcaggattttcataatcatgaagaaatgaaagatctgatggatgaaaattgcattttgaagacagatattgctatactcagacaggaaatatgcataatgaaaaatgacaacctggaaaaagaaaataaatatcttaaggacattaaaattgctaaagaaacaaatgctgcccttgaaaagtgtataaaactcaatgaggaaatgataacaaaaacagcattccggtatcaacaagagcttaatgatctcaaagctgagaatacaaggctcaattctgaactgttgaaggaaaaagaaagcaagaaaaaactggaagctgaaattgaatcttatcagtctagactggctgctgctataagtaaacacagtgaaaatgtgaaaacagaaagaaacctgaaacttgctttagagagaacacaagatgtttctgaacaagtaaaaatgagttctgatatttccgaagtagaagataagaattagtttcttactgaacaactttctaaaatgcaaattaaattcaataccttaaaagataaataagttctgtaagacaagagatactctcagaaaaaagtcattggctttagaaactgtacaaaatgacctaagccaaacacagcagcaaataaaggaaatgaaagagatgtatcaaagtgcagaagctaaagtcagtaaatccactggaaagtggaactgtgtagaagagaggatatgtcaactccaacgtgaaaatccatggcttgaacagcaactagttgatgttcatcagaaagaggatcataaagagatagtaattaatatccaaagaggctttattgagagtagaaagacctcatgctagaagagaaaaataagaagctaatgaatgaatatgatcatttaaaagaaagtctctttcaatatgagagacagaaagcagaacaggtggttgtgagacaacttcaacaagaagtggctgattcccttaaaaaattaactatgttagagtctccactggaaggtacatcatgttgtcacattaatttggatgagacacaggcctcaaagaagaaatgaagaaaaaaatgaagaattaaggaaactttttaagttagtatcatcactggagtataatgtgaatcaaataagaaagaaaaatcatgaattagaagaagaggcaactggatataagaaattcctggaaatgacaataaatatgttaagtgtatttggaaatgaagacttcgattgccatggagacttaaaaacagatcaactgaaaatgaatattctgattaagaagctaaaacataagtcatgcagtttgatgatcttacagtagagaaggaagctgtatcttcaaaatgtgtcaatttggctaaagacaatcaagttcttcaacaggagttattatcgatgaaaaaagtacaacaggaatgtgaaaaacttgaggaggataaaaagatgttggaagaagaaatattaaatcttaagacacatatggaaaacaatatggtagaacttagtaaactacaagaatataaatcggagctagatgaaagggcaatgccggcagtagaaaaattagaagaaatccatttacaggttagttttttaaatcaggtaagtttatctgtaatagcagttaaggataatacggcttcactaaataagaaggaactcacacttaaagatgtggaatgtaaattctccaaaatgaaaactacttatgaagaggttacaaccaaattagaagaatataaggaagcctttgcagcagcactgaaagctaacaattccatgtcaaaaaaattaacgaaatctaataagaaaatagcaatgatcagcaccaagctccttatggagaaagagcgggtgaaatattttctcagcactcttcctacaaggcgaggcccagagtcaccttgtgttgaaaatcttactagtataggactcaacagaaaatatattccccaaatgcccgtaagaattcctacttcaaacccccagacctcaaataactgcaagaactacttgactgaggttcgt

SEQ ID NO: 1981 - DNA, 7992 bp, Homo sapiens; identical to SEQ ID NO: 653

SEQ ID NO: 1982 - DNA, 1177 bp, Homo sapiens; identical to SEQ ID NO: 1530

SEQ ID NO: 1983 - DNA, 2840 bp, Homo sapiens
tttttcctggcactgctgagccacctgcagttgcgagagccgctgggagggataagagggaagaggacgcccggtgaaggggctccagcctggcagtttctgcgtgttagcatttctagaatagagtgggtgggaactgacccaagtaaagtcccagagactcgaacactgacgcacaggaaagcctcaagtgggaggagaaatgcaaatcccctactgatgatggcgtcagcggctttctcctagggactgtgaggggcgcttctgactttggacttgagcactgcctgggacctgtgctgagagagcgctagcatgtctcagtggaatcaagtccaacagttagaaatcaagtttttggagcaggtggatcaattctatgatgacaactttcccatggaaattcggcatctgttggcccaatggattgaaaatcaagactgggaggcagcttctaacaatgaaaccatggcaacgattcttcttcaaaacttgttaatacaactggatgaacagttaggtcgtgtttccaaagagaaaaacctactcttgatacacaatctaaaaagaattaggaaggtccttcagggaaaatttcatggaaatccaatgcatgtagctgtggttatttcaaactgtttaagggaagagaggagaatattggctgcagccaacatgcctgtccaggggcctctagagaaatccttacaaagttcttcagtttcagaaagacagaggaatgtggagcacaaagtggctgccattaaaaacagtgtgcagatgacagaacaagataccaaatacttagaagatctgcaagacgaatttgactacaggtataaaacaattcagacaatggatcagagtgacaagaatagtgccatggtgaatcaggaagttttgacactgcaggaaatgcttaacagcctcgatttcaagagaaaggaggctctcagtaaaatgacccaaatcatccatgagacagacctgttaatgaacaccatgctcatagaagagctgcaagactggaagcggcggcagcaaatcgcctgcatcgggggtccactccacaatgggctcgaccagcttcagaactgctttacactattggcagaaagtcttttccaactgagaaggcaattggagaaactagaggagcaatctaccaaaatgacatatgaaggtgatcccattccaatgcaaagaactcacatgctagaaagagtcaccttcttgatctacaaccttttcaagaactcatttgtggttgagcgacagccatgtatgccaacccaccctcagaggccgttggtacttaaaaccctaattcagttcactgtaaaactaaggctactaataaaattgccagaactaaactatcaggtaaaggttaaggcatcaattgacaagaatgtttcaactctaagcaaccgaagatttgtactttgtggaactaatgtcaaagccatgtctattgaagaatcttccaatgggagtctctcagtagaatttcgacatttgcaaccaaaggaaatgaagtccagtgctggaggtaaaggaaatgagggctgtcacatggtgactgaagaacttcattccataacgtttgaaacacagatctgcctctatggcctgaccatagatttggagaccagctcattgcctgtggtgatgatttccaatgtcagtcagttacctaatgcttgggcatccatcatttggtacaacgtgtcaaccaacgattcccagaacttggttttctttaataatcctccacctgccacattgagtcaactactggaggtgatgagctggcagttttcatcgtacgttggtcgtggtcttaactcagatcaactccatatgctggcagagaagcttacagtccaatctagctacagtgatggtcacctcacctgggccaagttctgcaaggaacatttacctggtaaatcatttaccttttggacatggcttgaagcaatattggatctaattaagaaacacattcttcccctttggattgatgggtatgtcatgggctttgttagcaaagagaaggaacggctgttgctaaaggataaaatgcctggcacctttttattaagattcagtgaaagccatctcggaggaataactttcacctgggtggaccattctgaaagtggggaagtgagattccactctgtagaaccctacaataaaggccggttgtctgctctgccattcgctgacatcctgcgagactacaaagttattatggctgaaaacattcctgaaaaccctctgaagtacctatatcctgacattcccaaagacaaagccttcggtaaacactacagctctcagccttgcgaagtttcaagaccaacagaaaggggtgacaaaggttatgttccttctgtttttatccccatctcaacaatccgaagtgattcaacagagccacattctccatcagaccttcttcccatgtctccaagtgtgtatgcggtgttgagagaaaacctgagtcccacaacaattgaaactgcaatgaagtctccttattctgctgaatgacaggataaactctgacgcaccaagaaaggaagcaaatgaaaaagtttaaagactgttctttgcccaataaccacattttatttcttcagctttgtaaataccaggttctaggaaatgtttgacatctgaagctctcttcacactcccgtggcactcctcaattgggagtgttgtgactgaaatgcttgaaaccaaagcttcagataaacttgcaagataagacaactttaagaaaccagtgttaataacaatattaacagaagaaaaaaaaaaaaaaa

SEQ ID NO: 1984 - DNA, 3407 bp, Homo sapiens
gcttcccggctctgccctcttggccgaagtgcccgctgccgggcgcgggcctcagacaatacaatggtgggtgaagagaagatgtctctaagaaaccggctgtcaaagtccagggaaaatcctgaggaagatgaagaccagagaaaccctgcaaaggagtccctagagacacctagtaatggtcgaattgacataaaacagttgatagcaaagaagataaagttgacagcagaggcagaggaattgaagccattttttatgaaggaagttggcagtcactttgatgattttgtgaccaatctcattgaaaagtcagcatcattagataatggtgggtgcgctctcacaaccttttctgttcttgaaggagagaaaaacaaccatagagcgaaggatttgagagcacctccagaacaaggaaagatttttattgcaaggcgctctctcttagatgaactgcttgaagtggaccacatcagaacaatatatcacatgtttattgccctcctcattctctttatcctcagcacacttgtagtagattacattgatgaaggaaggctggtgcttgagttcagcctcctgtcttatgcttttggcaaatttcctaccgttgtttggacctggtggatcatgttcctgtctacattttcagttccctattttctgtttcaacattgggccactggctatagcaagagttctcatccgctgatccgttctctcttccatggctttcttttcatgatcttccagattggagttctaggttttggaccaacatatgttgtgttagcatatacactgccaccagcttcccggttcatcattatattcgagcagattcgttttgtaatgaaggcccactcatttgtcagagagaacgtgcctcgggtactaaattcagctaaggagaaatcaagcactgttccaatacctacagtcaaccagtatttgtacttcttatttgctcctacccttatctaccgtgacagctatcccaggaatcccactgtaagatggggttatgtcgctatgaagtttgcacaggtctttggttgctttttctatgtgtactacatctttgaaaggctttgtgcccccttgtttcggaatatcaaacaggagcccttcagcgctcgtgttctggtcctatgtgtatttaactccatcttgccaggtgtgctgattctcttccttactttttttgcctttttgcactgctggctcaatgcctttgctgagatgttacgctttggtgacaggatgttctataaggattggtggaactccacgtcatactccaactattatagaacctggaatgtggtggtccatgactggctatattactatgcttacaaggactttctctggtttttctccaagagattcaaatctgctgccatgttagctgtctttgctgtatctgctgtagtacacgaatatgccttggctgtttgcttgagctttttctatcccgtgctcttcgtgctcttcatgttctttggaatggctttcaacttcattgtcaatgatagtcggaaaaagccgatttggaatgttctgatgtggacttctcttttcttgggcaatggagtcttactctgcttttattctcaagaatggtatgcacgtcagcactgtcctctgaaaaatcccacatttttggattatgtccggccacgttcctggacttgtcgttacgtgttttagaagcttggactttgtttcctccttgtcactgaagattgggtagctccctgatttggagccagctgtttccagttgttactgaagttatctgtgttatttggaccactccaggctttacagatgactcactccattcctaggtcacttgaagccaaactgttggaagttcactggagtcttgtacacttaagcagagcagaagtttttttgtggggctgggtggggggagaagaccgactaacagctgaagtaatgacagattgttgctgggtcatatcagctttatcccttggtaattatatctgttttgtttcttgactctgtccaatcagagaataaacatcatagtttcttggccactgaattagccaaaacacttaggaagaaatcacttaaatacctctggcttagaaattttttcatgcacactgttggaatgtatgctaattgaacatgcaattggggaagaaaaaatgtagaatgatttttgctatttctagtagaaagaaaatgtctgttttccaaagataatgttatacatcctattttgtaatttttttgaaaaaagttcaatgttcagttttccttagtttttaccttgttttctctataggtcatgatttctgtgaagcaaaaagatgccttttaccatgaattcttgagtttacatcaataatattgtatattaaggggatcagaagtaggaaggaaaaaataagagatagcagaggaaaaagaaaaacatttcctcttataacttctgaagtaatttgtaaaaaagatttgtagagtcaatcatgtgtttaaattattttatcacaaacttaacatggaagatattcctttttaactttgtggtaacttctttgaagttatttagaaatatcctttggaacaattattttattgtctaataaatattgacttctcttgaattattttgcagactagtgagtctgtaacataagtattaatcacctccactcatattaaagtgatcattaagaatccagaagctggcttctgcatttgctcagttatacttttaatggtagtatgtttttaggtggaataaattaatatgtgattggtttcaaggaaatgtactctattatgtaatacttccattttataagatgcccgtttctaatacaatgtgtgtaggaattatttgtatgtatgaggtatgattgtaaagattgagcattggaaggggtatcagagaccatgtagttcaactttccactcaaagtaagatttatgaattatttaaatgatagttgttacttggaacagccacttgagaggctctcttggtattgtttggaattgttttaaagtcagtttgagtctcacaagaaggtaagtagagtttcttaatagtcacaacttaatttgaaccacaagtatccagcttaatcacgtatcttactcacgataccactggtccagatgagtttaggtaattttcaaacattaaatccaacttcaacggaaacaaatacactcaagggaagttatttttaaaaaggtactctgcatgttcccgcagtaatgttctgcacaacagtattgtaattgtaatggaatcataacctgctaactagtttgctttaatatggcttgtaattcttgacatttttcttaaaattaaaacgaatttttattttgaatttaaaaaaaaaaaaaaa

SEQ ID NO: 1985 - DNA, 699 bp, Homo sapiens; identical to SEQ ID NO: 1478

SEQ ID NO: 1986 - DNA, 3239 bp, Homo sapiens
gggaggaggcagtgggagggcggagggcgggggccttcggggtgggcgcccagggtagggcaggtggccgcggcgtggaggcagggagaatgcgactctccaaaaccctcgtcgacatggacatggccgactacagtgctgcactggacccagcctacaccaccctggaatttgagaatgtgcaggtgttgacgatgggcaatgacacgtccccatcagaaggcaccaacctcaacgcgcccaacagcctgggtgtcagcgccctgtgtgccatctgcggggaccgggccacgggcaaacactacggtgcctcgagctgtgacggctgcaagggcttcttccggaggagcgtgcggaagaaccacatgtactcctgcagatttagccggcagtgcgtggtggacaaagacaagaggaaccagtgccgctactgcaggctcaagaaatgcttccgggctggcatgaagaaggaagccgtccagaatgagcgggaccggatcagcactcgaaggtcaagctatgaggacagcagcctgccctccatcaatgcgctcctgcaggcggaggtcctgtcccgacagatcacctcccccgtctccgggatcaacggcgacattcgggcgaagaagattgccagcatcgcagatgtgtgtgagtccatgaaggagcagctgctggttctcgttgagtgggccaagtacatcccagctttctgcgagctccccctggacgaccaggtggccctgctcagagcccatgctggcgagcacctgctgctcggagccaccaagagatccatggtgttcaaggacgtgctgctcctaggcaatgactacattgtccctcggcactgcccggagctggcggagatgagccgggtgtccatacgcatccttgacgagctggtgctgcccttccaggagctgcagatcgatgacaatgagtatgcctacctcaaagccatcatcttctttgacccagatgccaaggggctgagcgatccagggaagatcaagcggctgcgttcccaggtgcaggtgagcttggaggactacatcaacgaccgccagtatgactcgcgtggccgctttggagagctgctgctgctgctgcccaccttgcagagcatcacctggcagatgatcgagcagatccagttcatcaagctcttcggcatggccaagattgacaacctgttgcaggagatgctgctgggagggtcccccagcgatgcaccccatgcccaccaccccctgcaccctcacctgatgcaggaacatatgggaaccaacgtcatcgttgccaacacaatgcccactcacctcagcaacggacagatgtgtgagtggccccgacccaggggacaggcagccacccctgagaccccacagccctcaccgccaggtggctcagggtctgagccctataagctcctgccgggagccgtcgccacaatcgtcaagcccctctctgccatcccccagccgaccatcaccaagcaggaagttatctagcaagccgctggggcttgggggctccactggctccccccagccccctaagagagcacctggtgatcacgtggtcacggcaaaggaagacgtgatgccaggaccagtcccagagcaggaatgggaaggatgaagggcccgagaacatggcctaagggccacatcccactgccacccttgacgccctgctctggataacaagactttgacttggggagacctctactgccttggacaacttttctcatgttgaagccactgccttcaccttcaccttcatccatgtccaacccccgacttcatcccaaaggacagccgcctggagatgacttgaggccttacttaaacccagctcccttcttccctagcctggtgcttctcctctcctagcccctgtcatggtgtccagacagagccctgtgaggctgggtccaattgtggcacttggggcaccttgctcctccttctgctgctgcccccacctctgctgcctccctctgctgtcaccttgctcagccatcccgtcttctccaacaccacctctccagaggccaaggaggccttggaaacgattcccccagtcattctgggaacatgttgtaagcactgactgggaccaggcaccaggcagggtctagaaggctgtggtgagggaagacgcctttctcctccaacccaacctcatcctccttcttcagggacttgggtgggtacttgggtgaggatccctgaaggccttcaacccgagaaaacaaacccaggttggcgactgcaacaggaacttggagtggagaggaaaagcatcagaaagaggcagaccatccaccaggcctttgagaaagggtagaattctggctggtagagcaggtgagatgggacattccaaagaacagcctgagccaaggcctagtggtagtaagaatctagcaagaattgaggaagaatggtgtgggagagggatgatgaagagagagagggcctgctggagagcatagggtctggaacaccaggctgaggtcctgatcagcttcaaggagtatgcagggagctgggcttccagaaaatgaacacagcagttctgcagaggacgggaggctggaagctgggaggtcaggtggggtggatgatataatgcgggtgagagtaatgaggcttggggctggagaggacaagatgggtaaaccctcacatcagagtgacatccaggaggaataagctcccagggcctgtctcaagctcttccttactcccaggcactgtcttaaggcatctgacatgcatcatctcatttaatcctcccttcctccctattaacctagagattgtttttgttttttattctcctcctccctccccgccctcacccgccccactccctcctaacctagagattgttacagaagctgaaattgcgttctaagaggtgaagtgattttttttctgaaactcacacaactaggaagtggctgagtcaggacttgaacccaggtctccctggatcagaacaggagctcttaactacagtggctgaatagcttctccaaaggctccctgtgttctcaccgtgatcaagttgaggggcttccggctcccttctacagcctcagaaaccagactcgttcttctgggaaccctgcccactcccaggaccaagattggcctgaggctgcactaaaattcacttagggtcgagcatcctgtttgctgataaatattaaggagaattca

SEQ ID NO: 1987 - DNA, 3250 bp, Homo sapiens
cggcctcaccttttcctgcccgaagcagaagattctcgcagtcctggtttctccctccagaagaccccccacccaaatcctctgtagctcctggtagtgccctgacccctgctgccaccgtccttcagagagcaacggaagagcttcccggagggcgaggaaaagagggaaagtagccagcaatgtcgaacgcaatgtataataagatgtggcatcagacccaagaagccctcggtgctttactcgataaagagcctcagaagatgattgaaccacaaagaaatcaggttttcatctttcaaacattagccaccttctacgtaaagtatgtgcagatctttagaaacctagagaatgtctacgaccagttcgtccacccccagaaacgaatactgatcaggaaagtcctggacggggtgatgggccgcatcctggagctgaagaacgagatggtggagctggaactcacggagttccattatttcgatgatatcctgcaggatctcaagctggccccccaacaattagatattcccatacccaagtattttttgaaggagaagttggaagtaataaaaggaagagagaaaattcttgctcaaatattagcggacagcggaatagatacatctgacatgaaataccctgtaaagagtatccctttcgatgaggctgttaaattaatccagattgctgagagggcacggcaaggtcgcctaagggctttattcatgaagcaaatctatctgcaagaatatagagcaaagcaatccaagatgcttggcaagaaagtgacagatacctgggctgctgcactccgcattcagaaggtttggcgacgtttccatcaacgtaaggaaactgaaaaactgagagaagaggagatgatcttcctgggtatgaatccacctcctctctttaatgaagtcagtgctacagtaatccaggctgaaaaggtggaccgcctgcggaatgaggtgcagataaagcatgaagaggactacagggaagccctggttaccatcaagaatgacctaaagttgatagaaggcgtggatatcaaggagaaccttcaagaccagatccggcattggttcatcgaatgcagaaatttaaccgggacatttcctgactaccctgacgttgaagaaggagggtcagctattattttttctgacaagaccatacaacaggttattgaggatatcatagcaaaccaagaggaagaagaaaaaaacaaaaagaagaagaagaaaaaggaaaaacaacccaagaaagccaaaaaacaaaagaaaggaacaaaggagaaaaataaggaagaagacgaaaaatggaaaatgtcaccaagtctttttcttcctgcaatgaaggaaggatgtaacgcatacaaagaaatctggatgaaaaaagatgagtcttggaatttctctcaggactatgatccagaactgatcaaagaggagaaacgaaaagaattacagtcagagatcaggatacaggttgatgagttgatgagacaggaacttaaaaacttaaagctagctgtggacagagaaagggagcgcccagtgaaagcaggaaagaaaaaggacaagaaaggaaagaaaggcaaaaagaaagagaagaaggcaaagaaggataaagatctgacagctgacaggaccatcgagtctctgtataaggaactggtggaagaaggattactgatccaggctctgaaagtcaacctctctgattacattggtgagtacagctacctggggactactcttcgccaggtgtccatagaacccatgccctccctcctggatgtcagacagctcatcacattgtacggaatctggccattaggttctgcagcagtgcatgagaaagctcctttggtgaaatcgctactgttagccgggccgtctggggtagggaagaaaatgctggtccatgccatctgcaccgaaacgggagccaacctcttcaacttgtcctcctctaacattgctgggaaataccctggcaaaaatggcctccaaatgatgctgcatgcagtcttcaaggtggctcgacagctccagccctccgtggtgtggattgaagacacagaaaaaaccttctacaaaaaagttcccaacgcagaaaagatgaatgaacctaaacgcctgaaaaaacaccttccccaaatcctgaaactcctgaaaccagatgaccggattctgattgtggggaccacacggcgtcccttcgatgctgaactccaatctttctgcaaagtttaccagaaaattattttggtgcccagaccagactatgcttccagatacgttctgtggaagcaaatcattgaacgcaatggaggagtcctcaccagtgccttgaatgtcagctgcctggcgaaggtcactgacggcttcacccaaggacatatagtcgaagtggttaaaggcgtgctcacagatcagagaatccggcggcaaattcataaacctctcactgcagttgagtttattacggcgataaccagcatgaatccagtgtacaaagaggaagaagagagctttaagaactggtatgccaaaactcctctgggtaaaaaacgtgccttggcgataacaggaggcagcacagaaaaggcaaaggacaaagggaaaaggaaataaaagaaagagaaaaaggcaaaaaagaaaaagtaatgcctttctgaagaaccatgcttgagtctctctgggatggagaggaccccaactcgccaaagaaaagattcaccattgcccgcctgaagaagccctcaggggaaggaacttagcagtgtgcaggtgagctgatgccgcaaacccgctaaccactgcatgtgctgttatgcctttcccaggctggacacctagctgggtgttcatcataactttccacagctttaatccacgccaagtttgtatataactgaaattcactcttgacaccctccacagtctttccaagttggactcttcctctcatcagtactagttgtcaaatttaaaatgtgacagttaaagaatattctagtttgacaattagtaagcaatgagtatatcatcagtacactagctttttattaatccatgtacactgtatagtatcttgcatctattttaataaattaattctttgctctagtaatagattttatataatgaaataaaggtgttgtccttgaaaaaaaaaaaaaaaaaaaaaaaaaaaaaaaaaaaaaaaaaaaaaaaaaaaaaaaaaaaaaaaa

SEQ ID NO: 1988 - DNA, 4261 bp, Homo sapiens
actcactgagccccaggcccaaggataatgatgtgttgtttcttggtagcataatttgtcacacgtacattttttcttcttcttctcttgcagaaagctctgctccctctctctctccctctctctttctctcttttctccctctcctacattttcttgctgttgctaattcatggtgatcaaatgatgtacgacaaaataaattgtaaagagtgactgcctggagttgggaaccagaaggtgttttccccctcccaaggagacagcaaacctttaaaaaggaaggacaattgatttttggggggagcttaagtgagccttgactttgcagctggttgagaacaggttggaggagggtttaaagccaggtgcaccgagtcagctcgccatgtccagatccggggacaggacctccaccttcgaccccagccacagcgacaacctgctgcacggcctcaacctgctgtggaggaagcagctgttttgcgacgtgaccctgacggcccagggccagcagttccattgccacaaggccgtgctggcctcctgctcgcagtacttccgatcgctcttctccagccacccccctctcgggggaggggtcggcggccaggacggcctgggggcccccaaggaccagcagcagccgccgcagcagcagccgtcacagcagcagcagccgccgccgcaggaggagcccgggactccttcttcctcccccgacgacaagctgctgaccagcccccgggccatcaacaacctggtgctgcagggctgctcgtccatcgggctgcgcctggtgctcgagtacctctacacggccaacgtgaccctgtccctggacacggtggaggaggtgctgtcggtcagcaagatcctgcacatcccccaggtcaccaagctctgcgtgcagttcctcaacgaccagatctcggtgcagaactacaagcaggtgtgcaagatcgccgcgctgcacggcctggaggagaccaagaagctggccaacaagtacctggtggaggatgtgctgctgctcaacttcgaggagatgcgcgccctgctggactcgctgccgccccccgtggagtcggagctggcgctcttccagatgtccgtgctgtggctggagcacgaccgcgagacccgcatgcagtatgcgcctgacctcatgaagcgcctccgcttcgccctcatcccggccccggagctggtggagcgggtccagtcagtggatttcatgcgaaccgacccggtctgccagaagctgctgctggacgccatgaactaccacctgatgcccttcaggcagcactgcaggcagagcctggccagcagaattcgctctaacaagaaaatgctgttattggttggagggctgcctcctggaccggaccggctccccagcaatttggttcagtattacgacgatgaaaagaagacatggaaaatactcacaattatgccatacaacagtgcccaccactgcgttgtggaggtggaaaacttcttgttcgtgttgggtggagaggaccagtggaatccgaatggaaaacacagtacaaattttgtcagccgatatgatcctcgatttaatagctggattcaacttccacccatgcaggaaagaagagccagtttctatgcatgtcggttggacaagcatttatacgtaattggtggaaggaatgaaactggctacttgtccagcgtggagtgctataacctagaaacgaatgaatggcgctatgtgtcctctttgccacagcctctggcggctcatgcgggagcagtgcacaatgggaaaatatacatttcagggggtgtacacaatggagaatatgtcccatggctatattgctatgacccagtaatggatgtctgggctcgaaaacaagatatgaacacaaaacgtgcaattcacactttggctgtaatgaatgatcgcttgtatgcaattggaggaaatcatttgaaaggtttctcccaccttgatgtaatgcttgtggaatgctatgacccaaaaggtgaccagtggaatatactccaaactcccattttggagggtcgaagtggccctggctgtgcagtgcttgatgacagcatttaccttgtgggaggctacagctggagtatgggggcctacaagtcatctacaatatgctattgtccagagaaaggaacctggacagaactcgaaggagatgtagcagaaccgttggcaggccctgcctgtgtgacagttattctgccctcttgtgtaccatacaacaaataacaccaggaaactctggaatgaacagtatcacattctaggaagcaatggcaggtgacatcactattataataggaacaatgcattctaatggtacaactgccaaaacccacccttggtttctgatgatttataagtaactacaaaagaaagagacctgttcttgaacagatactatgtctataactcagatcgcaccaaacttcctgtggtgacagactcttccatttcagactggttttaacttatcccagctttacaaaaactcttcatgtgaatcttaacttgcaaaaggagaaagataaaatacagaagactggccccagagagacctcagatcagtattgtgcattgtagtctacctgcatgtgatctatgttgacatttcggggatattgtgttcaagaatgattccaaatttgagccaccaaaatacactgcattacagaaattgccacttgattctgtactcttaacctttggctacttcacagactccattggcaacactgttattgaaaatcatgtaagattaaagagaggcattttcgtttctatacaacttcatttcatacaccttctgcccttacagcacctcatgggatcagaaaagagaaagatgttggctcttgtaataaatgctttctaccctataggttctaggctagacagagtcgtcatttctgtgtcctcaattttatctgaaagattaaaacaaaatatattatgtcactattcagttcatggaggtttgtgctttttcatattttgtgatatataagtagtgaacacacatgttatttacttcaaaagacaggattgacaaattcagtcaatactattttagagattctgttagatgatatgtctgacccaaatttaatccataataaaaaaaaatgggagattgttttcaggaattcagggatgaaaagaaagaataatttccattaagtagaattccagttgtctttctgtttctaaaacacagaacttacaagagccacaggagccaattatagcacctgacagaatacttctcctcttcctcaccttcgggtgcctctagacacttgacttacgatcgttattcccccaattcatcatattttgtttgttatcaccagagatgcctgaactcagttaagcgagcaattgctagttgtcttgaggagcatgaggaattcaggagcagaaggtcaggatagcatgagatagtctcaatgtggccaaccaaaaggacaaaactgacaggaatgcacattcgattttcaagccctccagagcttgaacaacaactttaggagtaaataaaagcctaaaatatattttaaccatccagagatggtgttgaatccttcaacaaatgtgtcattcaaaacagtaattagggaaatcccacagatgaaaaatgccttagtgataagctttcatggcagagcacgtcaagataaatgggtatactggaatccgatgccgtttctacagtaaagtgcaatcttcgttgtttttgtatttatttgtatgttcagatccaaaggatccgttgtaaaaatatatatatataaatatatgtatatccagtgcaatcaactgtcatttctttttccttaaaacatatgagtatatagaaagaaaagttacagtactctgtgggaaaatctcagctgacatcatgaatagaatgaggtctgcttcagaaccttttgttgtcaactgtcactgtttcttccaaaagtcacaatttgtacaagaacctttgctttccttagacttgttctgcattttattttttatttctcaccaaaataaaagcatttatgagaattataagtaaagctttctgtatttcagagagacataagttactagaaagtgaaaagtgaataaataagtcacagagaatgtaaattttgtacagtattagaatgtgtaaatgaagcttgcttggaaggggaaaactttaaataaaaactttatgtactaatt

SEQ ID NO: 1989 - DNA, 7086 bp, Homo sapiens
agcagcggcggcagcggcagcccagccgagcgttaggtgctgctctctgcgcggcgttttgcaaaggacttcaccgatctacttttgcagtcgcctcggactgtccatgtgtttacttcccccagcccgaggattcgatatctaggttcctgtgaaatgcaactgagcagccaaagtactttgagaacacggggcggcataaacaccaaaacttttttgtggaaggaaaatgcaataagcaagcttgccgttttccgatgcggtgtggagtgagtgtgtgtcgcgcgtgtccgcactggaggcatatgcttgtgtgtgtacatggggtgtgtttttcggtatgtagggagaaaatgcttgccaaccaccggaaatctcctggaatttattagaaaataatggattataaaaagaaggcaagcaaggagcggatctccccttgagttgcaacccgatttgctgctggctcagtttgttgtgattctttttgttgataggtgtctgatggtattccgataacgttccccccttttcttccccttgagcttttacagtttaaaaaaaggaaacaaaaaccaccccaaaatctccccccccgtttttttcgccccgtcgggatcgccgtttccatccatgtgcttgcgtctcccccgcgttccacttaaactattttaatccttggacccaaggaggaggctgataggggggtggataaaaaaagttcttccaaaatagtgtgcccggggagcaggatgggggatttcgcagcccccgctgctgccgcgaatggcagtagtatttgcatcaacagtagcctgaacagcagcctcggcggggccgggatcggtgtgaataatactcccaatagtactcccgctgctccgagtagcaatcacccggcagccggtggatgcggcggctccgggggccccggcggcggttcggcggccgttcccaagcacagcaccgtggtggagcggctccgccagcgcatcgagggctgccgtcggcaccacgtcaactgcgagaacaggtaccagcaggctcaggtggagcagctggagctggagcgccgggacaccgtgagcctctaccagcggaccctggagcagagggccaagaaatcgggcgccggcaccggcaaacagcagcacccgagcaaaccccagcaagatgcggaggctgcctcggcggagcagaggaaccacacgctgatcatgctacaagagactgtgaaaaggaagttggaaggagctcgatcaccacttaatggagaccagcagaatggtgcttgtgatgggaatttttctccgactagcaaacgaattcgaaaggacatttctgcggggatggaagccatcaacaatttgcccagtaacatgccactgccttcagcttctcctcttcaccaacttgacctgaaaccttctttgcccttgcagaacagtggaactcacactcctgggcttctagaagatctaagtaagaatggtaggctccctgagattaaacttcctgtcaacggttgcagtgacctggaggatagcttcaccatcttgcagagcaaagacctcaaacaagaacctctcgatgaccctacttgcatagacacatcagaaacatctctttcaaatcagaacaagctgttctcagacattaatctgaatgatcaggagtggcaagaattaatagatgaattggccaacacggttcctgaggatgacatacaggacctgttcaacgaagactttgaagagaagaaggagccagaattctcgcagccagcaactgagacccctctctcccaggagagtgcgagcgtgaagagcgacccctctcactctcccttcgcacatgtctccatgggatctccccaggcgaggccttcttcttctggtcctcccttttctactgtctccacggccactagtttaccttctgttgccagcactcccgcagctccaaaccctgcaagctcaccagcaaactgtgctgtccagtcccctcaaactccaaaccaagcccacactccaggccaagctccacctcggcctggaaatggttatctcctgaatccggcagcagtgacagtggccggttcagcgtcagggcctgtggctgtgcccagctctgacatgtctccagcagaacagctcaaacagatggctgcacagcagcaacaaagggccaaactcatgcagcagaaacagcaacagcaacagcagcagcagcagcagcagcagcagcagcagcagcagcagcagcaacagcactcaaatcagacttcaaattggtctcccttaggacctccctctagtccatatggagcagcttttactgcagaaaaaccaaatagcccaatgatgtacccccaagcctttaacaaccaaaaccctatagtgcctccaatggcaaacaacctgcagaagacaacaatgaataactacctccctcagaatcacatgaatatgatcaatcagcagccaaataacttgggtacaaactccttaaacaaacagcacaatattctgacttatggcaacactaaacccctgacccacttcaatgcagacctgagtcagaggatgacaccaccagtggccaaccccaacaaaaaccccttgatgccgtatatccagcagcagcaacagcagcagcaacagcaacagcagcagcagcagcagcagcagccgccacctccacagctccaggcccccagggcacacctgagcgaagaccagaaacgcctgcttctcatgaagcagaaaggagtgatgaatcagcccatggcttacgctgcacttccatcccacggtcaggagcagcatccagttggacttccccgaaccacaggccccatgcagtcctccgtgcccccaggctcaggtggcatggtctcaggagccagtcccgcaggccccggcttcctgggcagccagccccaagcagccatcatgaagcagatgctcattgatcagcgggcccagttgatagagcagcagaagcaacagttcctgcgggagcaaaggcagcagcagcagcagcagcagcagattttggcggaacagcagttgcagcaatcacatctaccccggcagcacctccagccacagcggaatccatacccagtgcagcaggtcaatcagtttcaaggttctccccaggatatagcagccgtaagaagccaagcagccctccagagcatgcgaacgtcacggctgatggcacagaacgcaggcatgatgggaataggaccctcccagaaccctgggacgatggccaccgcagctgcgcagtcggagatgggactggccccttatagcaccacgcctaccagccaaccaggaatgtacaatatgagcacaggcatgacccaaatgttgcagcatccaaaccaaagtggcatgagcatcacacataaccaagcccagggaccgaggcaacctgcctctgggcagggggttggaatggtgagtggctttggtcagagcatgctggtgaactcagccattacccagcaacatccacagatgaaagggccagtaggccaggccttgcctaggccccaagcccctccaaggctgcagagccttatgggaacagtccagcaaggagcacaaagctggcaacagaggagcttgcagggcatgcctgggaggactagtggagaattgggaccattcaacaatggcgccagctaccctcttcaagctgggcagccgagactgaccaagcagcacttcccacagggactgagccagtcagtcgtggatgctaacacgggcacagtgaggaccctcaacccagctgccatgggtcggcagatgatgccatcgctcccggggcagcaaggcaccagccaggcgaggccaatggtcatgtctggcctgagccagggagtcccaggcatgccagcgttcagccagcccccagcacagcagcagatacccagtggcagctttgctccaagcagccagagccaagcctatgagcggaatgcccctcaggacgtgtcatacaattacagtggcgacggagctgggggttccttccctggcctcccggacggtgcagaccttgtggactccatcatcaaaggcgggccaggggacgagtggatgcaggagcttgatgaattgtttggtaacccctaatcaagagaggccccaagatccacaactcgagtggttaaagcttaaaaagtgaaaaagaaacaggatgttgacccatccttgttttttgtttttttgacccacgtaaactgagcaaaactgcagctggctgacaatggaagatccaggtgccaatccacagccccaccaggcctcatttcacctgattttcacacagcaatcgagatgagacgccatgcagatcccggctgcgagagagggagacacccggaggagcaggtgggaagatgaagccggccagagcccctctgcccagcatgccctgtgatcgcctggcccagcaggagctgcttcagccgagagggactattacccaagagaggtatcctcagcccctcctgccccaggtcgggagacagcagctttggagacacaaaagagacagagcctcagccagggagagtgagtcccccagaagaggctgggtggttgcacaggccaggtgcacaggttggaaatgcactgaactctgggtgccgagagatgtaaggctttgagacatgctactgaatttggagggcaggcacgaagaacagtgagattgtcaaaaggagacaaccacagatcctacaggactgtctgtctcctgccccatgatgaccctcaggaattgcaaaggctctgctgtcacaaggagagcaggctgagtttggagcagggtccatccggcagtcctgggacggcttccctctgctggtgcccctggtggcagtccctccaggtggggctggagcctgctggcgcccaatacaaaacccatacatccaggtgggtcacatctacttctggcggccgcagggcagggaaacccctactggaccctgtgtgtctgccagcctggagcctttgtctccagccctgcctttattcctccttgcctccacaccagcctccccttgcttctccttacagactatccaagaagtgaagcttatgtctttagggagccttgggcagagtccacataaatgcaggaagaacttagacaatgcctgaaatgcaaaggcgacactggagtcttctttctctaacgtgtagcgttgaatgaatatctgcctggaaccaagagggctgctctgatgtttgggagtcggttttttgtgagccacatctgatatttctgatatccccaggaaggagtggcctggaggtcactggttcaggctccctttgggcgaaatcctgggagtgatgctctaaaaatccacctttcccatcatccctactcatcagaaagacaaatataaaatcccagagaggtggaggagctaaaaaagcaattgctccaccttacaaatttggatagaaaggagatgtagtttatttcatatgggcaaagtagtcctcttccaaagtcctgtacagttgttctctgcaattgacgcacatctgccctaagcgaaatctgtcagaaggaatcaacaaggctccttgcctcccctcccaatcccccttttggaggacttgtggcttcggtgtcgtcctaagtgagagtggcgtgtgcttttttcctgtcccctcctccctccgtgtcctagacgctggctgccttctgtgcactcccaggcagatcactacggaagagtcggagcctgtggggttggactggccacactcagtcctgagaaggcgagttgccatggaaagctgggggcagaggtgtttttggagaggaggcggcaggcaaacattgcctttgacttgctctccgcgtacccggggttgtagagctgctcaggaaggggcaggatgtaaggccagaggtgcctggtgggtgagaagcccaggcaggggctgggcgccctctccgaagaggtggcagcagggtgaccctgaactccccaaatggggagtgatgccactggggaaactgagtggatcaaagagatgaaaccaaaaaaaagcaaacaaacaaatgagaagacacaaaacataattaccttttcctgaaaggtacaggaaataaatatataagcaatgatgagaaactggaggtggctaatggaagtgagacagacaggggtggggggctccattatcttttaaaagcttcctccaaatgctcagtactgggaccaactaataggtagattttaatatggtggttttgttttggttttgtttttactacggtgctgatgtatatgtaatgtctaaaaaaagttatttgtacataagtttttacaatactgcagatatcactgggtctactatctgtaaaaaatatacatataaatatatatatactgtttgtttaaaatagagtatttttatttcattccttaactcatcatcacagcagtggtattgcacttcagatgacatctaattactaatttgtactgtatgacctctggcaacttgctccattttattcagatttttctagttttctgtttttactttgtacattgagcattgcttatttccttttaagaaatgtacagaacgctgaaatgtagaaatgaagtgatgttgacataccacttttaaagaaaacaaaaacaaaaataaaagattatctgaatcaatccaaagtatagtttattttaagatcctcactggagctccaatcttaattaagcagacatattattcctgggttttaattaactgcagttcttttctcaaaattttgatatcattctttaaacatttatttaatgggagagatcaatcattcccagcctttgcattcaactgcacaactgatgatactttctgaatttactgccgcactctgaaggatgtggcaaagggaagggaggaaagtcaactttgcatggaacatagtgcaatccatttgtagattcagtaccataacaattccatttccaactagttcatctggaggtagggaggctccactggaaaaataaatatttttgtcaaa

SEQ ID NO: 1990 - DNA, 5600 bp, Homo sapiens
aaaaagagaaactgttgggagaggaatcgtatctccatatttcttctttcagccccaatccaagggttgtagctggaactttccatcagttcttcctttctttttcctctctaagcctttgccttgctctgtcacagtgaagtcagccagagcagggctgttaaactctgtgaaatttgtcataagggtgtcaggtatttcttactggcttccaaagaaacatagataaagaaatctttcctgtggcttcccttggcaggctgcattcagaaggtctctcagttgaagaaagagcttggaggacaacagcacaacaggagagtaaaagatgccccagggctgaggcctccgctcaggcagccgcatctggggtcaatcatactcaccttgcccgggccatgctccagcaaaatcaagctgttttcttttgaaagttcaaactcatcaagattatgctgctcactcttatcattctgttgccagtagtttcaaaatttagttttgttagtctctcagcaccgcagcactggagctgtcctgaaggtactctcgcaggaaatgggaattctacttgtgtgggtcctgcacccttcttaattttctcccatggaaatagtatctttaggattgacacagaaggaaccaattatgagcaattggtggtggatgctggtgtctcagtgatcatggattttcattataatgagaaaagaatctattgggtggatttagaaagacaacttttgcaaagagtttttctgaatgggtcaaggcaagagagagtatgtaatatagagaaaaatgtttctggaatggcaataaattggataaatgaagaagttatttggtcaaatcaacaggaaggaatcattacagtaacagatatgaaaggaaataattcccacattcttttaagtgctttaaaatatcctgcaaatgtagcagttgatccagtagaaaggtttatattttggtcttcagaggtggctggaagcctttatagagcagatctcgatggtgtgggagtgaaggctctgttggagacatcagagaaaataacagctgtgtcattggatgtgcttgataagcggctgttttggattcagtacaacagagaaggaagcaattctcttatttgctcctgtgattatgatggaggttctgtccacattagtaaacatccaacacagcataatttgtttgcaatgtccctttttggtgaccgtatcttctattcaacatggaaaatgaagacaatttggatagccaacaaacacactggaaaggacatggttagaattaacctccattcatcatttgtaccacttggtgaactgaaagtagtgcatccacttgcacaacccaaggcagaagatgacacttgggagcctgagcagaaactttgcaaattgaggaaaggaaactgcagcagcactgtgtgtgggcaagacctccagtcacacttgtgcatgtgtgcagagggatacgccctaagtcgagaccggaagtactgtgaagatgttaatgaatgtgctttttggaatcatggctgtactcttgggtgtaaaaacacccctggatcctattactgcacgtgccctgtaggatttgttctgcttcctgatgggaaacgatgtcatcaacttgtttcctgtccacgcaatgtgtctgaatgcagccatgactgtgttctgacatcagaaggtcccttatgtttctgtcctgaaggctcagtgcttgagagagatgggaaaacatgtagcggttgttcctcacccgataatggtggatgtagccagctctgcgttcctcttagcccagtatcctgggaatgtgattgctttcctgggtatgacctacaactggatgaaaaaagctgtgcagcttcaggaccacaaccatttttgctgtttgccaattctcaagatattcgacacatgcattttgatggaacagactatggaactctgctcagccagcagatgggaatggtttatgccctagatcatgaccctgtggaaaataagatatactttgcccatacagccctgaagtggatagagagagctaatatggatggttcccagcgagaaaggcttattgaggaaggagtagatgtgccagaaggtcttgctgtggactggattggccgtagattctattggacagacagagggaaatctctgattggaaggagtgatttaaatgggaaacgttccaaaataatcactaaggagaacatctctcaaccacgaggaattgctgttcatccaatggccaagagattattctggactgatacagggattaatccacgaattgaaagttcttccctccaaggccttggccgtctggttatagccagctctgatctaatctggcccagtggaataacgattgacttcttaactgacaagttgtactggtgcgatgccaagcagtctgtgattgaaatggccaatctggatggttcaaaacgccgaagacttacccagaatgatgtaggtcacccatttgctgtagcagtgtttgaggattatgtgtggttctcagattgggctatgccatcagtaatgagagtaaacaagaggactggcaaagatagagtacgtctccaaggcagcatgctgaagccctcatcactggttgtggttcatccattggcaaaaccaggagcagatccctgcttatatcaaaacggaggctgtgaacatatttgcaaaaagaggcttggaactgcttggtgttcgtgtcgtgaaggttttatgaaagcctcagatgggaaaacgtgtctggctctggatggtcatcagctgttggcaggtggtgaagttgatctaaagaaccaagtaacaccattggacatcttgtccaagactagagtgtcagaagataacattacagaatctcaacacatgctagtggctgaaatcatggtgtcagatcaagatgactgtgctcctgtgggatgcagcatgtatgctcggtgtatttcagagggagaggatgccacatgtcagtgtttgaaaggatttgctggggatggaaaactatgttctgatatagatgaatgtgagatgggtgtcccagtgtgcccccctgcctcctccaagtgcatcaacaccgaaggtggttatgtctgccggtgctcagaaggctaccaaggagatgggattcactgtcttgatattgatgagtgccaactgggggagcacagctgtggagagaatgccagctgcacaaatacagagggaggctatacctgcatgtgtgctggacgcctgtctgaaccaggactgatttgccctgactctactccaccccctcacctcagggaagatgaccaccactattccgtaagaaatagtgactctgaatgtcccctgtcccacgatgggtactgcctccatgatggtgtgtgcatgtatattgaagcattggacaagtatgcatgcaactgtgttgttggctacatcggggagcgatgtcagtaccgagacctgaagtggtgggaactgcgccacgctggccacgggcagcagcagaaggtcatcgtggtggctgtctgcgtggtggtgcttgtcatgctgctcctcctgagcctgtggggggcccactactacaggactcagaagctgctatcgaaaaacccaaagaatccttatgaggagtcgagcagagatgtgaggagtcgcaggcctgctgacactgaggatgggatgtcctcttgccctcaaccttggtttgtggttataaaagaacaccaagacctcaagaatgggggtcaaccagtggctggtgaggatggccaggcagcagatgggtcaatgcaaccaacttcatggaggcaggagccccagttatgtggaatgggcacagagcaaggctgctggattccagtatccagtgataagggctcctgtccccaggtaatggagcgaagctttcatatgccctcctatgggacacagacccttgaagggggtgtcgagaagccccattctctcctatcagctaacccattatggcaacaaagggccctggacccaccacaccaaatggagctgactcagtgaaaactggaattaaaaggaaagtcaagaagaatgaactatgtcgatgcacagtatcttttctttcaaaagtagagcaaaactataggttttggttccacaatctctacgactaatcacctactcaatgcctggagacagatacgtagttgtgcttttgtttgctcttttaagcagtctcactgcagtcttatttccaagtaagagtactgggagaatcactaggtaacttattagaaacccaaattgggacaacagtgctttgtaaattgtgttgtcttcagcagtcaatacaaatagatttttgtttttgttgttcctgcagccccagaagaaattaggggttaaagcagacagtcacactggtttggtcagttacaaagtaatttctttgatctggacagaacatttatatcagtttcatgaaatgattggaatattacaataccgttaagatacagtgtaggcatttaactcctcattggcgtggtccatgctgatgattttgcaaaatgagttgtgatgaatcaatgaaaaatgtaatttagaaactgatttcttcagaattagatggcttattttttaaaatatttgaatgaaaacattttatttttaaaatattacacaggaggcttcggagtttcttagtcattactgtccttttcccctacagaattttccctcttggtgtgattgcacagaatttgtatgtattttcagttacaagattgtaagtaaattgcctgatttgttttcattatagacaacgatgaatttcttctaattatttaaataaaatcaccaaaaacataaacattttattgtatgcctgattaagtagttaattatagtctaaggcagtactagagttgaaccaaaatgatttgtcaagcttgctgatgtttctgtttttcgttttttttttttttccggagagaggataggatctcactctgttatccaggctggagtgtgcaatggcacaatcatagctcagtgcagcctcaaactcctgggctcaagcaatcctcctgcctcagcctcccgagtaactaggaccacaggcacaggccaccatgcctggctaaggtttttatttttattttttgtagacatggggatcacacaatgttgcccaggctggtcttgaactcctggcctcaagcaaggtcgtgctggtaattttgcaaaatgaattgtgattgactttcagcctcccaacgtattagattataggcattagccatggtgcccagccttgtaacttttaaaaaaattttttaatctacaactctgtagattaaaatttcacatggtgttctaattaaatatttttcttgcagccaagatattgttactacagataacacaacctgatatggtaactttaaattttgggggctttgaatcattcagtttatgcattaactagtccctttgtttatctttcatttctcaaccccttgtactttggtgataccagacatcagaataaaaagaaattgaagtaaaaaaaaaaaaaaaaaa

SEQ ID NO: 1991 - DNA, 1644 bp, Homo sapiens
acatccagctgcctgagaccctcctgcagccttctcaagggacagccccactctgcctcttgctcctccagggcagcaccatgcagcccctgtggctctgctgggcactctgggtgttgcccctggccagccccggggccgccctgaccggggagcagctcctgggcagcctgctgcggcagctgcagctcaaagaggtgcccaccctggacagggccgacatggaggagctggtcatccccacccacgtgagggcccagtacgtggccctgctgcagcgcagccacggggaccgctcccgcggaaagaggttcagccagagcttccgagaggtggccggcaggttcctggcgttggaggccagcacacacctgctggtgttcggcatggagcagcggctgccgcccaacagcgagctggtgcaggccgtgctgcggctcttccaggagccggtccccaaggccgcgctgcacaggcacgggcggctgtccccgcgcagcgcccgggcccgggtgaccgtcgagtggctgcgcgtccgcgacgacggctccaaccgcacctccctcatcgactccaggctggtgtccgtccacgagagcggctggaaggccttcgacgtgaccgaggccgtgaacttctggcagcagctgagccggccccggcagccgctgctgctacaggtgtcggtgcagagggagcatctgggcccgctggcgtccggcgcccacaagctggtccgctttgcctcgcagggggcgccagccgggcttggggagccccagctggagctgcacaccctggaccttggggactatggagctcagggcgactgtgaccctgaagcaccaatgaccgagggcacccgctgctgccgccaggagatgtacattgacctgcaggggatgaagtgggccgagaactgggtgctggagcccccgggcttcctggcttatgagtgtgtgggcacctgccggcagcccccggaggccctggccttcaagtggccgtttctggggcctcgacagtgcatcgcctcggagactgactcgctgcccatgatcgtcagcatcaaggagggaggcaggaccaggccccaggtggtcagcctgcccaacatgagggtgcagaagtgcagctgtgcctcggatggtgcgctcgtgccaaggaggctccagccataggcgcctagtgtagccatcgagggacttgacttgtgtgtgtttctgaagtgttcgagggtaccaggagagctggcgatgactgaactgctgatggacaaatgctctgtgctctctagtgagccctgaatttgcttcctctgacaagttacctcacctaatttttgcttctcaggaatgagaatctttggccactggagagcccttgctcagttttctctattcttattattcactgcactatattctaagcacttacatgtggagatactgtaacctgagggcagaaagcccaatgtgtcattgtttacttgtcctgtcactggatctgggctaaagtcctccaccaccactctggacctaagacctggggttaagtgtgggttgtgcatccccaatccagataataaagactttgtaaaacatgaataaaacacattttattctaaaaaaaaaaaaaaaaaaa

SEQ ID NO: 1992 - DNA, 3342 bp, Homo sapiens; identical to SEQ ID NO: 668

SEQ ID NO: 1993 - DNA, 912 bp, Homo sapiens
gtgatgctgacactgctggttcagggaccacgcttggagaaccactacactagggcaagcaggaagagagtcctccttctggaactgaagcaggcagtgtgaagacccatgtggaacaccttaacccgaagcctctctgaccatccagttggcaaagaccctcaggccatgaggactggccaaagacagtgagaggacgtgcaagggtaaattcctgagccccgcagtcttatttcctgccctgacgtccctgcataccagcccaagggttaaccgtaagctgatgcctgtatggcggccttactgatgccacgcaggaacaaagggatgaggactcgactgggatgcctgtctcacaagtcagactcgtgtagtgatttcacagctattcttccagacaaacccaaccgcgctctcaagagattatcgacagaagaagctacgaggtgggcagattcctttgatgtgcttctctctcataagtatggggtggctgcattccgtgccttcttgaagacggagttcagtgaggagaacctggaattctggttggcctgtgaggagttcaagaagaccaggtcaactgcaaaactggtctctaaggcccataggatctttgaggagtttgtggatgtgcaggctccacgggaggtaaacattgacttccagacccgagaagccacgaggaagaacctgcaggagccatccctgacttgctttgaccaagcccaaggaaaagtacacagcctcatggagaaagactcttaccccaggttcctgaggtccaaaatgtacttagatctgctgtcccaaagccagaggaggctcagttagacctcagaagggaactcctggaaatcaccggctttcccctccacttgctgccaagatcatattctaatgtgaaatgtc

SEQ ID NO: 1994 - DNA, 656 bp, Homo sapiens; identical to SEQ ID NO: 1406

SEQ ID NO: 1995 - DNA, 1685 bp, Homo sapiens
atgcgcgtccacgcctccctataagataaagcgcggccgacgggctccgagcgcggcccctgggttcgaacacggcacccgcactgcgcgtcatggtgcaggcctggtatatggacgacgccccgggcgacccgcggcaaccccaccgccccgaccccggccgcccagtgggcctggagcagctgcggcggctcggggtgctctactggaagctggatgctgacaaatatgagaatgatccagaattagaaaagatccgaagagagaggaactactcctggatggacatcataaccatatgcaaagataaactaccaaattatgaagaaaagattaagatgttctacgaggagcatttgcacttggacgatgagatccgctacatcctggatggcagtgggtacttcgatgtgagggacaaggaggaccagtggatccggatcttcatggagaagggagacatggtgacgctccccgcggggatctatcaccgcttcacggtggacgagaagaactacacgaaggccatgcggctgtttgtgggagaaccggtgtggacagcgtacaaccggcccgctgaccattttgaagcccgcgggcagtacgtgaaatttctggcacagaccgcctagcagtgctgcctgggaactaacacgtgcctcgtaaaggtccccaatgtaatgactgagcagaaaatcaatcactttctctttgcttttagaggatagccttgaggctagattatctttcctttgtaagattatttgatcagaatattttgtaatgaaaggatctagaaagcaacttggaagtgtaaagagtcaccttcattttctgtaactcaatcaagactggtgggtccatggccctgtgttagttcatgcattcagttgagtcccaaatgaaagtttcatctcccgaaatgcagttccttagatgcccatctggacgtgatgccgcgcctgccgtgtaagaaggtgcaatcctagataacacagctagccagatagaagacacttttttctccaaaatgatgccttggggtggggagtggtagggggaagagctcccaccctaaggggcacacactgagttgcttatgccacttccttgttcaaaataaagtaactgccttaatcttatactcatggcttggagttaccttatattcaggtatatgtgatattttgcctggtttgttaaaattgccccatttagattccttctataattgttcttatagataagtaatttatatatgagctgtgttagtattttttcagtgtgagatctctggattctttcacaataaagctgttgaattttaacaggagtattagtacataaattttctactcaacaattccgagataggattatgcctagtttgtcatatcacagaaaaactccaagttaacttcatgttttggaagggcaggtcgtttttaaagtatttctttttttaactggatgaaaaatcttcatgttaggattaattttcttaatcacctccacactgtacagaggaaactcaagccttaaatgtttaagtaaactctgtctcagttttaggattaaaatacccaccggtggtgtgatgatgccatataccgcagggcttgcttctgtcaagtgtgactctatctcagtaattaaaataagtgctgatctactgaaaaaaaaaa

SEQ ID NO: 1996 - DNA, 955 bp, Homo sapiens
tcgccccttctcggccgccgtagtttttttttttttttaaagaaaaaacggttacccagcaactagaaaaacaaccggaaccggcggcaccagctcggagagaaaggaggttccataggcagttcttaccaagaagatgtcgattccattctccaacacccactaccgaattccacaaggatttgggaatcttcttgaagggctgacacgcgagattctgagagagcaaccggacaatataccagcttttgcagcagcctattttgagagccttctagagaaaagagagaaaaccaactttgatccagcagaatgggggagtaaggtagaagaccgcttctataacaatcatgcattcgaggagcaagaaccacctgagaaaagtgatcctaaacaagaagagtctcagatatctgggaaggaggaagagacatcagtcaccatcttagactcttctgaggaagataaggaaaaagaagaggttgctgctgtcaaaatccaagctgccttccggggacacatagccagagaggaggcaaagaaaatgaaaacaaatagtcttcaaaatgaggaaaaagaggaaaacaagtgaggacactggttttacctccaggaaacatgaaaaataatccaaatccatcaaccttcttattaatgtcatttcttcctgaggaaggaagatttgatgttgtgaaataacattcgttactgttgtgaaaatctgtcatgagcatttgtttaataagcataccattgaaacatgccacttgaagatttctctgagatcatgagtttgtttacacttgtctcaagcctatctatagagacccttggatttagaattatagaactaaagtatctgagattacagagatctcagaggttatgtgttctaactattatcaaatgaataaatcctctctatcacatcccccaaaaaaaaaaaaaaaaaaaa

SEQ ID NO: 1997 - DNA, 2637 bp, Homo sapiens
ctgctgaaaaagcagaaagagattaccagccacagacgggtcatgagcgcggtattactgctggccctcctggggttcatcctcccactgccaggagtgcaggcgctgctctgccagtttgggacagttcagcatgtgtggaaggtgtccgacctgccccggcaatggacccctaagaacaccagctgcgacagcggcttggggtgccaggacacgttgatgctcattgagagcggaccccaagtgagcctggtgctctccaagggctgcacggaggccaaggaccaggagccccgcgtcactgagcaccggatgggccccggcctctccctgatctcctacaccttcgtgtgccgccaggaggacttctgcaacaacctcgttaactccctcccgctttgggccccacagcccccagcagatcccatgatgggagctgcagaaggcccctttgggaaggctgagcaggttgactcttgaggccagcaaaagtggggtgcagagaaggtatctgatcaaatccagtgccctctcagtgccccctcactctgtctgtcactttcctagacccaggatccttgaggtgcccagtctgcttgtctatggaaggctgtctggaggggacaacagaagagatctgccccaaggggaccacacactgttatgatggcctcctcaggctcaggggaggaggcatcttctccaatctgagagtccagggatgcatgccccagccagtttgcaacctgctcaatgggacacaggaaattgggcccgtgggtatgactgagaactgcgatatgaaagattttctgcagctcaagccagtaggattacttgaggaacacaatgtgggagagaaagagcgtggtcaaggacaacaccaatgtgttcagctagactggcagaaacgagccgccacgggtgtaagtagattttctgacctgtcatcgggggaccaccattatgacacacggaaacttggctcaagaacccactgattggaccacatcgaataccgagatgtgcgaggtggggcaggtgtgtcaggagacgctgctgctcctagatgtaggactcacatcaaccctggtggcgacctaaagctgcagcgctgttggggctcaaaattcccagaagaccaccatccactcagcccctcctggggtgcttgtggcctcctatacccacttctgctcctcggacctgtgcaatagtgccagcagcagcagcgttctgctgaactccctccctcctcaagctgcccctgtcccaggagaccggcagtgtcctacctgtgtgcagccccttggaacctgttcaagtggctccccccgaatgacctgccccaggggcgccactcattgttatgatgggtacattcatctctcaggaggtgggctgtccaccaaaatgagcattcagggctgcgtggcccaaccttccagcttcttgttgaaccacaccagacaaatcgggatcttctctgcgcgtgagaagcgtgatgtgcagcctcctgcctctcagcatgagggaggtggggctgagggcctggagtctctcacttggggggtggggctggcactggccccagcgctgtggtggggagtggtttgcccttcctgctaactctattacccccacgattcttcaccgctgctgaccacccacactcaacctccctctgacctcataacctaatggccttggacaccagattctttcccattctgtccatgaatcatcttccccacacacaatcattcatatctactcacctaacagcaacactggggagagcctggagcatccggacttgccctatgggagaggggacgctggaggagtggctgcatgtatctgataatacagaccctgtcctttctcccagtgctgggatttctccatgtgagggggcagcaggacacccagggatctagcgtgggggaggagaggagcctaatgagaaaatgaccatctaaagcctgcccttcattggtctggttcacgtctccaaaccagcttggatggtagcagagacttcagggtgctccagccaaacgtatttgggcatcaccatgacctgggaggggaagatgcactgagacgtatgaggcttccagcctagcagccagggccctagcacaaacaggaggctcgccccatctgagcaactgcaggagaggttagtacagtcatgcattgcttaacgacagggacgtgtcgttagaaatgtgtcgttaggtgattttatgaccataggaacattgtagcgtgcacttacaccaacccagatggtacagcccaatacacacccaggatggacgctagagtcgactgctcctaggctacaagcctgcagtgcatgttatggtgtgaatactgcaggcaatcttaacaccacggcaagtatttgtgcatctacacacatctaaacatagaaaaggtacagcataaatacactattgtcatctcagcagaccaccgttctatacgcaattcgtcgctgacccaaacgttgctatgtagcatctgcgtatcgtgggataattgacatgagggcttgagagaactccagaaaaaaatgggttagcattttcccagagctgttatcattgggtctctcttaccaccata

SEQ ID NO: 1998 - DNA, 2328 bp, Homo sapiens; identical to SEQ ID NO: 47

SEQ ID NO: 1999 - DNA, 920 bp, Homo sapiens; identical to SEQ ID NO: 1281

SEQ ID NO: 2000 - DNA, 1424 bp, Homo sapiens; identical to SEQ ID NO: 290

SEQ ID NO: 2001 - DNA, 2383 bp, Homo sapiens; identical to SEQ ID NO: 59

SEQ ID NO: 2002 - DNA, 6564 bp, Homo sapiens; identical to SEQ ID NO: 271

SEQ ID NO: 2003 - DNA, 10876 bp, Homo sapiens; identical to SEQ ID NO: 361

SEQ ID NO: 2004 - DNA, 3601 bp, Homo sapiens; identical to SEQ ID NO: 279

SEQ ID NO: 2005 - DNA, 7820 bp, Homo sapiens; identical to SEQ ID NO: 267

SEQ ID NO: 2006 - DNA, 3902 bp, Homo sapiens
ctttcactggcaagagacggagtcctgggtttcagttccagttgcctgcggtgggctgtgtgagtttgccaaagtcccctgccctctctgggtctcggttccctcgcctgtccacgtgaggttggaggagctgaacgccgacgtcatttttagctaagagggagcagggtccccgagtcgccggcccagggtctgcgcatccgaggccgcgcgccctttcccctcccccacggctcctccgggccccgcactctgcgccccggctgccgcccagcgccctacaccgccctcagggggccctcgcgggctccccccggccgggatgccagtgccccgcgccacgcgcgcctgctcccgcgccgcctgccctgcagcctgcccgcggcgcctttatacccagcgggctcggcgctcactaatgtttaactcggggccgaaacttgccagcggcgagtgactccaccgcccggagcagcggtgcaggacgcgcgtctccgccgcccgcggtgacttctgcctgcgctccttctctgaacgctcacttccgaggagacgccgacgatgaagagacaccgtggaaggttcttctgggactgctgggtgctgctgcgcttgtcaccatcatcaccgtgcccgtggttctgctgaacaaaggcacagatgatgctacagctgacagtcgcaaaacttacactctaactgattacttaaaaaatacttatagactgaagttatactccttaagatggatttcagatcatgaatatctctacaaacaagaaaataatatcttggtattcaatgctgaatatggaaacagctcagttttcttggagaacagtacatttgatgagtttggacattctatcaatgattattcaatatctcctgatgggcagtttattctcttagaatacaactacgtgaagcaatggaggcattcctacacagcttcatatgacatttatgatttaaataaaaggcagctgattacagaagagaggattccaaacaacacacagtgggtcacatggtcaccagtgggtcataaattggcatatgtttggaacaatgacatttatgttaaaattgaaccaaatttaccaagttacagaatcacatggacggggaaagaagatataatatataatggaataactgactgggtttatgaagaggaagtcttcagtgcctactctgctctgtggtggtctccaaacggcacttttttagcatatgcccaatttaacgacacagaagtcccacttattgaatactccttctactctgatgagtcactgcagtacccaaagactgtacgggttccatatccaaaggcaggagctgtgaatccaactgtaaagttctttgttgtaaatacagactctctcagctcagtcaccaatgcaacttccatacaaatcactgctcctgcttctatgttgataggggatcactacttgtgtgatgtgacatgggcaacacaagaaagaatttctttgcagtggctcaggaggattcagaactattcggtcatggatatttgtgactatgatgaatccagtggaagatggaactgcttagtggcacggcaacacattgaaatgagtactactggctgggttggaagatttaggccttcagaacctcattttacccttgatggtaatagcttctacaagatcatcagcaatgaagaaggttacagacacatttgctatttccaaatagataaaaaagactgcacatttattacaaaaggcacctgggaagtcatcgggatagaagctctaaccagtgattatctatactacattagtaatgaatataaaggaatgccaggaggaaggaatctttataaaatccaacttagtgactatacaaaagtgacatgcctcagttgtgagctgaatccggaaaggtgtcagtactattctgtgtcattcagtaaagaggcgaagtattatcagctgagatgttccggtcctggtctgcccctctatactctacacagcagcgtgaatgataaagggctgagagtcctggaagacaattcagctttggataaaatgctgcagaatgtccagatgccctccaaaaaactggacttcattattttgaatgaaacaaaattttggtatcagatgatcttgcctcctcattttgataaatccaagaaatatcctctactattagatgtgtatgcaggcccatgtagtcaaaaagcagacactgtcttcagactgaactgggccacttaccttgcaagcacagaaaacattatagtagctagctttgatggcagaggaagtggttaccaaggagataagatcatgcatgcaatcaacagaagactgggaacatttgaagttgaagatcaaattgaagcagccagacaattttcaaaaatgggatttgtggacaacaaacgaattgcaatttggggctggtcatatggagggtacgtaacctcaatggtcctgggatcgggaagtggcgtgttcaagtgtggaatagccgtggcgcctgtatcccggtgggagtactatgactcagtgtacacagaacgttacatgggtctcccaactccagaagacaaccttgaccattacagaaattcaacagtcatgagcagagctgaaaattttaaacaagttgagtacctccttattcatggaacagcagatgataacgttcactttcagcagtcagctcagatctccaaagccctggtcgatgttggagtggatttccaggcaatgtggtatactgatgaagaccatggaatagctagcagcacagcacaccaacatatatatacccacatgagccacttcataaaacaatgtttctctttaccttagcacctcaaaataccatgccatttaaagcttattaaaactcatttttgttttcattatctcaaaactgcactgtcaagatgatgatgatctttaaaatacacactcaaatcaagaaacttaaggttacctttgttcccaaatttcatacctatcatcttaagtagggacttctgtcttcacaacagattattaccttacagaagtttgaattatccggtcgggttttattgtttaaaatcatttctgcatcagctgctgaaacaacaaataggaattgtttttatggaggctttgcatagattccctgagcaggattttaatctttttctaactggactggttcaaatgttgttctcttctttaaagggatggcaagatgtgggcagtgatgtcactagggcagggacaggataagagggattagggagagaagatagcagggcatggctgggaacccaagtccaagcataccaacacgagcaggctactgtcagctcccctcggagaagagctgttcacagccagactggcacagttttctgagaaagactattcaaacagtctcaggaaatcaaatatgcaaagcactgacttctaagtaaaaccacagcagttgaaaagactccaaagaaatgtaagggaaactgccagcaacgcaggcccccaggtgccagttatggctataggtgctacaaaaacacagcaagggtgatgggaaagcattgtaaatgtgcttttaaaaaaaaatactgatgttcctagtgaaagaggcagcttgaaactgagatgtgaacacatcagcttgccctgttaaaagatgaaaatatttgtatcacaaatcttaacttgaaggagtccttgcatcaatttttcttatttcatttctttgagtgtcttaattaaaagaatattttaacttccttggactcattttaaaaaatggaacataaaatacaatgttatgtattattattcccattctacatactatggaatttctcccagtcatttaataaatgtgccttcattttttcagaa

SEQ ID NO: 2007 - DNA, 3933 bp, Homo sapiens; identical to SEQ ID NO: 1373

SEQ ID NO: 2008 - DNA, 4745 bp, Homo sapiens; identical to SEQ ID NO: 49

SEQ ID NO: 2009 - DNA, 4846 bp, Homo sapiens; identical to SEQ ID NO: 71

SEQ ID NO: 2010 - DNA, 3070 bp, Homo sapiens; identical to SEQ ID NO: 55

SEQ ID NO: 2011 - DNA, 6238 bp, Homo sapiens; identical to SEQ ID NO: 254

SEQ ID NO: 2012 - DNA, 10079 bp, Homo sapiens; identical to SEQ ID NO: 60

SEQ ID NO: 2013 - DNA, 9713 bp, Homo sapiens; identical to SEQ ID NO: 283

SEQ ID NO: 2014 - DNA, 4251 bp, Homo sapiens; identical to SEQ ID NO: 63

SEQ ID NO: 2015 - DNA, 3883 bp, Homo sapiens; identical to SEQ ID NO: 257

SEQ ID NO: 2016 - DNA, 3741 bp, Homo sapiens
tcaatcgccttttatctctggccctgggacctttgcctattttctgattgataggctttgttttgtctttacctccttctttctggggaaaacttcagttttatcgcacgttccccttttccatatcttcatcttccctctacccagattgtgaagatggaaagggtccaacccctggaagagaatgtgggaaatgcagccaggccaagattcgagaggaacaagctattgctggtggcctctgtaattcagggactggggctgctcctgtgcttcacctacatctgcctgcacttctctgctcttcagaaaacacaggacacatggctccattcaaggctaactgattgcacaacggctctgagcaggagagagcaaaaggtgaaccacagttgtacagcttgctggtggttggggtcacattggactatcaatatccaggagatgttgagaaaaagaggggatcctttccaacaagtcatccagcaactctgggacagaaggaaagctgtgggaagaaaagcagggtgctggtttctaggacactaaacctcatggtatcacatcggtatcctcgaattcaaagtatcaaagtacaatttaccgaatataagaaggagaaaggtttcatcctcacttcccaaaaggaggatgaaatcatgaaggtgcagaacaactcagtcatcatcaactgtgatgggttttatctcatctccctgaagggctacttctcccaggaagtcaacattagccttcattaccagaaggatgaggagcccctcttccaactgaagaaggtcaggtctgtcaactccttgatggtggcctctctgacttacaaagacaaagtctacttgaatgtgaccactgacaatacctccctggatgacttccatgtgaatggcggagaactgattcttatccatcaaaatcctggtgaattctgtgtcctttgaggggctgatggcaatatctaaaaccaggcaccagcatgaacaccaagctgggggtggacagggcatggattcttcattgcaagtgaaggagcctcccagctcagccacgtgggatgtgacaagaagcagatcctggccctcccgcccccacccctcagggatatttaaaacttattttatataccagttaatcttatttatccttatattttctaaattgcctagccgtcacaccccaagattgccttgagcctactaggcacctttgtgagaaagaaaaaatagatgcctcttcttcaagatgcattgtttctattggtcaggcaattgtcataataaacttatgtcattgaaaacggtacctgactaccatttgctggaaatttgacatgtgtgtggcattatcaaaatgaagaggagcaaggagtgaaggagtggggttatgaatctgccaaaggtggtatgaaccaacccctggaagccaaagcggcctctccaaggttaaattgattgcagtttgcatattgcctaaatttaaactttctcatttggtgggggttcaaaagaagaatcagcttgtgaaaaatcaggacttgaagagagccgtctaagaaataccacgtgctttttttctttaccattttgctttcccagcctccaaacatagttaatagaaatttcccttcaaagaactgtctggggatgtgatgctttgaaaaatctaatcagtgacttaagagagattttcttgtatacagggagagtgagataacttattgtgaagggttagctttactgtacaggatagcagggaactggacatctcagggtaaaagtcagtacggattttaatagcctggggaggaaaacacattctttgccacagacaggcaaagcaacacatgctcatcctcctgcctatgctgagatacgcactcagctccatgtcttgtacacacagaaacattgctggtttcaagaaatgaggtgatcctattatcaaattcaatctgatgtcaaatagcactaagaagttattgtgccttatgaaaaataatgatctctgtctagaaataccatagaccatatatagtctcacattgataattgaaactagaagggtctataatcagcctatgccagggcttcaatggaatagtatccccttatgtttagttgaaatgtccccttaacttgatataatgtgttatgcttatggcgctgtggacaatctgatttttcatgtcaactttccagatgatttgtaacttctctgtgccaaaccttttataaacataaatttttgagatatgtattttaaaattgtagcacatgtttccctgacattttcaatagaggatacaacatcacagaatctttctggatgattctgtgttatcaaggaattgtactgtgctacaattatctctagaatctccagaaaggtggagggctgttcgcccttacactaaatggtctcagttggatttttttttcctgttttctatttcctcttaagtacaccttcaactatattcccatccctctattttaatctgttatgaaggaaggtaaataaaaatgctaaatagaagaaattgtaggtaaggtaagaggaatcaagttctgagtggctgccaaggcactcacagaatcataatcatggctaaatatttatggagggcctactgtggaccaggcactgggctaaatacttacatttacaagaatcattctgagacagatattcaatgatatctggcttcactactcagaagattgtgtgtgtgtttgtgtgtgtgtgtgtgtgtgtatttcactttttgttattgaccatgttctgcaaaattgcagttactcagtgagtgatatccgaaaaagtaaacgtttatgactataggtaatatttaagaaaatgcatggttcatttttaagtttggaatttttatctatatttctcacagatgtgcagtgcacatgcaggcctaagtatatgttgtgtgtgttgtttgtctttgatgtcatggtcccctctcttaggtgctcactcgctttgggtgcacctggcctgctcttcccatgttggcctctgcaaccacacagggatatttctgctatgcaccagcctcactccaccttccttccatcaaaaatatgtgtgtgtgtctcagtccctgtaagtcatgtccttcacagggagaattaacccttcgatatacatggcagagttttgtgggaaaagaattgaatgaaaagtcaggagatcagaattttaaatttgacttagccactaactagccatgtaaccttgggaaagtcatttcccatttctgggtcttgcttttctttctgttaaatgagaggaatgttaaatatctaacagtttagaatcttatgcttacagtgttatctgtgaatgcacatattaaatgtctatgttcttgttgctatgagtcaaggagtgtaaccttctcctttactatgttgaatgtatttttttctggacaagcttacatcttcctcagccatctttgtgagtccttcaagagcagttatcaattgttagttagatattttctatttagagaatgcttaagggattccaatcccgatccaaatcataatttgttcttaagtatactgggcaggtcccctattttaagtcataattttgtatttagtgctttcctggctctcagagagtattaatattgatattaataatatagttaatagtaatattgctatttacatggaaacaaataaaagatctcagaattcacta

SEQ ID NO: 2017 - DNA, 2637 bp, Homo sapiens; identical to SEQ ID NO: 1997

SEQ ID NO: 2018 - DNA, 1236 bp, Homo sapiens
atgtctcccgcccggctccggccccgactgcacttctgcctggtcctgttgctgctgctggtggtgccggcggcatggggctgcgggccgggtcgggtggtgggcagccgccggcgaccgccacgcaaactcgtgccgctcgcctacaagcagttcagccccaatgtgcccgagaagaccctgggcgccagcggacgctatgaaggcaagatcgctcgcagctccgagcgcttcaaggagctcacccccaattacaatccagacatcatcttcaaggacgaggagaacacaggcgccgaccgcctcatgacccagcgctgcaaggaccgcctgaactcgctggctatctcggtgatgaaccagtggcccggtgtgaagctgcgggtgaccgagggctgggacgaggacggccaccactcagaggagtccctgcattatgagggccgcgcggtggacatcaccacatcagaccgcgaccgcaataagtatggactgctggcgcgcttggcagtggaggccggctttgactgggtgtattacgagtcaaaggcccacgtgcattgctccgtcaagtccgagcactcggccgcagccaagacgggcggctgcttccctgccggagcccaggtacgcctggagagtggggcgcgtgtggccttgtcagccgtgaggccgggagaccgtgtgctggccatgggggaggatgggagccccaccttcagcgatgtgctcattttcctggaccgcgagcctcacaggctgagagccttccaggtcatcgagactcaggaccccccacgccgcctggcactcacacccgctcacctgctctttacggctgacaatcacacggagccggcagcccgcttccgggccacatttgccagccacgtgcagcctggccagtacgtgctggtggctggggtgccaggcctgcagcctgcccgcgtggcagctgtctctacacacgtggccctcggggcctacgccccgctcacaaagcatgggacactggtggtggaggatgtggtggcatcctgcttcgcggccgtggctgaccaccacctggctcagttggccttctggcccctgagactctttcacagcttggcatggggcagctggactccgggggagggtgtgcattggtacccccagctgctctaccgcctggggcgtctcctgctagaagagggcagcttccacccactgggcatgtccggggcagggagctga

SEQ ID NO: 2019 - DNA, 2290 bp, Homo sapiens
gtggtgatgcaagtcggctctctcctccagcagttggatccctcccatctcacagtacctcacaggtctcttcccccgagcagtgcattgctggagcgaggagaagctcacgaatcagctgcaggtctctgttttgaaaaagcagagatacagaggcagaggaaaagggtggactcctatgtgacctgttcttagagcaagacaatcaccatctgaattccagaagccctgttcatggttggggatattttctcgactgcatggaatcagaaagaagcaaaaggatgggaaatgcctgcattcccctgaaaagaattgcttatttcctatgtctcttatctgcgcttttgctgactgaggggaagaaaccagcgaagccaaaatgccctgccgtgtgtacttgtaccaaagataatgctttatgtgagaatgccagatccattccacgcaccgttcctcctgatgttatctcattatcctttgtgagatctggttttactgaaatctcagaagggagttttttattcacgccatcgctgcagctcttgttattcacatcgaactcctttgatgtgatcagtgatgatgcttttattggtcttccacatctagagtatttattcatagaaaacaacaacatcaagtcaatttcaagacatactttccggggactaaagtcattaattcacttgagccttgcaaacaacaatctccagacactcccaaaagatattttcaaaggcctggattctttaacaaatgtggacctgaggggtaattcatttaattgtgactgtaaactgaaatggctagtggaatggcttggccacaccaatgcaactgttgaagacatctactgcgaaggccccccagaatacaagaagcgcaaaatcaatagtctctcctcgaaggattttgattgcatcattacagaatttgcaaagtctcaagacctgccttatcaatcattgtccatagacactttttcttatttgaatgatgagtatgtagtcatcgctcagccttttactggaaaatgcattttccttgaatgggaccatgtggaaaagaccttccggaattatgacaacattacaggcacatccactgtagtatgcaagcctatagtcattgaaactcagctctatgttattgtggcccagctgtttggtggctctcacatctataagcgagacagttttgcaaataaattcataaaaatccaggatattgaaattctcaaaatccgaaaacccaatgacattgaaacattcaagattgaaaacaactggtactttgttgttgctgacagttcaaaagctggttttactaccatttacaaatggaacggaaacggattctactcccatcaatccttacacgcgtggtacagggacactgatgtggaatatctagaaatagtcagaacacctcagacactcagaacgcctcatttaattctgtctagtagttcccagcgtcctgtaatttatcagtggaacaaagcaacacaattattcactaaccaaactgacattcctaacatggaggatgtgtacgcagtgaagcacttctcagtgaaaggggacgtgtacatttgcttgacaagattcattggtgattccaaagtcatgaaatggggaggctcctcgttccaggatattcagaggatgccatcgcgaggatccatggtgttccagcctcttcaaataaataattaccaatatgcaattcttggaagtgattactcctttactcaagtgtataactgggatgcagagaaagccaaatttgtgaaatttcaggaattaaatgttcaggcaccaagatcattcacacatgtgtccattaataagcgtaattttctttttgcttccagttttaagggaaatacacagatttacaaacatgtcatagttgacttaagcgcatgagacaccaaattctgtggctgccatcagaaattttctacagtacatgacccggatgaactcaatgcatgatgactcttcttatcacacttgcaaatgaatgcctttcaaacattgagactgctagaaccaagcactaccagtatctccatccttaactgtccagtccagtgatgtgggaagttaccttttataagacaaaatttaattgtgtaactgttctttgcagtgaagatgtgtaaataagcgtttaatggtatctgttactccaaaaagaaatattaatatgtacttttccatttatttattcatgtgtacagaaacaactgccaaataaaatgtttacattttctttcata

SEQ ID NO: 2020 - DNA, 1110 bp, Homo sapiens; identical to SEQ ID NO: 48

SEQ ID NO: 2021 - DNA, 3187 bp, Homo sapiens; identical to SEQ ID NO: 991

SEQ ID NO: 2022 - DNA, 3383 bp, Homo sapiens
gcttacagctgagaagcaggtcagtcaggttcctgggcgctctgttacacaagcaagatacagccagccccacctaattttgtttccctggcaccctcctgctcagtgcgacattgtcacacttaacccatctgttttctctaatgcacgacagattcctttcagacaggacaactgtgatatttcagttcctgattgtaaatacctcctaagcctgaagcttctgttactagccattgtgagcttcagtttcttcatctgcaaaatgggcataatacaatctattcttgccacatcaagggattgttattcctttaaaaaaaaaccaataccaaagaagcctacaatgttggccttagccaaaattctgttgatttcaacgttgttttattcacttctatcggggagccatggaaaagaaaatcaagacataaacacaacacagaacattgcagaagtttttaaaacaatggaaaataaacctatttctttggaaagtgaagcaaacttaaactcagataaagaaaatataaccacctcaaatctcaaggcgagtcattcccctcctttgaatctacccaacaacagccacggaataacagatttctccagtaactcatcagcagagcattctttgggcagtctaaaacccacatctaccatttccacaagccctcccttgatccatagctttgtttctaaagtgccttggaatgcacctatagcagatgaagatcttttgcccatctcagcacatcccaatgctacacctgctctgtcttcagaaaacttcacttggtctttggtcaatgacaccgtgaaaactcctgataacagttccattacagttagcatcctctcttcagaaccaacttctccatctgtgacccccttgatagtggaaccaagtggatggcttaccacaaacagtgatagcttcactgggtttaccccttatcaagaaaaaacaactctacagcctaccttaaaattcaccaataattcaaaactctttccaaatacgtcagatccccaaaaagaaaatagaaatacaggaatagtattcggggccattttaggtgctattctgggtgtctcattgcttactcttgtgggctacttgttgtgtggaaaaaggaaaacggattcattttcccatcggcgactttatgacgacagaaatgaaccagttctgcgattagacaatgcaccggaaccttatgatgtgagttttgggaattctagctactacaatccaactttgaatgattcagccatgccagaaagtgaagaaaatgcacgtgatggcattcctatggatgacatacctccacttcgtacttctgtatagaactaacagcaaaaaggcgttaaacagcaagtgtcatctacatcctagccttttgacaaattcatctttcaaaaggttacacaaaattactgtcacgtggattttgtcaaggagaatcataaaagcaggagaccagtagcagaaatgtagacaggatgtatcatccaaaggttttctttcttacaatttttggccatcctgaggcatttactaagtagccttaatttgtattttagtagtattttcttagtagaaaatatttgtggaatcagataaaactaaaagatttcaccattacagccctgcctcataactaaataataaaaattattccaccaaaaaattctaaaacaatgaagatgactctttactgctctgcctgaagccctagtaccataattcaagattgcattttcttaaatgaaaattgaaagggtgctttttaaagaaaatttgacttaaagctaaaaagaggacatagcccagagtttctgttattgggaaattgaggcaatagaaatgacagacctgtattctagtacgttataattttctagatcagcacacacatgatcagcccactgagttatgaagctgacaatgactgcattcaacggggccatggcaggaaagctgaccctacccaggaaagtaatagcttctttaaaagtcttcaaaggttttgggaattttaacttgtcttaatatatcttaggcttcaattatttgggtgccttaaaaactcaatgagaatcatggtaaaaaaaaaaagttaaccaaagaatatacctgtacataatttgtacagttttaagttgttagataggaactggatttcttatgtattagacattattgctcaatcataatggaatagattctgcatccctaaatgtatgaaccataaggttaaaaaagatgaatggaaatatcaaacaactttttactgagcatcagtttcataatcaataatataagaagattaatttggattctagtatgtttcagtttgtttttaattaccaccttcctttggtagaaaaaatatgttccttgatgtaggaaagtctaggttttagagattagaggatgagatcaagagttaaattcctaaagaagcactgaatatatgaagagagcaaacaaatcaagtaccaacctagaggctttatttttgaattgattcatggtgtgtgtgtgtgtgtgtgtgtgtgtgtgtgtgtgtgtgtaacacagaaacagcttcagaaaataagggatagaaagtaatgaagaaagtacttaccccatattgccataaaaatagcaaagaagactgtccctccattatcgaacaaatatgtcacctgagtagaaaacaaacagaaatattagtcatgcaaattgattataataagccagtgaatactgtttgcactcaggtactatgattttttctcaaatagaatcatattattttatagtacagaaatattatatatgaattcctttcatgggtcttgcaacaatttcacatgatttttctcatggggagaggtgaagaaacaacattagccctcttctctcctctcttgattccctttataccccaccatcatttctgattataaataattctaccattctatggaagtatttgtgggtcacagattgtcaaactacttaatgaaagttgtatgaaattagtttttcaggtgaggcattcctagttgcaattcctgttagcaaaacttctaggagtggggaagttggaaaatgcaggattcttccagtgagccagcatttcccatagctaaccctattctcttagtctttcaaaatgtagaatgggtccaataatggctataagatgtaataaatcccatcttaatttgttttaaaagtttcataaatcactgaacacttatgaaacaaagtgttttttaatcagatatcaactgaaacttcataaaggatgcatagttttataatgttattgaatcaaattttaaggcttgtattgtttgattttaataaagtataaattcaattt

SEQ ID NO: 2023 - DNA, 4037 bp, Homo sapiens
ggctcaacgcacacaacagcattccctggcagtaccaccatgccaggcgtcagtcaggaatctacagcttcccacagcagcccaggctccacagacacaacattgtcccctggcagtaccacagcatcatcccttggtccagaatctactactttccacagcagcccaggctccactgaaacaacactcttacctgacaacaccacagcctcaggcctccttgaagcatctacgcccgtccacagcagcactggatcgccacacacaacactgtcccctgccggctctacaacacgtcagggagaatctaccaccttccagagctggccaagctcaaaggacactatgcctgcacctcctactaccacatcagcctttgttgagctatctacaacctcccacggcagcccgagctcaactccaacaacccacttttctgccagctccacaaccttgggccgtagtgaggaatcgacaacagtccacagcagcccagttgcaactgcaacaacaccctcgcctgcccgctccacaacctcaggcctcgttgaagaatctacggcgtaccacagcagcccgggctcaactcaaacaatgcacttccctgaaagctccacagcttcaggtcgtagtgaagaatcaagaacttcccacagcagcacaacacacacaatatcttcacctcctagcaccacatctgcccttgttgaagaacctaccagctaccacagcagcccgggctcaactgcaacaacacacttccctgacagctccacaacctcaggccgtagtgaggaatcaacagcatcccacagcagccaagacgcaacgggaacaatagtcctacctgcccgctccacaacctcagttcttcttggagaatctacgacctcacccatcagttcaggctcaatggaaacgacagcgttacccggcagtaccacaacgccaggcctcagtgagaaatctaccactttccacagtagccccagatcaccagccacaacactctcacctgccagcacgacaagctcaggcgtcagtgaagaatccaccacctcccacagccgaccaggctcaacgcacacaacagcattccctgacagcaccaccacgccaggcctcagtcggcattctacaacttcccacagcagcccaggctcaacggatacaacactgttacctgccagcaccaccacctcaggccccagtcaggaatcaacaacttcccacagcagcccaggttcaactgacacagcactgtcccctggcagtaccacagccttatcctttggtcaagaatctacaaccttccacagcagcccaggctccactcacacaacgctcttccctgacagcaccacaagctcaggcatcgttgaagcatctacacgcgtccacagcagcactggctcaccacgcacaacactgtcccctgccagctccacaagccctggacttcagggagaatctaccgccttccagacccacccagcctcaactcacacgacgccttcacctcctagcaccgcaacagcccctgttgaagaatctacaacctaccaccgcagcccaggctcgactccaacaacacacttccctgccagctccacaacttcgggccacagtgagaaatcaacaatattccacagcagcccagatgcaagtggaacaacaccctcatctgcccactccacaacctcaggtcgtggagaatctacaacctcacgcatcagtccaggctcaactgaaataacaacgttacctggcagtaccacaacaccaggcctcagtgaggcatctaccaccttctacagcagccccagatcaccaaccacaacactctcacctgccagtatgacaagcctaggcgtcggtgaagaatccaccacctcccgtagccaaccaggttctactcactcaacagtgtcacctgccagcaccaccacgccaggcctcagtgaggaatctaccaccgtctacagcagcagcccaggctcaactgaaaccacagtgttccctcgcacccccacaacctcagttcgtggtgaagagcctacaaccttccacagccggccagcctcaactcacacaacactgttcactgaggacagcaccacctcgggcctcactgaagaatctacagccttccccggcagcccagcctccacccaaacagggttacctgccacactcacaaccgcagacctcggtgaggaatcaactacctttcccagcagctcaggctcaactggaacaacactctcacctgcccgctccaccacctctggcctcgttggagaatccacaccctcacgcctcagtccaagctcaaccgaaacaacaactttacccggcagtcccacaacaccaagcctcagtgagaaatcaaccaccttctacactagccccagatcaccagatgcaacactctcacctgcaaccacaacaagctcaggcgtcagtgaagaatccagcacatcccacagtcaaccaggctcaacgcacacaacagcattccctgacagcaccaccacgccaggcctcagccccagtcaggaatcaacaacttcccacagcagcccaggttcaactgacacagcactgtcccctggcagtaccacagccttatcctttggtcaagaatctacaaccttccacagcagcccaggctccactcacacaacactcttccctgacagcaccacaagctcaggcatcgttgaagcatctacacgcgtccacagcagcactggctcaccacgcacaacactgtcccctgccagctccacaagccctggacttcagggagaatctaccaccttccagacccacccagcctcaactcacacgacgccttcacctcctagcaccgtcgtggagaatctacaacctcacgcatcagtccaggctcaactgaaataacaacgttacctggcagtaccacaacaccaggcctcagtgaggcatctaccaccttctacagcagccccagatcaccaaccacaacactctcacctgccagtatgacaagcctaggcgtcggtgaagaatccaccacctcccgtagccaaccaggttctactcactcaacagtgtcacctgccagcaccaccacgccaggcctcagtgaggaatctaccaccgtctacagcagcagcccaggctcaactgaaaccacagtgttccctcgcagcaccacaacctcagttcgtggtgaagagcctacaaccttccacagccggccagcctcaactcacacaacactgttcactgaggacagcaccacctcgggcctcactgaagaatctacagccttccccggcagcccagcctccacccaaacagggttacctgccacactcacaaccgcagacctcggtgaggaatcaactacctttcccagcagctcaggctcaactggaacaacactctcacctgcccgctccaccacctctggcctcgttggagaatccacaccctcacgcctcagtccaagctcaaccgaaacaacaactttacccggcagtcccacaacaccaagcctcagtgagaaatcaaccaccttctacactagccccagatcaccagatgcaacactctcacctgcaaccacaacaagctcaggcgtcagtgaagaatccagcacatcccacagtcaaccaggctcaacgcacacaacagcgttccctgacagcaccaccacctcaggcctcagtcaggaacctacagcttcccacagcagccaaggctcaacagaggcaacactgtcccctggcagtaccacagcctcatcccttggtcaacaatctacaaccttccacagcagcccaggcgacactgaaaccacactcttacctgacgacaccataacctcaggcctcgtggaggcatctacacccacccacagcagcactggctcgctacacacaacactgacccctgccagctccacaagcgctggccttcaggaagaatctaccactttccagagctggccaagctcaagtgacacaacaccttcacctcccggcacc

SEQ ID NO: 2024 - DNA, 6385 bp, Homo sapiens
ccggccggtcttttgccccgggctcaatggctggattgtggaaactgcacccgccttcaggttgttgagcaactgatgggacgatctcagggaccggcgtttacgaaagaaatgtttaatttggtaaattggaggaaaaaaacatggatttttagcaattgaagagcaaattaaggtttcagatttgggatattggtgtttctgttttggagaaattattctttttctttttaatttgaagaaaaatcatcagtcttggaatacagaagagaaactagaaatatacgtattttgtttcacatttgaacagtcattcttgaggaatactccatacctgagtagacagccatgtggccatcgcagctactaattttcatgatgctcttagctccaataattcatgctttcagccgtgccccaattccaatggctgtggtccgcagagagctatcctgtgagagctatcctatagagcttcgctgtccaggaacagacgtcatcatgatagaaagtgccaactatggcaggactgatgacaaaatttgtgactctgaccctgctcagatggagaatatccgatgttatctgccagatgcctataagattatgtctcaaagatgcaataacagaacccagtgtgcagtggtggcaggtcctgatgtttttccagacccgtgtccaggaacctataaataccttgaagtgcagtatgaatgtgtcccttacagaacccagaatcaaataaacaaacaaaaaaaaaaagtggaacaaaaagtttttctttgtcctggactactaaaaggagtataccagagtgaacatttgtttgagtccgaccaccaatctggggcgtggtgcaaagaccctctgcaggcatctgacaagatttattatatgccctggactccctacagaactgataccctgactgagtattcatccaaggatgacttcattgctggaagaccaactacaacctacaagctccctcacagggtggatggcacaggatttgtagtgtatgatggagctttgttcttcaacaaagagcgcaccaggaacatagtaaagtttgatttgcggactaggataaagagtggagaggctatcatagcaaatgccaattaccatgatacctccccttaccgatggggaggcaaatctgacatagacctggcagtagatgagaatgggctatgggtaatctatgcaacagaacaaaacaatggtaaaattgtcattagtcaattgaacccttacaccctacggatcgaaggaacatgggatactgcatatgataaaaggtcagcttccaatgcctttatgatttgtggaattctgtatgtggtcaaatctgtatatgaggatgatgacaatgaggctactggaaataagattgactacatttacaacactgaccaaagcaaggatagtttggtggatgtaccctttcctaattcataccagtacattgcagctgtggattacaaccccagggacaacctactttatgtatggaataactatcacgtcgtgaaatattctttggattttggacctctggatagtagatcagggcaggcacatcatggacaagtttcatacatttctccgccaattcaccttgactctgagctagaaagaccctctgttaaagatatctctaccacaggacctcttggcatgggaagcactaccaccagtaccacccttcggaccacaactttgagcccaggaaggagtaccaccccgtcagtgtcaggaagaagaaaccggagtactagtaccccatctccagctgtcgaggtacttgatgacatgaccacacaccttccatcagcatcgtcccaaatcccagctctcgaagagagctgtgaggctgtggaagcccgagaaatcatgtggtttaagactcgtcaaggacagatagcaaagcagccatgccctgcaggaactataggtgtatcaacttatctatgccttgctcctgatggaatttgggatccccaaggtccagatctcagcaactgttcttctccttgggtcaatcatataacacagaagttgaaatctggtgaaacagctgccaacattgctagagagctggctgaacagacaagaaatcacttgaatgctggggacatcacctactctgtccgggccatggaccagctggtaggcctcctagatgtacagcttcggaacttgaccccaggtggaaaagatagtgctgcccggagtttgaacaagcttcagaaaagagagcgctcttgcagagcctatgtccaggcaatggtcgagacagttaacaacctccttcagccacaagctttgaatgcatggagagacctgactacgagtgatcagctgcgtgcggccaccatgttgcttcatactgtggaggaaagtgcttttgtgctggctgataaccttttgaagactgacattgtcagggagaatacagacaatattaaattggaagttgcaagactgagcacagaaggaaacttagaagacctaaaatttccagaaaacatgggccatggaagcactatccagctgtctgcaaataccttaaagcaaaatggccgaaatggagagatcagagtggcctttgtcctgtataacaacttgggtccttatttatccacggagaatgccagtatgaagttgggaacggaagctttgtccacaaatcattctgttattgtcaattcccctgttattacggcagcaataaacaaagagttcagtaacaaggtttatttggctgatcctgtggtatttactgttaaacatatcaagcagtcagaggaaaatttcaaccctaactgttcattttggagctactccaagcgtacaatgacaggttattggtcaacacaaggctgtcggctcctgacaacaaataagacacatactacatgctcttgtaaccacctaacaaattttgcagtactgatggcacatgtggaagttaagcacagtgatgcggtccatgacctccttctggatgtgatcacgtgggttggaattttgctgtcccttgtttgtctcctgatttgcatcttcacattttgctttttccgggggctccagagtgaccgtaacaccatccacaagaacctctgcatcagtctctttgtagcagagctgctcttcctgattgggatcaaccgaactgaccaaccaattgcctgtgctgttttcgctgccctgttacatttcttcttcttggctgccttcacctggatgttcctggagggggtgcagctttatatcatgctggtggaggtttttgagagtgaacattcacgtaggaaatacttttatctggtcggctatgggatgcctgcactcattgtggctgtgtcagctgcagtagactacaggagttatggaacagataaagtatgttggctccgacttgacacctacttcatttggagttttataggaccagcaactttgataattatgcttaatgtaatcttccttgggattgctttatataaaatgtttcatcatactgctatactgaaacctgaatcaggctgtcttgataacatcaactatgaggataacagacccttcatcaagtcatgggttataggtgcaatagctcttctctgcctattaggattgacctgggcctttggactcatgtatattaatgaaagcacagtcatcatggcctatctcttcaccattttcaattctctacagggaatgtttatatttattttccattgtgtcctacagaagaaggtacgaaaagagtatgggaaatgcctgcgaacacattgctgtagtggcaaaagtacagagagttccattggttcagggaaaacatctggttctcgaactcctggacgctactccacaggctcacagagccgaatccgtagaatgtggaatgacacggttcgaaagcagtcagagtcttcctttattactggagacataaacagttcagcgtcactcaacagagagccctacagagagacaagtatgggagtaaagctaaacattgcatatcaaataggggcttctgaacaatgccagggatacaagtgtcatggatactctaccactgaatggtaaccatggcaatagttacagcattgccagcggcgaatacctgagcaactgtgtgcaaatcatagaccgtggctataaccataacgagaccgccctagagaaaaagattctgaaggaactcacttccaactatatcccttcttacctgaacaaccatgagcgctccagtgaacagaacaggaatctgatgaacaagctggtgaataaccttggcagtggaagggaagatgatgccattgtcctggatgatgccacctcgtttaaccacgaggagagtttgggcctggaactcattcatgaggaatctgatgctcctttgctgcccccaagagtatactccaccgagaaccaccagccacaccattataccagaaggcggatcccccaagaccacagtgagagctttttccctttgctaaccaacgagcacacagaagatctccagtcaccccatagagactctctctataccagcatgccgacactggctggtgtggccgccacagagagtgttaccaccagcacccagaccgaacccccaccggccaaatgtggtgatgccgaagatgtttactacaaaagcatgccaaacctaggctccagaaaccacgtccatcagctgcatacttactaccagctaggtcgcggcagcagtgatggatttatagttcctccaaacaaagatgggacccctcccgagggaagttcaaaaggaccggctcatttggtcactagtctatagaagatgacacagaaattggaaccaacaaaactgctaacaccttgttgactgttctgagttgatataagcagtggtaataatgtgtgtactcctaaatctttatgctgtcctctaaagacaaacacaaactctcagacttttttttttttaatgggatttttaggtcagcccaggggagaaagataactgctaaaattcccctgtaccccatcctttcttgtcctttccccttcagatggagacttcattatgttaatgaacaagatatgaagaaaatggcactcattgtggccttgttgaattatgttgtgtatgttttaacatctctgatgctgtgttactaaaattacaaggacctgctttttaaaaggccagaacaattgtctgaaattagtaacaatgctgcatctagattggagtgctgcacaaacaaacataagagcaaagcaaaactgtatcacatagggtttttggtcactcacaacctgaattcaccacagctggaatagctgtggaaaacaaaataaaacaacaaaattaataatgaaatggaggggaattctagaattatatgctaaatgcatattttatgatttgctgtattaactgatgataaaactaatggcagaaaaagaagttgagcaatttctatgtaatgtacagatactagcattgcacatatagtctgctttctgttcctccagaatttgagtcctgttaatgtagtagaaaaaaaaaaaagaaattttctttttcttttgtgctggtcttgcaagtttgtctaccagtaagagagcaaagtttccttcctttcttctctttcttcattttctttttttcttttttgccttttattcctttaaaatttcgcctggcaaaaaataaataaatggaactatcactttataagaatcattttctagtaatgcaaacaaattattttttacaaaaaaacaaaataaataaaattagacttccttccctcactatatatctttatgcagtcagaatatttccaacagtgttttttgcaaattagagcaggacaaacttttatgtttacagggcacgtctgttgtaatgcaaagcatatttggcaagcagttcatcaccaggacactagctatgattctagaagtcaaaaggtgtctatagaactagtggggcttctgcatgtgaaaaacggttttccataggcattaaagtgctgaatgctcagtctgatcaacaagtgggcacctgcactaccactttttagaggaaattcactccctcgtaagcattggaaggtcaaattattttgaagtgatttttttaaaaaaaagtcttctgtttattaacaggaaaatttatttatttgacaggattttgagtaatgtaggaatacaaaaggtaaattagcagcacatataatttttttttaatttatgatccattttgtatggtctcaaagttggatgacctcattactaatatttgttgtaaaagtgaaacttgtttgccaaccaataaacaactgattgagatttagaagatattgta

SEQ ID NO: 2025 - DNA, 43882 bp, Homo sapiens
aagcgttgcacaattcccccaacctccatacatacggcagctcttctagacacaggttttcccaggtcaaatgcggggaccccagccatatctcccaccctgagaaattttggagtttcagggagctcagaagctctgcagaggccaccctctctgaggggattcttcttagacctccatccagaggcaaatgttgacctgtccatgctgaaaccctcaggccttcctgggtcatcttctcccacccgctccttgatgacagggagcaggagcactaaagccacaccagaaatggattcaggactgacaggagccaccttgtcacctaagacatctacaggtgcaatcgtggtgacagaacatactctgccctttacttccccagataagaccttggccagtcctacatcttcggttgtgggaagaaccacccagtctttgggggtgatgtcctctgctctccctgagtcaacctctagaggaatgacacactccgagcaaagaaccagcccatcgctgagtccccaggtcaatggaactccctctaggaactaccctgctacaagcatggtttcaggattgagttccccaaggaccaggaccagttccacagaaggaaattttaccaaagaagcatctacatacacactcactgtagagaccacaagtggcccagtcactgagaagtacacagtccccactgagacctcaacaactgaaggtgacagcacagagaccccctgggacacaagatatattcctgtaaaaatcacatctccaatgaaaacatttgcagattcaactgcatccaaggaaaatgccccagtgtctatgactccagctgagaccacagttactgactcacatactccaggaaggacaaacccatcatttgggacactttattcttccttccttgacctatcacctaaagggaccccaaattccagaggtgaaacaagcctggaactgattctatcaaccactggatatcccttctcctctcctgaacctggctctgcaggacacagcagaataagtaccagtgcgcctttgtcatcatctgcttcagttctcgataataaaatatcagagaccagcatattctcaggccagagtctcacctcccctctgtctcctggggtgcccgaggccagagccagcacaatgcccaactcagctatccctttttccatgacactaagcaatgcagaaacaagtgccgaaagggtcagaagcacaatttcctctctggggactccatcaatatccacaaagcagacagcagagactatccttaccttccatgccttcgctgagaccatggatatacccagcacccacatagccaagactttggcttcagaatggttgggaagtccaggtacccttggtggcaccagcacttcagcgctgacaaccacatctccatctaccactttagtctcagaggagaccaacacccatcactccacgagtggaaaggaaacagaaggaactttgaatacatctatgactccacttgagacctctgctcctggagaagagtccgaaatgactgccaccttggtccccactctaggttttacaactcttgacagcaagatcagaagtccatctcaggtctcttcatcccacccaacaagagagctcagaaccacaggcagcacctctgggaggcagagttccagcacagctgcccacgggagctctgacatcctgagggcaaccacttccagcacctcaaaagcatcatcatggaccagtgaaagcacagctcagcaatttagtgaaccccagcacacacagtgggtggagacaagtcctagcatgaaaacagagagacccccagcatcaaccagtgtggcagcccctatcaccacttctgttccctcagtggtctctggcttcaccaccctgaagaccagctccacaaaagggatttggcttgaagaaacatctgcagacacactcatcggagaatccacagctggcccaaccacccatcagtttgctgttcccactgggatttcaatgacaggaggcagcagcaccaggggaagccagggcacaacccacctactcaccagagccacagcatcatctgagacatccgcagatttgactctggccacgaacggtgtcccagtctccgtgtctccagcagtgagcaagacggctgctggctcaagtcctccaggagggacaaagccatcatatacaatggtttcttctgtcatccctgagacatcatctctacagtcctcagctttcagggaaggaaccagcctgggactgactccattaaacactagacatcccttctcttcccctgaaccagactctgcaggacacaccaagataagcaccagcattcctctgttgtcatctgcttcagttcttgaggataaagtgtcagcgaccagcacattctcacaccacaaagccacctcatctattaccacagggactcctgaaatctcaacaaagacaaagcccagctcagccgttctttcctccatgaccctaagcaatgcagcaacaagtcctgaaagagtcagaaatgcaacttcccctctgactcatccatctccatcaggggaagagacagcagggagtgtcctcactctcagcacctctgctgagactacagactcacctaacatccacccaactgggacactgacttcagaatcgtcagagagtcctagcactctcagcctcccaagtgtctctggagtcaaaaccacattttcttcatctactccttccactcatctatttactagtggagaagaaacagaggaaacttcgaatccatctgtgtctcaacctgagacttctgtttccagagtaaggaccaccttggccagcacctctgtccctaccccagtattccccaccatggacacctggcctacacgttcagctcagttctcttcatcccacctagtgagtgagctcagagctacgagcagtacctcagttacaaactcaactggttcagctcttcctaaaatatctcacctcactgggacggcaacaatgtcacagaccaatagagacacgtttaatgactctgctgcaccccaaagcacaacttggccagagactagtcccagattcaagacagggttaccttcagcaacaaccactgtttcaacctctgccacttctctctctgctactgtaatggtctctaaattcacttctccagcaactagttccatggaagcaacttctatcagggaaccatcaacaaccatcctcacaacagagaccacgaatggcccaggctctatggctgtggcttctaccaacatcccaattggaaagggctacattactgaaggaagattggacacaagccatctgcccattggaaccacagcttcctctgagacatctatggattttaccatggccaaagaaagtgtctcaatgtcagtatctccatctcagtccatggatgctgctggctcaagcactccaggaaggacaagccaattcgttgacacattttctgatgatgtctatcatttaacatccagagaaattacaatacctagagatggaacaagctcagctctgactccacaaatgactgcaactcaccctccatctcctgatcctggctctgctagaagcacctggcttggcatcttgtcctcatctccttcttctcctactcccaaagtcacaatgagctccacattttcaactcagagagtcaccacaagcatgataatggacacagttgaaactagtcggtggaacatgcccaacttaccttccacgacttccttgacaccaagtaatattccaacaagtggtgccataggaaaaagcaccctggttcccttggacactccatctccagccacatcattggaggcatcagaagggggacttccaaccctcagcacctaccctgaatcaacaaacacacccagcatccacctcggagcacacgctagttcagaaagtccaagcaccatcaaacttaccatggcttcagtagtaaaacctggctcttacacacctctcaccttcccctcaatagagacccacattcatgtatcaacagccagaatggcttactcttctgggtcttcacctgagatgacagctcctggagagactaacactggtagtacctgggaccccaccacctacatcaccactacggatcctaaggatacaagttcagctcaggtctctacaccccactcagtgaggacactcagaaccacagaaaaccatccaaagacagagtccgccaccccagctgcttactctggaagtcctaaaatctcaagttcacccaatctcaccagtccggccacaaaagcatggaccatcacagacacaactgaacactccactcaattacattacacaaaattggcagaaaaatcatctggatttgagacacagtcagctccaggacctgtctctgtagtaatccctacctcccctaccattggaagcagcacattggaactaacttctgatgtcccaggggaacccctggtccttgctcccagtgagcagaccacaatcactctccccatggcaacatggctgagtaccagtttgacagaggaaatggcttcaacagaccttgatatttcaagtccaagttcacccatgagtacatttgctatttttccacctatgtccacaccttctcatgaactttcaaagtcagaggcagataccagtgccattagaaatacagattcaacaacgttggatcagcacctaggaatcaggagtttgggcagaactggggacttaacaactgttcctatcaccccactgacaaccacgtggaccagtgtgattgaacactcaacacaagcacaggacaccctttctgcaacgatgagtcctactcacgtgacacagtcactcaaagatcaaacatctataccagcctcagcatccccttcccatcttactgaagtctaccctgagctcgggacacaagggagaagctcctctgaggcaaccactttttggaaaccatctacagacacactgtccagagagattgagactggcccaacaaacattcaatccactccacccatggacaacacaacaacagggagcagtagtagtggagtcaccctgggcatagcccaccttcccataggaacatcctccccagctgagacatccacaaacatggcactggaaagaagaagttctacagccactgtctctatggctgggacaatgggactccttgttactagtgctccaggaagaagcatcagccagtcattaggaagagtttcctctgtcctttctgagtcaactactgaaggagtcacagattctagtaagggaagcagcccaaggctgaacacacagggaaatacagctctctcctcctctcttgaacccagctatgctgaaggaagccagatgagcacaagcatccctctaacctcatctcctacaactcctgatgtggaattcatagggggcagcacattttggaccaaggaggtcaccacagttatgacctcagacatctccaagtcttcagcaaggacagagtccagctcagctacccttatgtccacagctttgggaagcactgaaaatacaggaaaagaaaaactcagaactgcctctatggatcttccatctccaactccatcaatggaggtgacaccatggatttctctcactctcagtaatgcccccaataccacagattcacttgacctcagccatggggtgcacaccagctctgcagggactttggccactgacaggtcattgaatactggtgtcactagagcctccagattggaaaacggctctgatacctcttctaagtccctgtctatgggaaacagcactcacacttccatgacttacacagagaagagtgaagtgtcttcttcaatccatccccgacctgagacctcagctcctggagcagagaccactttgacttccactcctggaaacagggccataagcttaacattgcctttttcatccattccagtggaagaagtcatttctacaggcataacctcaggaccagacatcaactcagcacccatgacacattctcccatcaccccaccaacaattgtatggaccagtacaggcacaattgaacagtccactcaaccactacatgcagtttcttcagaaaaagtttctgtgcagacacagtcaactccatatgtcaactctgtggcagtgtctgcttcccctacccatgagaattcagtctcttctggaagcagcacatcctctccatattcctcagcctcacttgaatccttggattccacaatcagtaggaggaatgcaatcacttcctggctatgggacctcactacatctctccccactacaacttggccaagtactagtttatctgaggcactgtcctcaggccattctggggtttcaaacccaagttcaactacgactgaatttccactcttttcagctgcatccacatctgctgctaagcaaagaaatccagaaacagagacccatggtccccagaatacagccgcgagtactttgaacactgatgcatcctcggtcacaggtctttctgagactcctgtgggggcaagtatcagctctgaagtccctcttccaatggccataacttctagatcagatgtttctggccttacatctgagagtactgctaacccgagtttaggcacagcctcttcagcagggaccaaattaactaggacaatatccctgcccacttcagagtctttggtttcctttagaatgaacaaggatccatggacagtgtcaatccctttggggtcccatccaactactaatacagaaacaagcatcccagtaaacagcgcaggtccacctggcttgtccacagtagcatcagatgtaattgacacaccttcagatggggctgagagtattcccactgtctccttttccccctcccctgatactgaagtgacaactatctcacatttcccagaaaagacaactcattcatttagaaccatttcatctctcactcatgagttgacttcaagagtgacacctattcctggggattggatgagttcagctatgtctacaaagcccacaggagccagtccctccattacactgggagagagaaggacaatcacctctgctgctccaaccacttcccccatagttctcactgctagtttcacagagaccagcacagtttcactggataatgaaactacagtaaaaacctcagatatccttgacgcacggaaaacaaatgagctcccctcagatagcagttcttcttctgatctgatcaacacctccatagcttcttcaactatggatgtcactaaaacagcctccatcagtcccactagcatctcaggaatgacagcaagttcctccccatctctcttctcttcagatagaccccaggttcccacatctacaacagagacaaatacagccacctctccatctgtttccagtaacacctattctcttgatgggggctccaatgtgggtggcactccatccactttaccaccctttacaatcacccaccctgtcgagacaagctcggccctattagcctggtctagaccagtaagaactttcagcaccatggtcagcactgacactgcctccggagaaaatcctacctctagcaattctgtggtgacttctgttccagcaccaggtacatggaccagtgtaggcagtactactgacttacctgccatgggctttctcaagacaagtcctgcaggagaggcacactcacttctagcatcaactattgaaccagccactgccttcactccccatctctcagcagcagtggtcactggatccagtgctacatcagaagccagtcttctcactacgagtgaaagcaaagccattcattcttcaccacagaccccaactacacccacctctggagcaaactgggaaacttcagctactcctgagagccttttggtagtcactgagacttcagacacaacacttacctcaaagattttggtcacagataccatcttgttttcaactgtgtccacgccaccttctaaatttccaagtacggggactctgtctggagcttccttccctactttactcccggacactccagccatccctctcactgccactgagccaacaagttcattagctacatcctttgattccaccccactggtgactatagcttcggatagtcttggcacagtcccagagactaccctgaccatgtcagagacctcaaatggtgatgcactggttcttaagacagtaagtaacccagataggagcatccctggaatcactatccaaggagtaacagaaagtccactccatccttcttccacttccccctctaagattgttgctccacggaatacaacctatgaaggttcgatcacagtggcactttctactttgcctgcgggaactactggttcccttgtattcagtcagagttctgaaaactcagagacaacggctttggtagactcatcagctgggcttgagagggcatctgtgatgccactaaccacaggaagccagggtatggctagctctggaggaatcagaagtgggtccactcactcaactggaaccaaaacattttcttctctccctctgaccatgaacccaggtgaggttacagccatgtctgaaatcaccacgaacagactgacagctactcaatcaacagcacccaaagggatacctgtgaagcccaccagtgctgagtcaggcctcctaacacctgtctctgcctcctcaagcccatcaaaggcctttgcctcactgactacagctcccccaacttgggggatcccacagtctaccttgacatttgagttttctgaggtcccaagtttggatactaagtccgcttctttaccaactcctggacagtccctgaacaccattccagactcagatgcaagcacagcatcttcctcactgtccaagtctccagaaaaaaacccaagggcaaggatgatgacttccacaaaggccataagtgcaagctcatttcaatcaacaggttttactgaaacccctgagggatctgcctccccttctatggcagggcatgaacccagagtccccacttcaggaacaggggaccctagatatgcctcagagagcatgtcttatccagacccaagcaaggcatcatcagctatgacatcgacctctcttgcatcaaaactcacaactctcttcagcacaggtcaagcagcaaggtctggttctagttcctctcccataagcctatccactgagaaagaaacaagcttcctttcccccactgcatccacctccagaaagacttcactatttcttgggccttccatggcaaggcagcccaacatattggtgcatcttcagacttcagctctgacactttctccaacatccactctaaatatgtcccaggaggagcctcctgagttaacctcaagccagaccattgcagaagaagagggaacaacagctgaaacacagacgttaaccttcacaccatctgagaccccaacatccttgttacctgtctcttctcccacagaacccacagccagaagaaagagttctccagaaacatgggcaagctctatttcagttcctgccaagacctccttggttgaaacaactgatggaacgctagtgaccaccataaagatgtcaagccaggcagcacaaggaaattccacgtggcctgccccagcagaggagacggggagcagtccagcaggcacatccccaggaagcccagaaatgtctaccactctcaaaatcatgagctccaaggaacccagcatcagcccagagatcaggtccactgtgagaaattctccttggaagactccagaaacaactgttcccatggagaccacagtggaaccagtcacccttcagtccacagccctaggaagtggcagcaccagcatctctcacctgcccacaggaaccacatcaccaaccaagtcaccaacagaaaatatgttggctacagaaagggtctccctctccccatccccacctgaggcttggaccaacctttattctggaactccaggagggaccaggcagtcactggccacaatgtcctctgtctccctagagtcaccaactgctagaagcatcacagggactggtcagcaaagcagtccagaactggtttcaaagacaactggaatggaattctctatgtggcatggctctactggagggaccacaggggacacacatgtctctctgagcacatcttccaatatccttgaagaccctgtaaccagcccaaactctgtgagctcattgacagataaatccaaacataaaaccgagacatgggtaagcaccacagccattccctccactgtcctgaataataagataatggcagctgaacaacagacaagtcgatctgtggatgaggcttattcatcaactagttcttggtcagatcagacatctgggagtgacatcacccttggtgcatctcctgatgtcacaaacacattatacatcacctccacagcacaaaccacctcactagtgtctctgccctctggagaccaaggcattacaagcctcaccaatccctcaggaggaaaaacaagctctgcgtcatctgtcacatctccttcaatagggcttgagactctgagggccaatgtaagtgcagtgaaaagtgacattgcccctactgctgggcatctatctcagacttcatctcctgcggaagtgagcatcctggacgtaaccacagctcctactccaggtatctccaccaccatcaccaccatgggaaccaactcaatctcaactaccacacccaacccagaagtgggtatgagtaccatggacagcaccccggccacagagaggcgcacaacttctacagaacacccttccacctggtcttccacagctgcatcagattcctggactgtcacagacatgacttcaaacttgaaagttgcaagatctcctggaacaatttccacaatgcatacaacttcattcttagcctcaagcactgaattagactccatgtctactccccatggccgtataactgtcattggaaccagcctggtcactccatcctctgatgcttcagctgtaaagacagagaccagtacaagtgaaagaacattgagtccttcagacacaactgcatctactcccatctcaactttttctcgtgtccagaggatgagcatctcagttcctgacattttaagtacaagttggactcccagtagtacagaagcagaagatgtgcctgtttcaatggtttctacagatcatgctagtacaaagactgacccaaatacgcccctgtccacttttctgtttgattctctgtccactcttgactgggacactgggagatctctgtcatcagccacagccactacctcagctcctcagggggccacaactccccaggaactcactttggaaaccatgatcagcccagctacctcacagttgcccttctctatagggcacattacaagtgcagtcacaccagctgcaatggcaaggagctctggagttactttttcaagaccagatcccacaagcaaaaaggcagagcagacttccactcagcttcccaccaccacttctgcacatccagggcaggtgcccagatcagcagcaacaactctggatgtgatcccacacacagcaaaaactccagatgcaacttttcagagacaagggcagacagctcttacaacagaggcaagagctacatctgactcctggaatgagaaagaaaaatcaaccccaagtgcaccttggatcactgagatgatgaattctgtctcagaagataccatcaaggaggttaccagctcctccagtgtattaaggaccctgaatacgctggacataaacttggaatctgggacgacttcatccccaagttggaaaagcagcccatatgagagaattgccccttctgagtccaccacagacaaagaggcaattcacccttctacaaacacagtagagaccacaggctgggtcacaagttccgaacatgcttctcattccactatcccagcccactcagcgtcatccaaactcacatctccagtggttacaacctccaccagggaacaagcaatagtttctatgtcaacaaccacatggccagagtctacaagggctagaacagagcctaattccttcttgactattgaactgagggacgtcagcccttacatggacaccagctcaaccacacaaacaagtattatctcttccccaggttccactgcgatcaccaaggggcctagaacagaaattacctcctctaagagaatatccagctcattccttgcccagtctatgaggtcgtcagacagcccctcagaagccatcaccaggctgtctaactttcctgccatgacagaatctggaggaatgatccttgctatgcaaacaagtccacctggcgctacatcactaagtgcacctactttggatacatcagccacagcctcctggacagggactccactggctacgactcagagatttacatactcagagaagaccactctctttagcaaaggtcctgaggatacatcacagccaagccctccctctgtggaagaaaccagctcttcctcttccctggtacctatccatgctacaacctcgccttccaatattttgttgacatcacaagggcacagtccctcctctactccacctgtgacctcagttttcttgtctgagacctctggcctggggaagaccacagacatgtcgaggataagcttggaacctggcacaagtttacctcccaatttgagcagtacagcaggtgaggcgttatccacttatgaagcctccagagatacaaaggcaattcatcattctgcagacacagcagtgacgaatatggaggcaaccagttctgaatattctcctatcccaggccatacaaagccatccaaagccacatctccattggttacctcccacatcatgggggacatcacttcttccacatcagtatttggctcctccgagaccacagagattgagacagtgtcctctgtgaaccagggacttcaggagagaagcacatcccaggtggccagctctgctacagagacaagcactgtcattacccatgtgtctagtggtgatgctactactcatgtcaccaagacacaagccactttctctagcggaacatccatctcaagccctcatcagtttataacttctaccaacacatttacagatgtgagcaccaacccctccacctctctgataatgacagaatcttcaggagtgaccatcaccacccaaacaggtcctactggagctgcaacacagggtccatatctcttggacacatcaaccatgccttacttgacagagactccattagctgtgactccagattttatgcaatcagagaagaccactctcataagcaaaggtcccaaggatgtgtcctggacaagccctccctctgtggcagaaaccagctatccctcttccctgacacctttcttggtcacaaccatacctcctgccacttccacgttacaagggcaacatacatcctctcctgtttctgcgacttcagttcttacctctggactggtgaagaccacagatatgttgaacacaagcatggaacctgtgaccaattcacctcaaaatttgaacaatccatcaaatgagatactggccactttggcagccaccacagatatagagactattcatccttccataaacaaagcagtgaccaatatggggactgccagttcagcacatgtactgcattccactctcccagtcagctcagaaccatctacagccacatctccaatggttcctgcctccagcatgggggacgctcttgcttctatatcaatacctggttctgagaccacagacattgagggagagccaacatcctccctgactgctggacgaaaagagaacagcaccctccaggagatgaactcaactacagagtcaaacatcatcctctccaatgtgtctgtgggggctattactgaagccacaaaaatggaagtcccctcttttgatgcaacattcataccaactcctgctcagtcaacaaagttcccagatattttctcagtagccagcagtagactttcaaactctcctcccatgacaatatctacccacatgaccaccacccagacagggtcttctggagctacatcaaagattccacttgccttagacacatcaaccttggaaacctcagcagggactccatcagtggtgactgaggggtttgcccactcaaaaataaccactgcaatgaacaatgatgtcaaggacgtgtcacagacaaaccctccctttcaggatgaagccagctctccctcttctcaagcacctgtccttgtcacaaccttaccttcttctgttgctttcacaccgcaatggcacagtacctcctctcctgtttctatgtcctcagttcttacttcttcactggtaaagaccgcaggcaaggtggatacaagcttagaaacagtgaccagttcacctcaaagtatgagcaacactttggatgacatatcggtcacttcagcagccaccacagatatagagacaacgcatccttccataaacacagtagttaccaatgtggggaccaccggttcagcatttgaatcacattctactgtctcagcttacccagagccatctaaagtcacatctccaaatgttaccacctccaccatggaagacaccacaatttccagatcaatacctaaatcctctaagactacaagaactgagactgagacaacttcctccctgactcctaaactgagggagaccagcatctcccaggagatcacctcgtccacagagacaagcactgttccttacaaagagctcactggtgccactaccgaggtatccaggacagatgtcacttcctctagcagtacatccttccctggccctgatcagtccacagtgtcactagacatctccacagaaaccaacaccaggctgtctacctccccaataatgacagaatctgcagaaataaccatcaccacccaaacaggtcctcatggggctacatcacaggatacttttaccatggacccatcaaatacaaccccccaggcagggatccactcagctatgactcatggattttcacaattggatgtgaccactcttatgagcagaattccacaggatgtatcatggacaagtcctccctctgtggataaaaccagctccccctcttcctttctgtcctcacctgcaatgaccacaccttccctgatttcttctaccttaccagaggataagctctcctctcctatgacttcacttctcacctctggcctagtgaagattacagacatattacgtacacgcttggaacctgtgaccagctcacttccaaatttcagcagcacctcagataagatactggccacttctaaagacagtaaagacacaaaggaaatttttccttctataaacacagaagagaccaatgtgaaagccaacaactctggacatgaatcccattcccctgcactggctgactcagagacacccaaagccacaactcaaatggttatcaccaccactgtgggagatccagctccttccacatcaatgccagtgcatggttcctctgagactacaaacattaagagagagccaacatatttcttgactcctagactgagagagaccagtacctctcaggagtccagctttcccacggacacaagttttctactttccaaagtccccactggtactattactgaggtctccagtacaggggtcaactcttctagcaaaatttccaccccagaccatgataagtccacagtgccacctgacaccttcacaggagagatccccagggtcttcacctcctctattaagacaaaatctgcagaaatgacgatcaccacccaagcaagtcctcctgagtctgcatcgcacagtacccttcccttggacacatcaaccacactttcccagggagggactcattcaactgtgactcagggattcccatactcagaggtgaccactctcatgggcatgggtcctgggaatgtgtcatggatgacaactccccctgtggaagaaaccagctctgtgtcttccctgatgtcttcacctgccatgacatccccttctcctgtttcctccacatcaccacagagcatcccctcctctcctcttcctgtgactgcacttcctacttctgttctggtgacaaccacagatgtgttgggcacaacaagcccagagtctgtaaccagttcacctccaaatttgagcagcatcactcatgagagaccggccacttacaaagacactgcacacacagaagccgccatgcatcattccacaaacaccgcagtgaccaatgtagggacttccgggtctggacataaatcacaatcctctgtcctagctgactcagagacatcgaaagccacacctctgatgagtaccacctccaccctgggggacacaagtgtttccacatcaactcctaatatctctcagactaaccaaattcaaacagagccaacagcatccctgagccctagactgagggagagcagcacgtctgagaagaccagctcaacaacagagacaaatactgccttttcttatgtgcccacaggtgctattactcaggcctccagaacagaaatctcctctagcagaacatccatctcagaccttgatcggcccacaatagcacccgacatctccacaggaatgatcaccaggctcttcacctcccccatcatgacaaaatctgcagaaatgaccgtcaccactcaaacaactactcctggggctacatcacagggtatccttccctgggacacatcaaccacacttttccagggagggactcattcaaccgtgtctcagggattcccacactcagagataaccactcttcggagcagaacccctggagatgtgtcatggatgacaactccccctgtggaagaaaccagctctgggttttccctgatgtcaccttccatgacatccccttctcctgtttcctccacatcaccagagagcatcccctcctctcctctccctgtgactgcacttcttacttctgttctggtgacaaccacaaatgtattgggcacaacaagcccagagcccgtaacgagttcacctccaaatttaagcagccccacacaggagagactgaccacttacaaagacactgcgcacacagaagccatgcatgcttccatgcatacaaacactgcagtggccaacgtggggacctccatttctggacatgaatcacaatcttctgtcccagctgattcacacacatccaaagccacatctccaatgggtatcaccttcgccatgggggatacaagtgtttctacatcaactcctgccttctttgagactagaattcagactgaatcaacatcctctttgattcctggattaagggacaccaggacgtctgaggagatcaacactgtgacagagaccagcactgtcctttcagaagtgcccactactactactactgaggtctccaggacagaagttatcacttccagcagaacaaccatctcagggcctgatcattccaaaatgtcaccctacatctccacagaaaccatcaccaggctctccacttttccttttgtaacaggatccacagaaatggccatcaccaaccaaacaggtcctatagggactatctcacaggctacccttaccctggacacatcaagcacagcttcctgggaagggactcactcacctgtgactcagagatttccacactcagaggagaccactactatgagcagaagtactaagggcgtgtcatggcaaagccctccctctgtggaagaaaccagttctccttcttccccagtgcctttacctgcaataacctcacattcatctctttattccgcagtatcaggaagtagccccacttctgctctccctgtgacttcccttctcacctctggcaggaggaagaccatagacatgttggacacacactcagaacttgtgaccagctccttaccaagtgcaagtagcttctcaggtgagatactcacttctgaagcctccacaaatacagagacaattcacttttcagagaacacagcagaaaccaatatggggaccaccaattctatgcataaactacattcctctgtctcaatccactcccagccatccggacacacacctccaaaggttactggatctatgatggaggacgctattgtttccacatcaacacctggttctcctgagactaaaaatgttgacagagactcaacatcccctctgactcctgaactgaaagaggacagcaccgccctggtgatgaactcaactacagagtcaaacactgttttctccagtgtgtccctggatgctgctactgaggtctccagggcagaagtcacctactatgatcctacattcatgccagcttctgctcagtcaacaaagtccccagacatttcacctgaagccagcagcagtcattctaactctcctcccttgacaatatctacacacaagaccatcgccacacaaacaggtccttctggggtgacatctcttggccaactgaccctggacacatcaaccatagccacctcagcaggaactccatcagccagaactcaggattttgtagattcagaaacaaccagtgtcatgaacaatgatctcaatgatgtgttgaagacaagccctttctctgcagaagaagccaactctctctcttctcaggcacctctccttgtgacaacctcaccttctcctgtaacttccacattgcaagagcacagtacctcctctcttgtttctgtgacctcagtacccacccctacactggcgaagatcacagacatggacacaaacttagaacctgtgactcgttcacctcaaaatttaaggaacaccttggccacttcagaagccaccacagatacacacacaatgcatccttctataaacacagcagtggccaatgtggggaccaccagttcaccaaatgaattctattttactgtctcacctgactcagacccatataaagccacatccgcagtagttatcacttccacctcgggggactcaatagtttccacatcaatgcctagatcctctgcgatgaaaaagattgagtctgagacaactttctccctgatatttagactgagggagactagcacctcccagaaaattggctcatcctcagacacaagcacggtctttgacaaagcattcactgctgctactactgaggtctccagaacagaactcacctcctctagcagaacatccatccaaggcactgaaaagcccacaatgtcaccggacacctccacaagatctgtcaccatgctttctacttttgctggcctgacaaaatccgaagaaaggaccattgccacccaaacaggtcctcatagggcgacatcacagggtacccttacctgggacacatcaatcacaacctcacaggcagggacccactcagctatgactcatggattttcacaattagatttgtccactcttacgagtagagttcctgagtacatatcagggacaagcccaccctctgtggaaaaaaccagctcttcctcttcccttctgtctttaccagcaataacctcaccgtcccctgtacctactacattaccagaaagtaggccgtcttctcctgttcatctgacttcactccccacctctggcctagtgaagaccacagatatgctggcatctgtggccagtttacctccaaacttgggcagcacctcacataagataccgactacttcagaagacattaaagatacagagaaaatgtatccttccacaaacatagcagtaaccaatgtggggaccaccacttctgaaaaggaatcttattcgtctgtcccagcctactcagaaccacccaaagtcacctctccaatggttacctctttcaacataagggacaccattgtttccacatccatgcctggctcctctgagattacaaggattgagatggagtcaacattctccctggctcatgggctgaagggaaccagcacctcccaggaccccatcgtatccacagagaaaagtgctgtccttcacaagttgaccactggtgctactgagacctctaggacagaagttgcctcttctagaagaacatccattccaggccctgatcattccacagagtcaccagacatctccactgaagtgatccccagcctgcctatctcccttggcattacagaatcttcaaatatgaccatcatcactcgaacaggtcctcctcttggctctacatcacagggcacatttaccttggacacaccaactacatcctccagggcaggaacacactcgatggcgactcaggaatttccacactcagaaatgaccactgtcatgaacaaggaccctgagattctatcatggacaatccctccttctatagagaaaaccagcttctcctcttccctgatgccttcaccagccatgacttcacctcctgtttcctcaacattaccaaagaccattcacaccactccttctcctatgacctcactgctcacccctagcctagtgatgaccacagacacattgggcacaagcccagaacctacaaccagttcacctccaaatttgagcagtacctcacatgagatactgacaacagatgaagacaccacagctatagaagccatgcatccttccacaagcacagcagcgactaatgtggaaaccaccagttctggacatgggtcacaatcctctgtcctagctgactcagaaaaaaccaaggccacagctccaatggataccacctccaccatggggcatacaactgtttccacatcaatgtctgtttcctctgagactacaaaaattaagagagagtcaacatattccttgactcctggactgagagagaccagcatttcccaaaatgccagcttttccactgacacaagtattgttctttcagaagtccccactggtactactgctgaggtctccaggacagaagtcacctcctctggtagaacatccatccctggcccttctcagtccacagttttgccagaaatatccacaagaacaatgacaaggctctttgcctcgcccaccatgacagaatcagcagaaatgaccatccccactcaaacaggtccttctgggtctacctcacaggatacccttaccttggacacatccaccacaaagtcccaggcaaagactcattcaactttgactcagagatttccacactcagagatgaccactctcatgagcagaggtcctggagatatgtcatggcaaagctctccctctctggaaaatcccagctctctcccttccctgctgtctttacctgccacaacctcacctcctcccatttcctccacattaccagtgactatctcctcctctcctcttcctgtgacttcacttctcacctctagcccggtaacgaccacagacatgttacacacaagcccagaacttgtaaccagttcacctccaaagctgagccacacttcagatgagagactgaccactggcaaggacaccacaaatacagaagctgtgcatccttccacaaacacagcagcgtccaatgtggagattcccagctctggacatgaatccccttcctctgccttagctgactcagagacatccaaagccacatcaccaatgtttattacctccacccaggaggatacaactgttgccatatcaacccctcacttcttggagactagcagaattcagaaagagtcaatttcctccctgagccctaaattgagggagacaggcagttctgtggagacaagctcagccatagagacaagtgctgtcctttctgaagtgtccattggtgctactactgagatctccaggacagaagtcacctcctctagcagaacatccatctctggttctgctgagtccacaatgttgccagaaatatccaccacaagaaaaatcattaagttccctacttcccccatcctggcagaatcatcagaaatgaccatcaagacccaaacaagtcctcctgggtctacatcagagagtacctttacattagacacatcaaccactccctccttggtaataacccattcgactatgactcagagattgccacactcagagataaccactcttgtgagtagaggtgctggggatgtgccacggcccagctctctccctgtggaagaaacaagccctccatcttcccagctgtctttatctgccatgatctcaccttctcctgtttcttccacattaccagcaagtagccactcctcttctgcttctgtgacttcacttctcacaccaggccaagtgaagactactgaggtgttggacgcaagtgcagaacctgaaaccagttcacctccaagtttgagcagcacctcagttgaaatactggccacctctgaagtcaccacagatacggagaaaattcatcctttctcaaacacggcagtaaccaaagttggaacttccagttctggacatgaatccccttcctctgtcctacctgactcagagacaaccaaagccacatcggcaatgggtaccatctccattatgggggatacaagtgtttctacattaactcctgccttatctaacactaggaaaattcagtcagagccagcttcctcactgaccaccagattgagggagaccagcacctctgaagagaccagcttagccacagaagcaaacactgttctttctaaagtgtccactggtgctactactgaggtctccaggacagaagccatctcctttagcagaacatccatgtcaggccctgagcagtccacaatgtcacaagacatctccataggaaccatccccaggatttctgcctcctctgtcctgacagaatctgcaaaaatgaccatcacaacccaaacaggtccttcggagtctacactagaaagtacccttaatttgaacacagcaaccacaccctcttgggtggaaacccactctatagtaattcagggatttccacacccagagatgaccacttccatgggcagaggtcctggaggtgtgtcatggcctagccctccctttgtgaaagaaaccagccctccatcctccccgctgtctttacctgccgtgacctcacctcatcctgtttccaccacattcctagcacatatccccccctctccccttcctgtgacttcacttctcacctctggcccggcgacaaccacagatatcttgggtacaagcacagaacctggaaccagttcatcttcaagtttgagcaccacctcccatgagagactgaccacttacaaagacactgcacatacagaagccgtgcatccttccacaaacacaggagggaccaatgtggcaaccaccagctctggatataaatcacagtcctctgtcctagctgactcatctccaatgtgtaccacctccaccatgggggatacaagtgttctcacatcaactcctgccttccttgagactaggaggattcagacagagctagcttcctccctgacccctggattgagggagtccagcggctctgaagggaccagctcaggcaccaagatgagcactgtcctctctaaagtgcccactggtgctactactgagatctccaaggaagacgtcacctccatcccaggtcccgctcaatccacaatatcaccagacatctccacaagaaccgtcagctggttctctacatcccctgtcatgacagaatcagcagaaataaccatgaacacccatacaagtcctttaggggccacaacacaaggcaccagtactttggacacgtcaagcacaacctctttgacaatgacacactcaactatatctcaaggattttcacactcacagatgagcactcttatgaggaggggtcctgaggatgtatcatggatgagccctccccttctggaaaaaactagaccttccttttctctgatgtcttcaccagccacaacttcaccttctcctgtttcctccacattaccagagagcatctcttcctctcctcttcctgtgacttcactcctcacgtctggcttggcaaaaactacagatatgttgcacaaaagctcagaacctgtaaccaactcacctgcaaatttgagcagcacctcagttgaaatactggccacctctgaagtcaccacagatacagagaaaactcatccttcttcaaacagaacagtgaccgatgtggggacctccagttctggacatgaatccacttcctttgtcctagctgactcacagacatccaaagtcacatctccaatggttattacctccaccatggaggatacgagtgtctccacatcaactcctggcttttttgagactagcagaattcagacagaaccaacatcctccctgacccttggactgagaaagaccagcagctctgaggggaccagcttagccacagagatgagcactgtcctttctggagtgcccactggtgccactgctgaagtctccaggacagaagtcacctcctctagcagaacatccatctcaggctttgctcagctcacagtgtcaccagagacttccacagaaaccatcaccagactccctacctccagcataatgacagaatcagcagaaatgatgatcaagacacaaacagatcctcctgggtctacaccagagagtactcatactgtggacatatcaacaacacccaactgggtagaaacccactcgactgtgactcagagattttcacactcagagatgaccactcttgtgagcagaagccctggtgatatgttatggcctagtcaatcctctgtggaagaaaccagctctgcctcttccctgctgtctctgcctgccacgacctcaccttctcctgtttcctctacattagtagaggatttcccttccgcttctcttcctgtgacttctcttctcaaccctggcctggtgataaccacagacaggatgggcataagcagagaacctggaaccagttccacttcaaatttgagcagcacctcccatgagagactgaccactttggaagacactgtagatacagaagacatgcagccttccacacacacagcagtgaccaacgtgaggacctccatttctggacatgaatcacaatcttctgtcctatctgactcagagacacccaaagccacatctccaatgggtaccacctacaccatgggggaaacgagtgtttccatatccacttctgacttctttgagaccagcagaattcagatagaaccaacatcctccctgacttctggattgagggagaccagcagctctgagaggatcagctcagccacagagggaagcactgtcctttctgaagtgcccagtggtgctaccactgaggtctccaggacagaagtgatatcctctaggggaacatccatgtcagggcctgatcagttcaccatatcaccagacatctctactgaagcgatcaccaggctttctacttcccccattatgacagaatcagcagaaagtgccatcactattgagacaggttctcctggggctacatcagagggtaccctcaccttggacacctcaacaacaaccttttggtcagggacccactcaactgcatctccaggattttcacactcagagatgaccactcttatgagtagaactcctggagatgtgccatggccgagccttccctctgtggaagaagccagctctgtctcttcctcactgtcttcacctgccatgacctcaacttcttttttctccacattaccagagagcatctcctcctctcctcatcctgtgactgcacttctcacccttggcccagtgaagaccacagacatgttgcgcacaagctcagaacctgaaaccagttcacctccaaatttgagcagcacctcagctgaaatattagccacgtctgaagtcaccaaagatagagagaaaattcatccctcctcaaacacacctgtagtcaatgtagggactgtgatttataaacatctatccccttcctctgttttggctgacttagtgacaacaaaacccacatctccaatggctaccacctccactctggggaatacaagtgtttccacatcaactcctgccttcccagaaactatgatgacacagccaacttcctccctgacttctggattaagggagatcagtacctctcaagagaccagctcagcaacagagagaagtgcttctctttctggaatgcccactggtgctactactaaggtctccagaacagaagccctctccttaggcagaacatccaccccaggtcctgctcaatccacaatatcaccagaaatctccacggaaaccatcactagaatttctactcccctcaccacgacaggatcagcagaaatgaccatcacccccaaaacaggtcattctggggcatcctcacaaggtacctttaccttggacacatcaagcagagcctcctggccaggaactcactcagctgcaactcacagatctccacactcagggatgaccactcctatgagcagaggtcctgaggatgtgtcatggccaagccgcccatcagtggaaaaaactagccctccatcttccctggtgtctttatctgcagtaacctcaccttcgccactttattccacaccatctgagagtagccactcatctcctctccgggtgacttctcttttcacccctgtcatgatgaagaccacagacatgttggacacaagcttggaacctgtgaccacttcacctcccagtatgaatatcacctcagatgagagtctggccacttctaaagccaccatggagacagaggcaattcagctttcagaaaacacagctgtgactcagatgggcaccatcagcgctagacaagaattctattcctcttatccaggcctcccagagccatccaaagtgacatctccagtggtcacctcttccaccataaaagacattgtttctacaaccatacctgcttcctctgagataacaagaattgagatggagtcaacatccaccctgacccccacaccaagggagaccagcacctcccaggagatccactcagccacaaagccaagcactgttccttacaaggcactcactagtgccacgattgaggactccatgacacaagtcatgtcctctagcagaggacctagccctgatcagtccacaatgtcacaagacatatccactgaagtgatcaccaggctctctacctcccccatcaagacagaatctacagaaatgaccattaccacccaaacaggttctcctggggctacatcaaggggtacccttaccttggacacttcaacaacttttatgtcagggacccactcaactgcatctcaaggattttcacactcacagatgaccgctcttatgagtagaactcctggagatgtgccatggctaagccatccctctgtggaagaagccagctctgcctctttctcactgtcttcacctgtcatgacctcatcttctcccgtttcttccacattaccagacagcatccactcttcttcgcttcctgtgacatcacttctcacctcagggctggtgaagaccacagagctgttgggcacaagctcagaacctgaaaccagttcacccccaaatttgagcagcacctcagctgaaatactggccatcactgaagtcactacagatacagagaaactggagatgaccaatgtggtaacctcaggttatacacatgaatctccttcctctgtcctagctgactcagtgacaacaaaggccacatcttcaatgggtatcacctaccccacaggagatacaaatgttctcacatcaacccctgccttctctgacaccagtaggattcaaacaaagtcaaagctctcactgactcctgggttgatggagaccagcatctctgaagagaccagctctgccacagaaaaaagcactgtcctttctagtgtgcccactggtgctactactgaggtctccaggacagaagccatctcttctagcagaacatccatcccaggccctgctcaatccacaatgtcatcagacacctccatggaaaccatcactagaatttctacccccctcacaaggaaagaatcaacagacatggccatcacccccaaaacaggtccttctggggctacctcgcagggtacctttaccttggactcatcaagcacagcctcctggccaggaactcactcagctacaactcagagatttccacagtcagtggtgacaactcctatgagcagaggtcctgaggatgtgtcatggccaagcccgctgtctgtggaaaaaaacagccctccatcttccctggtatcttcatcttcagtaacctcaccttcgccactttattccacaccatctgggagtagccactcctctcctgtccctgtcacttctcttttcacctctatcatgatgaaggccacagacatgttggatgcaagtttggaacctgagaccacttcagctcccaatatgaatatcacctcagatgagagtctggccgcttctaaagccaccacggagacagaggcaattcacgtttttgaaaatacagcagcgtcccatgtggaaaccaccagtgctacagaggaactctattcctcttccccaggcttctcagagccaacaaaagtgatatctccagtggtcacctcttcctctataagagacaacatggtttccacaacaatgcctggctcctctggcattacaaggattgagatagagtcaatgtcatctctgacccctggactgagggagaccagaacctcccaggacatcacctcatccacagagacaagcactgtcctttacaagatgccctctggtgccactcctgaggtctccaggacagaagttatgccctctagcagaacatccattcctggccctgctcagtccacaatgtcactagacatctccgatgaagttgtcaccaggctgtctacctctcccatcatgacagaatctgcagaaataaccatcaccacccaaacaggttattctctggctacatcccaggttacccttcccttgggcacctcaatgacctttttgtcagggacccactcaactatgtctcaaggactttcacactcagagatgaccaatcttatgagcaggggtcctgaaagtctgtcatggacgagccctcgctttgtggaaacaactagatcttcctcttctctgacatcattacctctcacgacctcactttctcctgtgtcctccacattactagacagtagcccctcctctcctcttcctgtgacttcacttatcctcccaggcctggtgaagactacagaagtgttggatacaagctcagagcctaaaaccagttcatctccaaatttgagcagcacctcagttgaaataccggccacctctgaaatcatgacagatacagagaaaattcatccttcctcaaacacagcggtggccaaagtgaggacctccagttctgttcatgaatctcattcctctgtcctagctgactcagaaacaaccataaccataccttcaatgggtatcacctccgctgtggacgataccactgttttcacatcaaatcctgccttctctgagactaggaggattccgacagagccaacattctcattgactcctggattcagggagactagcacctctgaagagaccacctcaatcacagaaacaagtgcagtcctttatggagtgcccactagtgctactactgaagtctccatgacagaaatcatgtcctctaatagaatacacatccctgactctgatcagtccacgatgtctccagacatcatcactgaagtgatcaccaggctctcttcctcatccatgatgtcagaatcaacacaaatgaccatcaccacccaaaaaagttctcctggggctacagcacagagtactcttaccttggccacaacaacagcccccttggcaaggacccactcaactgttcctcctagatttttacactcagagatgacaactcttatgagtaggagtcctgaaaatccatcatggaagagctctctctttgtggaaaaaactagctcttcatcttctctgttgtccttacctgtcacgacctcaccttctgtttcttccacattaccgcagagtatcccttcctcctctttttctgtgacttcactcctcaccccaggcatggtgaagactacagacacaagcacagaacctggaaccagtttatctccaaatctgagtggcacctcagttgaaatactggctgcctctgaagtcaccacagatacagagaaaattcatccttcttcaagcatggcagtgaccaatgtgggaaccaccagttctggacatgaactatattcctctgtttcaatccactcggagccatccaaggctacatacccagtgggtactccctcttccatggctgaaacctctatttccacatcaatgcctgctaattttgagaccacaggatttgaggctgagccattttctcatttgacttctggatttaggaagacaaacatgtccctggacaccagctcagtcacaccaacaaatacaccttcttctcctgggtccactcaccttttacagagttccaagactgatttcacctcttctgcaaaaacatcatccccagactggcctccagcctcacagtatactgaaattccagtggacataatcaccccctttaatgcttctccatctattacggagtccactgggataacctccttcccagaatccaggtttactatgtctgtaacagaaagtactcatcatctgagtacagatttgctgccttcagctgagactatttccactggcacagtgatgccttctctatcagaggccatgacttcatttgccaccactggagttccacgagccatctcaggttcaggtagtccattctctaggacagagtcaggccctggggatgctactctgtccaccattgcagagagcctgccttcatccactcctgtgccattctcctcttcaaccttcactaccactgattcttcaaccatcccagccctccatgagataacttcctcttcagctaccccatatagagtggacaccagtcttgggacagagagcagcactactgaaggacgcttggttatggtcagtactttggacacttcaagccaaccaggcaggacatcttcatcacccattttggataccagaatgacagagagcgttgagctgggaacagtgacaagtgcttatcaagttccttcactctcaacacggttgacaagaactgatggcattatggaacacatcacaaaaatacccaatgaagcagcacacagaggtaccataagaccagtcaaaggccctcagacatccacttcgcctgccagtcctaaaggactacacacaggagggacaaaaagaatggagaccaccaccacagctctgaagaccaccaccacagctctgaagaccacttccagagccaccttgaccaccagtgtctatactcccactttgggaacactgactcccctcaatgcatcaatgcaaatggccagcacaatccccacagaaatgatgatcacaaccccatatgttttccctgatgttccagaaacgacatcctcattggctaccagcctgggagcagaaaccagcacagctcttcccaggacaaccccatctgttttcaatagagaatcagagaccacagcctcactggtctctcgttctggggcagagagaagtccggttattcaaactctagatgtttcttctagtgagccagatacaacagcttcatgggttatccatcctgcagagaccatcccaactgtttccaagacaacccccaattttttccacagtgaattagacactgtatcttccacagccaccagtcatggggcagacgtcagctcagccattccaacaaatatctcacctagtgaactagatgcactgaccccactggtcactatttcggggacagatactagtacaacattcccaacactgactaagtccccacatgaaacagagacaagaaccacatggctcactcatcctgcagagaccagctcaactattcccagaacaatccccaatttttctcatcatgaatcagatgccacaccttcaatagccaccagtcctggggcagaaaccagttcagctattccaattatgactgtctcacctggtgcagaagatctggtgacctcacaggtcactagttctgggacagacagaaatatgactattccaactttgactctttctcctggtgaaccaaagacgatagcctcattagtcacccatcctgaagcacagacaagttcggccattccaacttcaactatctcgcctgctgtatcacggttggtgacctcaatggtcaccagtttggcggcaaagacaagtacaactaatcgagctctgacaaactcccctggtgaaccagctacaacagtttcattggtcacgcatcctgcacagaccagcccaacagttccctggacaacttccatttttttccatagtaaatcagacaccacaccttcatgaccaccagtcatggggcagaatccagttcagctgttccaactccaactgtttcaactgaggtaccaggagtagtgacccctttggtcaccagttctagggcagtgatcagtacaactattccaattctgactctttctcctggtgaaccagagaccacaccttcaatggccaccagtcatggggaagaagccagttctgctattccaactccaactgtttcacctggggtaccaggagtggtgacctctctggtcactagttctagggcagtgactagtacaactattccaattctgactttttctcttggtgaaccagagaccacaccttcaatggccaccagtcatgggacagaagctggctcagctgttccaactgttttacctgaggtaccaggaatggtgacctctctggttgctagttctagggcagtaaccagtacaactcttccaactctgactctttctcctggtgaaccagagaccacaccttcaatggccaccagtcatggggcagaagccagctcaactgttccaactgtttcacctgaggtaccaggagtggtgacctctctggtcactagttctagtggagtaaacagtacaagtattccaactctgattctttctcctggtgaactagaaaccacaccttcaatggccaccagtcatggggcagaagccagctcagctgttccaactccaactgtttcacctggggtatcaggagtggtgacccctctggtcactagttccagggcagtgaccagtacaactattccaattctaactctttcttctagtgagccagagaccacaccttcaatggccaccagtcatggggtagaagccagctcagctgttctaactgtttcacctgaggtaccaggaatggtgacctctctggtcactagttctagagcagtaaccagtacaactattccaactctgactatttcttctgatgaaccagagaccacaacttcattggtcacccattctgaggcaaagatgatttcagccattccaactttagctgtctcccctactgtacaagggctggtgacttcactggtcactagttctgggtcagagaccagtgcgttttcaaatctaactgttgcctcaagtcaaccagagaccatagactcatgggtcgctcatcctgggacagaagcaagttctgttgttccaactttgactgtctccactggtgagccgtttacaaatatctcattggtcacccatcctgcagagagtagctcaactcttcccaggacaacctcaaggttttcccacagtgaattagacactatgccttctacagtcaccagtcctgaggcagaatccagctcagccatttcaacaactatttcacctggtataccaggtgtgctgacatcactggtcactagctctgggagagacatcagtgcaacttttccaacagtgcctgagtccccacatgaatcagaggcaacagcctcatgggttactcatcctgcagtcaccagcacaacagttcccaggacaacccctaattattctcatagtgaaccagacaccacaccatcaatagccaccagtcctggggcagaagccacttcagattttccaacaataactgtctcacctgatgtaccagatatggtaacctcacaggtcactagttctgggacagacaccagtataactattccaactctgactctttcttctggtgagccagagaccacaacctcatttatcacctattctgagacacacacaagttcagccattccaactctccctgtctcccctggtgcatcaaagatgctgacctcactggtcatcagttctgggacagacagcactacaactttcccaacactgacggagaccccatatgaaccagagacaacagccatacagctcattcatcctgcagagaccaacacaatggttcccaggacaactcccaagttttcccatagtaagtcagacaccacactcccagtagccatcaccagtcctgggccagaagccagttcagctgtttcaacgacaactatctcacctgatatgtcagatctggtgacctcactggtccctagttctgggacagacaccagtacaaccttcccaacattgagtgagaccccatatgaaccagagactacagccacgtggctcactcatcctgcagaaaccagcacaacggtttctgggacaattcccaacttttcccataggggatcagacactgcaccctcaatggtcaccagtcctggagtagacacgaggtcaggtgttccaactacaaccatcccacccagtataccaggggtagtgacctcacaggtcactagttctgcaacagacactagtacagctattccaactttgactccttctcctggtgaaccagagaccacagcctcatcagctacccatcctgggacacagactggcttcactgttccaattcggactgttccctctagtgagccagatacaatggcttcctgggtcactcatcctccacagaccagcacacctgtttccagaacaacctccagtttttcccatagtagtccagatgccacacctgtaatggccaccagtcctaggacagaagccagttcagctgtactgacaacaatctcacctggtgcaccagagatggtgacttcacagatcactagttctggggcagcaaccagtacaactgttccaactttgactcattctcctggtatgccagagaccacagccttattgagcacccatcccagaacagagacaagtaaaacatttcctgcttcaactgtgtttcctcaagtatcagagaccacagcctcactcaccattagacctggtgcagagactagcacagctctcccaactcagacaacatcctctctcttcaccctacttgtaactggaaccagcagagttgatctaagtccaactgcttcacctggtgtttctgcaaaaacagccccactttccacccatccagggacagaaaccagcacaatgattccaacttcaactctttcccttggtttactagagactacaggcttactggccaccagctcttcagcagagaccagcacgagtactctaactctgactgtttcccctgctgtctctgggctttccagtgcctctataacaactgataagccccaaactgtgacctcctggaacacagaaacctcaccatctgtaacttcagttggacccccagaattttccaggactgtcacaggcaccactatgaccttgataccatcagagatgccaacaccacctaaaaccagtcatggagaaggagtgagtccaaccactatcttgagaactacaatggttgaagccactaatttagctaccacaggttccagtcccactgtggccaagacaacaaccaccttcaatacactggctggaagcctctttactcctctgaccacacctgggatgtccaccttggcctctgagagtgtgacctcaagaacaagttataaccatcggtcctggatctccaccaccagcagtgttataaccgtcggtactggacccctgccaccagcactccagtgacttctacattctccccagggatttccacatcctccatccccagctccacagcagccacagtcccattcatggtgccattcaccctcaacttcaccatcaccaacctgcagtacgaggaggacatgcggcaccctggttccaggaagttcaacgccacagagagagaactgcagggtctgctcaaacccttgttcaggaatagcagtctggaatacctctattcaggctgcagactagcctcactcaggccagagaaggatagctcagccacggcagtggatgccatctgcacacatcgccctgaccctgaagacctcggactggacagagagcgactgtactgggagctgagcaatctgacaaatggcatccaggagctgggcccctacaccctggaccggaacagtctctatgtcaatggtttcacccatcgaagctctatgcccaccaccagcactcctgggacctccacagtggatgtgggaacctcagggactccatcctccagccccagccccacgaccactatagctgctggccctctcctgatgccgttcaccctcaacttcaccatcaccaacctgcagtacgaggaggacatgcgtcgcactggctccaggaagttcaacaccatggagagtgtcctgcagggtctgctcaagcccttgttcaagaacaccagtgttggccctctgtactctggctgcagattgaccttgctcaggcccgagaaagatggggcagccactggagtggatgccatctgcacccaccgccttgaccccaaaagccctggactcaacagggagcagctgtactgggagctaagcaaactgaccaatgacattgaagagctgggcccctacaccctggacaggaacagtctctatgtcaatggtttcacccatcagagctctgtgtccaccaccagcactcctgggacctccacagtggatctcagaacctcagggactccatcctccctctccagccccacaattatggctgctggccctctcctggtaccattcaccctcaacttcaccatcaccaacctgcagtatggggaggacatgggtcaccctggctccaggaagttcaacaccacagagagggtcctgcagggtctgcttggtcccatattcaagaacaccagtgttggccctctgtactctggctgcagactgacctctctcaggtctgagaaggatggagcagccactggagtggatgccatctgcatccatcatcttgaccccaaaagccctggactcaacagagagcggctgtactgggagctgagccaactgaccaatggcatcaaagagctgggcccctacaccctggacaggaacagtctctatgtcaatggtttcacccatcggacctctgtgcccaccagcagcactcctgggacctccacagtggaccttggaacctcagggactccattctccctcccaagccccgcaactgctggccctctcctggtgctgttcaccctcaacttcaccatcaccaacctgaagtatgaggaggacatgcatcgccctggctccaggaagttcaacaccactgagagggtcctgcagactctgcttggtcctatgttcaagaacaccagtgttggccttctgtactctggctgcagactgaccttgctcaggtccgagaaggatggagcagccactggagtggatgccatctgcacccaccgtcttgaccccaaaagccctggagtggacagggagcagctatactgggagctgagccagctgaccaatggcatcaaagagctgggcccctacaccctggacaggaacagtctctatgtcaatggtttcacccattggatccctgtgcccaccagcagcactcctgggacctccacagtggaccttgggtcagggactccatcctccctccccagccccacaactgctggccctctcctggtgccgttcaccctcaacttcaccatcaccaacctgaagtacgaggaggacatgcattgccctggctccaggaagttcaacaccacagagagagtcctgcagagtctgcttggtcccatgttcaagaacaccagtgttggccctctgtactctggctgcagactgaccttgctcaggtccgagaaggatggagcagccactggagtggatgccatctgcacccaccgtcttgaccccaaaagccctggagtggacagggagcagctatactgggagctgagccagctgaccaatggcatcaaagagctgggtccctacaccctggacagaaacagtctctatgtcaatggtttcacccatcagacctctgcgcccaacaccagcactcctgggacctccacagtggaccttgggacctcagggactccatcctccctccccagccctacatagctgctggccctctcctggtgccattcaccctcaacttcaccatcaccaacctgcagtacgaggaggacatgcatcacccaggctccaggaagttcaacaccacggagcgggtcctgcagggtctgcttggtcccatgttcaagaacaccagtgtcggccttctgtactctggctgcagactgaccttgctcaggcctgagaagaatggggcagccactggaatggatgccatctgcagccaccgtcttgaccccaaaagccctggactcaacagagagcagctgtactgggagctgagccagctgacccatggcatcaaagagctgggcccctacaccctggacaggaacagtctctatgtcaatggtgaacagatgtttcacccatcggagctctgtggcccccaccagcactcctgggacctccacagtggaccttgggacctcagggactccatcctccctccccagccccacaatttatttccccctcccactacagcagctgttcctctcctggtgccgttcaccctcaactttaccatcaccaatctgcagtatggggaggacatgcgtcaccctggctccaggaagttcaacaccacagagagggtcctgcagggtctgcttggtcccttgttcaagaactccagtgtcggccctctgtactctggctgcagactgatctctctcaggtctgagaaggatggggcagccactggagtggatgccatctgcacccaccaccttaaccctcaaagccctggactggacagggagcagctgtactggcagctgagccagatgaccaatggcatcaaagagctgggcccctacaccctggaccggaacagtctctacgtcaatggtttcacccatcggagctctgggctcaccaccagcactccttggacttccacagttgaccttggaacctcagggactccatcccccgtccccagccccacaaactatagccaccggccctctcctggtgccattcacactcaacttcaccatcactaacctacagtatgaggagaacatgggtcaccctggctccaggaagttcaacatcacggagagtgttctgcagggtctgctcaagcccttgttcaagagcaccagtgttggccctctgtattctggctgcagactgaccttgctcaggcctgagaaggatggagtagccaccagagtggacgccatctgcacccaccgccctgaccccaaaatccctgggctagacagacagcagctatactgggagctgagccagctgacccacagcatcactgagctgggaccctacaccctggatagggacagtctctatgtcaatggtttcacccagcggagctctgtgcccaccaccagcactcctgggactttcacagtacagccggaaacctctgagactccatcatccctccctggccccacagccactggccctgtcctgctgccattcaccctcaattttaccatcactaacctgcagtatgaggaggacatgcgtcgccctggctccaggaagttcaacaccacggagagggtccttcagggtctgcttatgcccttgttcaagaacaccagtgtcagctctctgtactctggttgcagactgaccttgctcaggcctgagaaggatggggcagccaccagagtggatgctgtctgcacccatcgtcctgaccccaaaagccctggactggacagagagcggctgtactggaagctgagccagctgacccacggcatcactgagctgggcccctacaccctggacaggcacagtctctatgtcaatggtttcacccatcagagctctatgacgaccaccagaactcctgatacctccacaatgcacctggcaacctcgagaactccagcctccctgtctggacccatgaccgccagccctctcctggtgctattcacaattaacttcaccatcactaacctgcggtatgaggagaacatgcatcaccctggctctagaaagtttaacaccacggagagagtccttcagggtctgctcaggcctgtgttcaagaacaccagtgttggccctctgtactctggctgcagactgaccttgctcaggcccaagaaggatggggcagccaccaaagtggatgccatctgcacctaccgccctgatcccaaaagccctggactggacagagagcagctatactgggagctgagccagctgacccacagcatcactgagctgggcccctacaccctggacagggacagtctctatgtcaatggtttcacacagcggagctctgtgcccaccactagcattcctgggacccccacagtggacctgggaacatctgggactccagtttctaaacctggtccctcggctgccagccctctcctggtgctattcactctcaacttcaccatcaccaacctgcggtatgaggagaacatgcagcaccctggctccaggaagttcaacaccacggagagggtccttcagggcctgctcaggtccctgttcaagagcaccagtgttggccctctgtactctggctgcagactgactttgctcaggcctgaaaaggatgggacagccactggagtggatgccatctgcacccaccaccctgaccccaaaagccctaggctggacagagagcagctgtattgggagctgagccagctgacccacaatatcactgagctgggcccctatgccctggacaacgacagcctctttgtcaatggtttcactcatcggagctctgtgtccaccaccagcactcctgggacccccacagtgtatctgggagcatctaagactccagcctcgatatttggcccttcagctgccagccatctcctgatactattcaccctcaacttcaccatcactaacctgcggtatgaggagaacatgtggcctggctccaggaagttcaacactacagagagggtccttcagggcctgctaaggcccttgttcaagaacaccagtgttggccctctgtactctggctgcaggctgaccttgctcaggccagagaaagatggggaagccaccggagtggatgccatctgcacccaccgccctgaccccacaggccctgggctggacagagagcagctgtatttggagctgagccagctgacccacagcatcactgagctgggcccctacacactggacagggacagtctctatgtcaatggtttcacccatcggagctctgtacccaccaccagcaccggggtggtcagcgaggagccattcacactgaacttcaccatcaacaacctgcgctacatggcggacatgggccaacccggctccctcaagttcaacatcacagacaacgtcatgcagcacctgctcagtcctttgttccagaggagcagcctgggtgcacggtacacaggctgcagggtcatcgcactaaggtctgtgaagaacggtgctgagacacgggtggacctcctctgcacctacctgcagcccctcagcggcccaggtctgcctatcaagcaggtgttccatgagctgagccagcagacccatggcatcacccggctgggcccctactctctggacaaagacagcctctaccttaacggttacaatgaacctggtccagatgagcctcctacaactcccaagccagccaccacattcctgcctcctctgtcagaagccacaacagccatggggtaccacctgaagaccctcacactcaacttcaccatctccaatctccagtattcaccagatatgggcaagggctcagctacattcaactccaccgagggggtccttcagcacctgctcagacccttgttccagaagagcagcatgggccccttctacttgggttgccaactgatctccctcaggcctgagaaggatggggcagccactggtgtggacaccacctgcacctaccaccctgaccctgtgggccccgggctggacatacagcagctttactgggagctgagtcagctgacccatggtgtcacccaactgggcttctatgtcctggacagggatagcctcttcatcaatggctatgcaccccagaatttatcaatccggggcgagtaccagataaatttccacattgtcaactggaacctcagtaatccagaccccacatcctcagagtacatcaccctgctgagggacatccaggacaaggtcaccacactctacaaaggcagtcaactacatgacacattccgcttctgcctggtcaccaacttgacgatggactccgtgttggtcactgtcaaggcattgttctcctccaatttggaccccagcctggtggagcaagtctttctagataagaccctgaatgcctcattccattggctgggctccacctaccagttggtggacatccatgtgacagaaatggagtcatcagtttatcaaccaacaagcagctccagcacccagcacttctacctgaatttcaccatcaccaacctaccatattcccaggacaaagcccagccaggcaccaccaattaccagaggaacaaaaggaatattgaggatgcggtgagaagggggtgctcaaccaactcttccgaaacagcagcatcaagagttatttttctgactgtcaagtttcaacattcaggtctgtccccaacaggcaccacaccggggtggactccctgtgtaacttctcgccactggctcggagagtagacagagttgccatctatgaggaatttctgcggatgacccggaatggtacccagctgcagaacttcaccctggacaggagcagtgtccttgtggatgggtattctcccaacagaaatgagcccttaactgggaattctgaccttcccttctgggctgtcatcctcatcggcttggcaggactcctgggagtcatcacatgcctgatctgcggtgtcctggtgaccacccgccggcggaagaaggaaggagaatacaacgtccagcaacagtgcccaggctactaccagtcacacctagacctggaggatctgcaatgactggaacttgccggtgcctggggtgcctttcccccagccagggtccaaagaagcttggctggggcagaaataaaccatattggtcgga

SEQ ID NO: 2026 - DNA, 2784 bp, Homo sapiens
gctggttgtgagtcaccaaggaaggcagcggcagctccactcagccagtacccagatacgctgggaaccttccccagccatggcttccctggggcagatcctcttctggagctgcaattgtgtccggaatttattccttctggtgggttcatggtcttgctgacttcaagaatgaagccgctgacctcgcgagcataattagcatcatcattattctggctggagcaattgcactcatcattggctttggtatttcagaagtctctgtctggctttcagcaatgaagggtttggttgtagaagttccaaggcttcccttagcattgatctttgcttcctgaactgcagggagacactccatcacagtcactactgtcgcctcagctgggaacattggggaggatggaatcctgagctgcacttttgaacctgacatcaaactttctgatatcgtgatacaatggctgaaggaaggtgttttaggcttggtccatgagttcaaagaaggcaaagatgagctgtcggagcaggatgaaatgttcagaggccggacagcagtgtttgctgatcaagtgatagttggcaatgcctctttgcggctgaaaaacgtgcaactcacagatgctggcacctacaaatgttatatcatcacttctaaaggcaaggggaatgctaaccttgagtataaaactggagccttcagcatgccggaagtgaatgtggactataatgccagctcagagaccttgcggtgtgaggctccccgatggttcccccagcccacagtggtctgggcatcccaagttgaccagggagccaacttctcggaagtctccaataccagctttgagctgaactctgagaatgtgaccatgaaggttgtgtctgtgctctacaatgttacgatcaacaacacatactcctgtatgattgaaaatgacattgccaaagcaacaggggatatcaaagtgacagaatcggagatcaaaaggcggagtcacctacagctgctaaactcaaaggcttctctgtgtgtctcttctttctttgccatcagctgggcacttctgcctctcagcccttacctgatgctaaaataatgtgcctcggccacaaaaaagcatgcaaagtcattgttacaacagggatctacagaactatttcaccaccagatatgacctagttttatatttctgggaggaaatgaattcatatctagaagtctggagtgagcaaacaagagcaagaaacaaaaagaagccaaaagcagaaggctccaatatgaacaagataaatctatcttcaaagacatattagaagttgggaaaataattcatgtgaactagacaagtgtgttaagagtgataagtaaaatgcacgtggagacaagtgcatccccagatctcagggacctccccctgcctgtcacctggggagtgagaggacaggatagtgcatgttctttgtctctgaatttttagttatatgtgctgtaatgttgctctgaggaagcccctggaaagtctatcccaacatatccacatcttatattccacaaattaagctgtagtatgtaccctaagacgctgctaattgactgccacttcgcaactcaggggcggctgcattttagtaatgggtcaaatgattcactttttatgatgcttccaaaggtgccttggcttctcttcccaactgacaaatgccaaagttgagaaaaatgatcataattttagcataaacagagcagtcggcgacaccgattttataaataaactgagcaccttctttttaaacaaacaaatgcgggtttatttctcagatgatgttcatccgtgaatggtccagggaaggacctttcaccttgtctatatggcattatgtcatcacaagctctgaggcttctcctttccatcctgcgtggacagctaagacctcagttttcaatagcatctagagcagtgggactcagctggggtgatttcgccccccatctccgggggaatgtctgaagacaattttggttacctcaatgagggagtggaggaggatacagtgctactaccaactagtggatagaggccagggatgctgctcaacctcctaccatgtacaggacgtctccccattacaactacccaatccgaagtgtcaactgtgtcagggctaagaaaccctggttttgagtagaaaagggcctggaaagaggggagccaacaaatctgtctgcttcctcacattagtcattggcaaataagcattctgtctctttggctgctgcctcagcacagagagccagaactctatcgggcaccaggataacatctctcagtgaacagagttgacaaggcctatgggaaatgcctgatgggattatcttcagcttgttgagcttctaagtttctttcccttcattctaccctgcaagccaagttctgtaagagaaatgcctgagttctagctcaggttttcttactctgaatttagatctccagaccctgcctggccacaattcaaattaaggcaacaaacatataccttccatgaagcacacacagacttttgaaagcaaggacaatgactgcttgaattgaggccttgaggaatgaagctttgaaggaaaagaatactttgtttccagcccccttcccacactcttcatgtgttaaccactgccttcctggaccttggagccacggtgactgtattacatgttgttatagaaaactgattttagagttctgatcgttcaagagaatgattaaatatacatttcctacacca

SEQ ID NO: 2027 - DNA, 406 bp, Homo sapiens
atgtggaatcaattattcctttatatgttcataagtacaaaatttcactatcttaattacttccaaacaaacaatttccaagcaagggtatgtgtgcctggtttttctgctcctccaattctaagatcgttatttgtttgccttctgtttctcacccaaaaatacagatggttgggaaagatacatcttattgagttgtcctatgcagtctctgtctatatttgcatttctttctattcctatcttgccttttttttttttttttacacagatttggttttcccttccctttgtgaaaaccagaattgagcagcattgtacatcagagatggtacccaggaaatgtctttgttcctcagtatttttcgtcaaaacttccatgcaaagacagtcccagcaaagttga

SEQ ID NO: 2028 - DNA, 13739 bp, Homo sapiens
gccgctccgggtacctgagggacgcgcggccgcccgcggcaggcggtgcagcccccccaccccttggagccaggcgccggggtctgaggatagcatttctcaagacctgacttatggagcacttgtaacctgagatatttcagttgaaggaagaaatagctcttctcctaagatggaatctgtggtttgggaatgtggttgatcaacttgatatgttggccaaatgtgccccatgtaataaaatgaaaagaagagacaagatgatgtcattttcccatattgtgaaaccaaaaacaaacgccttttgtgagaccaagctaacaaacctctgacggtgcgaagagtatttaactgtttgaagaatttaacagtaagatacagaagaagtaccttcgagctgagacctgcaggtgtataaatatctaaaatacatattgaataggcctgatcatctgaatctccttcagacccaggaaggatggctatgacttggattgtcttctctctttggcccttgactgtgttcatggggcatataggtgggcacagtttgttttcttgtgaacctattaccttgaggatgtgccaagatttgccttataatactaccttcatgcctaatcttctgaatcattatgaccaacagacagcagctttggcaatggagccattccaccctatggtgaatctggattgttctcgggatttccggccttttctttgtgcactctacgctcctatttgtatggaatatggacgtgtcacacttccctgtcgtaggctgtgtcagcgggcttacagtgagtgttcgaagctcatggagatgtttggtgttccttggcctgaagatatggaatgcagtaggttcccagattgtgatgagccatatcctcgacttgtggatctgaatttagctggagaaccaactgaaggagccccagtggcagtgcagagagactatggtttttggtgtccccgagagttaaaaattgatcctgatctgggttattcttttctgcatgtgcgtgattgttcacctccttgtccaaatatgtacttcagaagagaagaactgtcatttgctcgctatttcataggattgatttcaatcatttgcctctcggccacattgtttacttttttaacttttttgattgatgtcacaagattccgttatcctgaaaggcctattatattttatgcagtctgctacatgatggtatccttaattttcttcattggatttttgcttgaagatcgagtagcctgcaatgcatccatccctgcacaatataaggcttccacagtgacacaaggatctcataataaagcctgtaccatgctttttatgatactctatttttttactatggctggcagtgtatggtgggtaattcttaccatcacatggtttttagcagctgtgccaaagtggggtagtgaagctattgagaagaaagcattgctgtttcacgccagtgcatggggcatccccggaactctaaccatcatccttttagcgatgaataaaattgaaggtgacaatattagtggcgtgtgttttgttggcctctacgatgttgatgcattgagatattttgttcttgctcccctctgcctgtatgtggtagttggggtttctctcctcttagctggcattatatccctaaacagagttcgaattgagattccattagaaaaggagaaccaagataaattagtgaagtttatgatccggatcggtgttttcagcattctttatctcgtaccactcttggttgtaattggatgctacttttatgagcaagcttaccggggcatctgggaaacaacgtggatacaagaacgctgcagagaatatcacattccatgtccatatcaggttactcaaatgagtcgtccagacttgattctctttctgatgaaatacctgatggctctcatagttggcattccctctgtattttgggttggaagcaaaaagacatgctttgaatgggccagtttttttcatggtcgtaggaaaaaagagatagtgaatgagagccgacaggtactccaggaacctgattttgctcagtctctcctgagggatccaaatactcctatcataagaaagtcaaggggaacttccactcaaggaacatccacccatgcttcttcaactcagctggctatggtggatgatcaaagaagcaaagcaggaagcatccacagcaaagtgagcagctaccacggcagcctccacagatcacgtgatggcaggtacacgccctgcagttacagaggaatggaggagagactacctcatggcagcatgtcacgactaacagatcactccaggcatagtagttctcatcggctcaatgaacagtcacgacatagcagcatcagagatctcagtaataatcccatgactcatatcacacatggcaccagcatgaatcgggttattgaagaagatggaaccagtgcttaatttgtcttgtctaaggtggaaatcttgtgctgtttaaaaagcagattttattctttgccttttgcatgactgatagctgtaactcacagttaacatgctttcagtcaagtacagattgtgtccactggaaaggtaaatgattgcttttttatattgcatcaaacttggaacatcaaggcatccaaaacactaagaattctatcatcacaaaaataattcgtctttctaggttatgaagagataattatttgtctggtaagcatttttataaacccactcattttatatttagaaaaatcctaaatgtgtggtgactgctttgtagtgaactttcatatactataaactagttgtgagataacattctggtagctcagttaataaaacaatttcagaattaaagaaattttctatgcaaggtttacttctcagatgaacagtaggactttgtagttttatttccactaagtgaaaaaagaactgtgtttttaaactgtaggagaatttaataaatcagcaagggtattttagctaatagaataaaagtgcaacagaagaatttgattagtctatgaaaggttctcttaaaattctatcgaaataatcttcatgcagagatattcagggtttggattagcagtggaataaagagatgggcattgtttcccctataattgtgctgtttttataacttttgtaaatattactttttctggctgtgtttttataacttatccatatgcatgatggaaaaattttaatttgtagccatcttttcccatgtaatagtattgattcatagagaacttaatgttcaaaatttgctttgtggaggcatgtaataagataaacatcatacattataaggtaaccacaattacaaaatggcaaaacattttctctgtattcattgttgtatttttctacagtgagatgtgatcttgccaaagccaccagaccttggcttccaggccctcctgtagtgagttgattgtctgcacttgccttgcccaatagccagtaggctacagcttttgccccacacccttattttcagattctggatcattcttgtttacaactgaaatatatataacctcagtccaaagtggtgattgatttgagtatttgaaaattgttgtagctaaatgaagcatgattagtcttagtatgaatatcatttaatctttaaaaaatcaagtaaaaatgtttatctgataatgtttaaataatttacaatataaactgtaaaacttattaggcatgaaatcaatcagaagagaaagaaaaatgctggaacatgcttgatgtattatgtaaaaagcatatttaaacaagggtcctcaaccctgactgcagataagaatcacttgggttacttcagatgcctaacaccttcctctcatacaaataagaattggtagctttcttaaaaaaaaaaaaaaaaaaaaaaagcgctccaggtgattctaatctgcagcctggcttgaaactcactactttaacttgcccctgatgatctgtcggcatcatatatcacatgaacatccacatggattctgtctttcgcttttatatcattatctaatattcagttgttctgcacctgatgccaaattctgggctgtactcctagagagacttactcagtaaggccaaagtgataggactttaaaatctgtagttataaaaataccgcaggtgattcttacggaggtaatccaagaatcatactttgaagaattattctagactctgaagaggcctggctctgccttatgctattatagtttatgacctttaacaatttaactctccgagcctcagttcccttgtttgtaaatgaagatagaagataaatacgtactctacctacctcacaaagctgtcagattaagatcaagtgaaaaaaattatgtgaaagctctttgaaaactgtaaagcattatgaatgataagggattaggttattgtggatttaagaggtgtgaggactgctatagtacattccttgacgtgtgttgaattcatgtatactttctttcttaccctttaaaacaaactgccaagaaattaggtgttgaaaaagaatattctcatcaggcagcaaagtcagttttctgatagtaataatttgtctattatgttatatatttcaaagtacatgtatgataatatgacttattcttcatgagagatatttgaatatttggcccaaaatgtttttcatttttctctgtgttcattgcctttctccttggagctggagttaatgctcaaagcaggcaggtctgaattccctcataaccgacaattagtaaacattttctctgaaagccaaacatataacaacttatttatcaataattcatgaagcttttgtctgagaatctctcctgcaaacagcatgagagaactaaaacaaacattcacaaacaaaaataagttaaaatagaaggtaccagtttgggctcgaagatgttgtcatccattgccatctgcattatattatcaactgccaaaatgttaattggttttcttttacaagtgggccaagtatagacagttaagtgaacatcactatgaaaatcttaactttgtgcttctagatttttagataatcatttgtattttctctattaaattgtgggtatgtatgggaatactatattgacttttcagttactttcagtaagtatcttaattttgtcccacaaaatttatgtaatattaatccatggttttaaacaacagtattcagtttgggcagcagttttaagtctaactagcttaaaccaatctgaataagtctggacagttttcctaccatatgtttaactttgattggcatatgataatgtttagtgttttcttttttcagttgacaactgagaaaataatagttctctctaacatgttaatatattatcaaaaggttttcaaaaagtactttgatttcagcaactttttttattcaataactagacaaaagatctaagataatattaaactcaaaacagtttgtttcaaagaacaattggttaataactcagctggcacagggattcatacacagtttttcaataaatatttaaatgaacaattcatgtcacacaacttgcttttaccctagtactgagtctcacatcaaagaaatttgaaagatctataacctatgtgaaatgaagtctctgctttaccagaataatatgtggcaggtaataaatatgtaaagtacaccaaatgaaacatattttgcatagataacagtccatatcactattataattaaagaaatatatgtacagacatgtaccaatccttttaattaattttagaagatgaacagtgattcttagaagtgagtaattagactccttttagtcttatgctgttagatctttgtggaccagctgagtaaatgaatcttcaaatcaacctttctttttctgctgctcttagagcagatttataaaaatcctaagaatgtcttcaaattagaaaaatttactacattttaacctacctcatcagtttctttgtgataatagctgaaaataactcaaactgtacccatcttagttaggctatatctctgtgaaatgaaaggaaccacttaattttttttatataaattagtgaatcatttgctggagcttagaaaatattaacataccaaaatttcattatgatgatatttatattgctttttgacatgccaaaggtacatttacatattaccatatttggatgacttacatagtctggtgtaatgaaaattcccctgggattggaattttaagactcatgatgtcaactgggctggtcattttatttctctgagtctttgtttcttcaatgtaaaatgtggataaggtaatttttggttttagcctccctcactggatattgtaaggatcaaatgaaatagtatttattataatgctctgtaacccataaattattctacttaaaaaaattttttatagagacagggtcttgctctgtcacacaggctggagagcagtggcataatcatagttcattataaccttgaactcctaggctcaagcagtcctccagcttcagcctcccaagtagctaagactgtaggcatgcaccactacacctggctaattttaatttttttttctttttttgagacggagtctggctttgttgcccaggctggagtgcagtggcacaatctcagctcactgcaacctccacctcccaggttcaagtgattcttctgtctcagcctcccgagtaactgggactacaggtgcgtgccaccacatccagctagtttttgtatttttagtggagatggagttttgccatgttggtctcaaactcctgacctcaagtgatctgcccacctcagcctcccaaagtgctaggattacaggcatgagtcactgcacctggcttaattttaatttttttaattttttgtagagatgagtctcactatgttgaccaggctggtcttgaactcctggcctcctaaagcactgggattacaagcatgagccaccatgcctgatccataaattgttctactgataccatttggttttgttagaatttgggggggctatagaaaacaaggttacagtcttcattagtatttctttttagcaataacaacaaaataggcaattagaccagtgttcatttggtacagtctttaaatcggtcatccaattaacctttaaaaagtaggttatgctcttaaattgtattggttctttaatatgtgttataccagagtatgcctcaaattttatgtagttgaatttgtagaacaaatttggggatattcattttatttttccttttatatgaaattgtataagtacattagcttgacttaaattataaaaaaaaatatatatgaagaagaatgtagaccctataatgttttttgtctttgactttttggcttttatgtacctcattttttctgattgagaaaaagttttgaaaaagtgattcacttgttggttttcattgtggcaaaactttaaattttaagtcatcacactatgagaattgtttgtacacatttataatttttttaaagtatgtaaagtaaggattttttctccattcttcactcacaaaggatagcatttttatggaacctagatttacaaaggaacttgtgattcttttcaatgcttttgtgtcgttttacagctgattaagaaaaaatgtttacatttaattcagctgtatttcctagtagctgtataatcttacacattattcttatataattttgacctattttatatgaaaataattgtattggcatctcttcataatttaattctcttctctccttcttttgttccgattagatgaatttgggaaaggagtaggaagactaggtatcgcatgccttccgtctgattgtaatcagtctcctgggttttttactaatttaatcttaatcctgtgcttctttagtcatcaaattgatataggattacaattttctctcaggatccaagtcttctaagaatgaaaatgttgaagtctacccagaaccagccatccttgtagacatttctatttggttgatttataaagatttaatatataaagatttaatatgagttaaacatgtttcttattctgtgatctctaattagaaagtaaaattctgttgccataaatataaaagaaagttttcacttatattttagtcaaacaccaaaccactgcattacttacttcctataagacacagtagttcaatctgttgaaaggcattgaaggataatttccttcagattactttttaaatcatcatctgcctcaggaaattctttcttgaatttttttgttggtgtgaaagcgttgcttatactttatgctcattttattggtcactgtcaccagtttttcccgataaagattaaaaatgttttttaccttgaaataattcagattttgaagattcactgtttcattattttgctaattaccattaactagtaaagttagtttttaaagtttttttaaggttgatattttatcatattcctggagtaggatggattactttattattattgtagctttaaggttttttgttgtataagtcagcttgtttgtatatgctaaattgcagatatttctttgtgttgtgcttattggtttttttttttaacttagagcttaataatttctattttctatcctggagtctaaaattaaacaaaaaaatctattttctaaattggcaggatttttttaatgattagtaaaactgtattattttatttttaaaaatacaataggattttgagtcaggaaacttgacttctactcttgcctctcttttgcagttagctgtgtaactttggataaggcattttatctcgtggtgcctccatttttctcattctctagggaacaagagaattagtttaggtagcgtctaaaattccgcccagctctcatttggttctcatttgaccattttataatcattattttggtctcatttttattcttcttattcatcccatgaactagatcaacttgtattattttactagatcaacctgtattattaacgtcatttacatgtaaattgatgggattcagatattttatcaactgtttttccattagtgattttaagtaattttaaagaaggaaaattatattacagataataaaaatgaaagaaagttataaatattggacatggcttttttaaatgggaaagtcttcttaagcaccaatataagcaccttaaattgatacatagaaaagaatgacataacgttttgtggtctttgttctcttaaatatgaatatagctagttagcctaaaatttacacaaaatgtattcaagatcaaattagtgaacaaagcaatggttcgtatggctaatttaaaagcaattcaatttaccaatattaaaataattataaaatgtaaaagaaatttcagaggagttgattgaaaattttttgttcagtaattattcttaaactgcattcttaggtttattacataaatatagttgccagattgccatgggcaagtgaatgtcttcatttgaaatattattagagatcaatgtggcttgttatttttaatttttttctggctatacagaaaatgtttctggaaaaattccttaattgtcatctgatataatgtagagattgaggccagacgcagtggctcacgcctgtaatcccagcactttgggaggccaaggtgggcagatcacctgaggtcaggagttcgagaccagcctgatgaacatggcaaatccccttctgtactaaaaatacaaaaattagccaggcgcagtggctcacgcctgtaatcccaacactttgggaggccgaggcgggcggatcacgaggtcaggagatcaagaccgtcctggctaacatggtgagaccctgtctctactaaaaacaaaaaaattagttgggcatggtggcgggcacctgtagtcccagccactcgggaggctgaggcaggagaatggcgtgaacccgggaggcggagcttgcagtgagctgagatcgcaccgctgcactccagcctgggcaacggagcgagactctatctcaaaaaaaaaaaaagaaaaaaaaaaaagtagagattgcattagttccatatctccgcagagttctctggtagattaaatgttctctgtgcactaggccaaggaagttcctgttacctttgaaaatcattgtgtttgctctgattgtctacattagctcatatcagtcttttgaacactggttcaaatctgggtgttgggttaggatctgatgagtagagaatagtggaaagttgatataggaaggtatactggtttctggtgtgattctttagctacatttattccttgtcttatgtcatttcactggatcatgtaactgtcctggctttcagaaattatattagatgcccagcctttctcattcagagatgcctgtattattatgttatttcgattgcctaccaaaaaaaaaaaaaaaagaaaaggtttgtttttagttctctgcctctgcaagtctttgtgatcacatttgttaaattgaatctgagattcaaatatttcatttaatattttctgggttttgataatgggatattctgtaagataaagcaagtaatcctagagtgatttactttatgtttagccatccaccattttcctatttctctactcctcccattctccatttttaaaaggaaattaacaaatgtcttcctttatccctgcctcagataatttttccctgaactcatcttgtcagcagaaacatttaatgtgaaataattctgtatttctgagacaagatcaacacagtagttctttacattgagctgaggtgaatgtatacttaaaaatactctattttctttttatatgaacttaaaatttttaaaatcatatatgggactccccaatgtgaaaatattagtctggacattctcttgccatcaggtgctatttctaccttagctgtgagttagactaaatccaaatttcgtatcattcatctttttataatatttaacttccctagaatcaccccatttcatgtctttaaccccaacttccaacaacttttctgcttttattttcaaatgtcaaattgtatttttgtgttttattttctcattgaagtgtaaaagtatcacatatatgaaggaatggctggtttagacatttactttggcatagtaaagattgatattgataccacccaccatcctttcctctagccccagaaagaaaagtttgacaactcaaaaacgattaaattatcttatcttgttatttaatagaacaatggaagctgtttcgtcaaaattaaaatactttaccaaaaaaatacttttttgtattttaatctgatagtgaatttggggattatttatgtaaatgtatcataattaatagtaattatgagttatttcactctctgtaatttgtgatacccaagattcatatttatttaatgtgaggtgttttttgaggcttttttgttttatcttgttttcttaactttttacagtgttgttagattatcgcggtcatctcggcatgtggatcgctcctcctgtagatcagctgttctctcttagagtcaggacaaggaggtttttgctacatggtcgtagttggataatacagcattattctgaactatctgaaattgctggttttattggtcaaaaatgatcagatgctagcaatttcataatagatatattcaagaaggaaccaaactttaaaagatcttttagaataggtatgttaacttctcatcctaaccctatcaatatatcagaggctttatgaaggagactctacagataaccacaaatcttatcaagaaaattctccttaaaaaaagttatcctttattttgttgttaaatttcccagtttttaaaagtgttttatcaaaatgacttcataattgaagcaaataccttttggaagtatatatgttacataagactttcactaaatctgtgcgtaaagcttttataatctgagatattgttatgtattaggtttgtgcaaacctaatataaaagggttcatctgtaagtatcatttagaggcaaaataatttccccctcacatctaatgtggactcaaattttggcaactggaatgttatcctcttggtaggcattctaaattaatgaatactgctatgtggtgtagtaaacaaatttgccataaaatgccatttaaggattttctttttacctttatttcattataaaagtatatgagttgaagatcatataaaaaatatgaaactcctacacaggaaatccccaattttgtgatttaataggttgtaaaaagagttgttccaaattcagactacatctcatcatataaataatattatgaataataagggtaaaagattagccaacaaaagctaatctagtacaccccatagaggtactccaggtgtcttggttttggataaatttttatagtggagaaaggttactttgatctctcaataattgcttggtacacttcttcctaggcaatatgctcatgataccctcttcatgtgacctattcctcaaatgctgcattctccaaaacttccttacctgccttctatcccctagtcattcttatcaatacttccaaaatataacctatctcaagtgttagaaatttgctttaactaatttatattaaagtgttagtgactatagcccttttatctctcttaaagagaaatctgcattaaaagcaaacacattgctgttagctcaaattaatgtcagtgagtagaatcttaagctttaaaacaaaagtggaaataatttaaattagtgttgatgggactattttgaggcaagagataccattaagtgacctagcttggaaatctgccccctttgcccaaacccatgtgatgtctgaaactactgtatattttcaatgaccttgagaaagggagctagtcatttgtatttatgggccttatgaagtcagggcctgctgatcctgttttttaagttcaagcgcaatgcctgaagcatcctagatctccttcaccctcattctacctgacagacagctaggtctgtcttccagctctttctcattgatactacctttacatatgaatactatccatgcttgttaaaaaaaaaaaaagtctttccccattttactgttacaatttttcaagagctataaaggtagaaaaagtattccttttcattattctaaaaaatatgtcatttttaaatagctggcacttagcagtttagttttccaaactttattctgaatcaaattgctgaggtgattctaaatgtctaatgttgatttatcatataaacatctaattagaaagtgtttatgctaaagacttgtattttgtggcattagttcttcatgtttcttttttatatgtttattaaaattgttcacttccaaatgagtggaaaagttgctgttgttgggatgtacagggcaagtgcacttggttagagcatgaactgggaatttcacattctctgatgtgctttgcactctgctcttgtagatttattttgtttacagtagactgatgtcagtttttgtaaatgttttttcttagcactttaactgtgagtgtacaaactgattttaaatgtagtggttgtatattttggttataaattggagatttttaataaaattaaataattctcttttctgtcatta

SEQ ID NO: 2029 - DNA, 4611 bp, Homo sapiens
ctctgttttcatttcagtcttaatgaaaactttctaacttatatctcaagtttcttttcaaagcagtgtaagtagtatttaaaatgttatacttcaagaaagaaagactttaacgatattcagcgttggtcttgtaacgctgaaggtaattcattttttaatcggtctgcacagcaagaactgaaacgaatggggattgaactgctttgcctgttctttctatttctaggaaggaatgatcacgtacaaggtggctgtgccctgggaggtgcagaaacctgtgaagactgcctgcttattggacctcagtgtgcctggtgtgctcaggagaattttactcatccatctggagttggcgaaaggtgtgataccccagcaaaccttttagctaaaggatgtcaattaaacttcatcgaaaaccctgtctcccaagtagaaatacttaaaaataagcctctcagtgtaggcagacagaaaaatagttctgacattgttcagattgcgcctcaaagcttgatccttaagttgagaccaggtggtgcgcagactctgcaggtgcatgtccgccagactgaggactacccggtggatttgtattacctcatggacctctccgcctccatggatgacgacctcaacacaataaaggagctgggctcccggctttccaaagagatgtctaaattaaccagcaactttagactgggcttcggatcttttgtggaaaaacctgtatccccttttgtgaaaacaacaccagaagaaattgccaacccttgcagtagtattccatacttctgtttacctacatttggattcaagcacattttgccattgacaaatgatgctgaaagattcaatgaaattgtgaagaatcagaaaatttctgctaatattgacacacccgaaggtggatttgatgcaattatgcaagctgctgtgtgtaaggaaaaaattggctggcggaatgactccctccacctcctggtctttgtgagtgatgctgattctcattttggaatggacagcaaactagcaggcatcgtcattcctaatgacgggctctgtcacttggacagcaagaatgaatactccatgtcaactgtcttggaatatccaacaattggacaactcattgataaactggtacaaaacaacgtgttattgatcttcgctgtaacccaagaacaagttcatttatatgagaattacgcaaaacttattcctggagctacagtaggtctacttcagaaggactccggaaacattctccagctgatcatctcagcttatgaagaactgcggtctgaggtggaactggaagtattaggagacactgaaggactcaacttgtcatttacagccatctgtaacaacggtaccctcttccaacaccaaaagaaatgctctcacatgaaagtgggagacacagcttccttcagcgtgactgtgaatatcccacactgcgagagaagaagcaggcacattatcataaagcctgtggggctgggggatgccctggaattacttgtcagcccagaatgcaactgcgactgtcagaaagaagtggaagtgaacagctccaaatgtcaccacgggaacggctctttccagtgtggggtgtgtgcctgccaccctggccacatggggcctcgctgtgagtgtggcgaggacatgctgagcacagattcctgcaaggaggccccagatcatccctcctgcagcggaaggggtgactgctactgtgggcagtgtatctgccacttgtctccctatggaaacatttatgggccttattgccagtgtgacaatttctcctgcgtgagacacaaagggctgctctgcggaggtaacggcgactgtgactgtggtgaatgtgtgtgcaggagcggctggactggcgagtactgcaactgcaccaccagcacggactcctgcgtctctgaagatggagtgctctgcagcgggcgcggggactgtgtttgtggcaagtgtgtttgcacaaaccctggagcctcaggaccaacctgtgaacgatgtcctacctgtggtgacccctgtaactctaaacggagctgcattgagtgccacctgtcagcagctggccaagcccgagaagaatgtgtggacaagtgcaaactagctggtgcgaccatcagtgaagaagaagatttctcaaaggatggttctgtttcctgctctctgcaaggagaaaatgaatgtcttattacattcctaataactacagataatgaggggaaaaccatcattcacagcatcaatgaaaaagattgtccgaagcctccaaacattcccatgatcatgttaggggtttccctggctattcttctcatcggggttgtcctactgtgcatctggaagctactggtgtcatttcatgatcgtaaagaagttgccaaatttgaagcagaacgatcaaaagccaagtggcaaacgggaaccaatccactctacagaggatccacaagtacttttaaaaatgtaacttataaacacagggaaaaacaaaaggtagacctttccacagattgctagaactactttatgcatgaaaaaagtctgtttcactgatatgaaatgttaatgcactatttaatttttttctctttgttgcttcaaaatgaggttggtttaagataataataggacatctgcagataagtcatcctctacatgaaggtgacagactgttggcagtttcaaaataatcaagaagagaaatatccttagcaaagagatgactttggggatcatttgaggaatactaactctgttgcattaatgcttcaaaaaatcatcaaatgattcatgggggcctgatttgcatttgaaaaatgtttgaaattagagtctcatttgtttcaggaatgcagctacctgagttttttgtctcggcaaagtcacaaagcccatatactcacattgtgtgtctatacttgccaattaattctaaacttgtaggaaatatgccctctcttaaaggagaattttttttaaatctctgagaaatgagattctgagtttatttcagctaaaaggttgcaattcttctgaagatatctcaaatataaggttgaaagttaagtgttaataatttttgtgaatttatacacacctaaacgttaagtacacaaatattttatttgttttacaaataaggaataagtaatttataaattaagaagttacctataaaaataaaaagataacaaccctatcatatagcttatttttaaattacctgaaaaacgatattctacactgtttcctttttgactctgagttttcaaactgttacttctcccatatttctcaatccatttcactcagttgcacagtcttttaaaccctgtaattgtcataccaaagtttctttttaaaaaaaaattactttaaatgcttagtttattcaaagagcgatccaataatataaaaggaacatgtgttaaacacaataaaattttaaatggctctaaatcaagcacatcaagagtatacaagtcttaaaggctttttaatacatactcttttcccatctatgtaacccaacttgcacatttcagctgcatgtggtgaatatgcatcatatatttactttaagaggtaagattttacttgcaaaatacatgtgcaaattagggatccatcagttgatggaagagatggactctagaatattatttcttgtggttattactcctttacaaagcactttcgtctcacttgatcctcataaggaaactaaggctcagaatgagtagagctgggttcagaatctagctcttctaactccaagccatctcctctttccactgcaggaaactgcctcttttgtcagtgaaataatagaaagattgtgttagttaagtgataactgtcatttgtttgaaaatgttcgagactgaacaaatagcatttaaactgctggcatatagatgagatattgtacttttgtgcaatgtttattacctttgattaaattgtaatgtgaagcttttactaggtgaatagttcattatgtagtggaggcttcgtggttgtccattgaattgtcacagcaaaatctataagtttcttcaattctacaagatagatccatatacctttgatcacttggagactctttttttgctggtttctagataactcaggtaaatcagacctttacagagtacagggctaggtgaaagaattactgaaaaatcaccttgaaaatccgaagggctgatataccctttatgttcctgactgatgcgcagaacctgggggaaatctacagcaatatacaggttgcaatgctgataacacaacagcaatcctctcctctacgtggacttactgttgtttttttaattattattggaatgggattttagaaaatagaagttacctttgtgtgtgttttagggaaggtagagaagaatctgctctttctctgaatactgttttgaccccaggcaggaccttggaaaggccaaaacattaacagtagtacttctgttcactgaagagttatgttacatgaagataaaatggttttgtcgtgtttattattgtattttgtgttgatataaataaacatggtaattt

SEQ ID NO: 2030 - DNA, 1933 bp, Homo sapiens; identical to SEQ ID NO: 529

SEQ ID NO: 2031 - DNA, 1951 bp, Homo sapiens
tgtttgctgtctggacctggctgctgatcctgagcctgctgggagatcttaacgatccccaggagcaacatggggcccaccctagcggttcccaccccctatggctgtattggctgtaagctaccccagccagaatacccaccggctctaatcatctttatgttctgcgcgatggttatcaccatcgttgtagacctaatcggcaactccatggtcattttggctgtgacgaagaacaagaagctccggaattctggcaacatcttcgtggtcagtctctctgtggccgatatgctggtggccatctacccataccctttgatgctgcatgccatgtccattgggggctgggatctgagccagttacagtgccagatggtcgggttcatcacagggctgagtgtggtcggctccatcttcaacatcgtggcaatcgctatcaaccgttactgctacatctgccacagcctccagtacgaacggatcttcagtgtgcgcaatacctgcatctacctggtcatcacctggatcatgaccgtcctggctgtcctgcccaacatgtacattggcaccatcgagtacgatcctcgcacctacacctgcatcttcaactatctgaacaaccctgtcttcactgttaccatcgtctgcatccacttcgtcctccctctcctcatcgtgggtttctgctacgtgaggatctggaccaaagtgctggcggcccgtgaccctgcagggcagaatcctgacaaccaacttgctgaggttcgcaattttctaaccatgtttgtgatcttcctcctctttgcagtgtgctggtgccctatcaacgtgctcactgtcttggtggctgtcagtccgaaggagatggcaggcaagatccccaactggctttatcttgcagcctacttcatagcctacttcaacagctgcctcaacgctgtgatctacgggctcctcaatgagaatttccgaagagaatactggaccatcttccatgctatgcggcaccctatcatattcttctctggcctcatcagtgatattcgtgagatgcaggaggcccgtaccctggcccgcgcccgtgcccatgctcgcgaccaagctcgtgaacaagaccgtgcccatgcctgtcctgctgtggaggaaaccccgatgaatgtccggaatgttccattacctggtgatgctgcagctggccaccccgaccgtgcctctggccaccctaagccccattccagatcctcctctgcctatcgcaaatctgcctctacccaccacaagtctgtctttagccactccaaggctgcctctggtcacctcaagcctgtctctggccactccaagcctgcctctggtcaccccaagtctgccactgtctaccctaagcctgcctctgtccatttcaaggctgactctgtccatttcaagggtgactctgtccatttcaagcctgactctgttcatttcaagcctgcttccagcaaccccaagcccatcactggccaccatgtctctgctggcagccactccaagtctgccttcagtgctgccaccagccaccctaaacccaccactggccacatcaagccagctaccagccatgctgagcccaccactgctgactatcccaagcctgccactaccagccaccctaagcccactgctgctgacaaccctgagctctctgcctcccattgccccgagatccctgccattgcccaccctgtgtctgacgacagtgacctccctgagtcggcctctagccctgccgctgggcccaccaagcctgctgccagccagctggagtctgacaccatcgctgaccttcctgaccctactgtagtcactaccagtaccaatgattaccatgatgtcgtggttattgatgttgaagatgatcctgatgaaatggctgtgtgaaaaatgctctcgtaggtggccaggcagt

SEQ ID NO: 2032 - DNA, 7715 bp, Homo sapiens
atgaaatggaaacatgttccttttttggtcatgatatcactcctcagcttatccccaaatcacctgtttctggcccagcttattccagatcagcagctctggtgttgtttccgacagaccctgaagatgtagagagggggaacgaccacgggacgccaatccccacctctgataacgatgacaattcgctgggctatacagacttcagacgccgctgatccgggaggagctggggtgagccgcggcggccgtctctcccacccgcagcagcatcctctctgcccttctctgccaccccggggagagccgggagctgcctctttacagcttccacgagccaggggtgcaggcagctgcccccaggaagtttgggcttctgcgtagtttaggggtgcctgcgagcgccccagagggcgaggggccgagggcgatgttgggcgccgcgcggggctgggggcgcccagaagacgtgcgagtgtccgcggtcctgctgctgtctccagtaccctccgcatcccccaagtgatgggaacaagggcccgcccaggcagccgctgtcgccgcaccgccccctcgctcgctctctgcgcgcggagtcacccagtcacactcccggcaccccgagcccttcctccggagctgctgcttctactttggctgctatcgccgccgccgcgggtggcccgctgctgactgggctcgccgggagacggagaagcactttttggccctccctcagcagctctcacaccccaactttgccgccgccgccgcgcctgccctcgcagcggcgctcggccgcacattgtgggggcgcacgccgggaggctccgcaagaccgtggaggcaggaaacggcactactgcgcttctgcctcggctctttgttgttcgctttggatggttcttgaaagtgtctgagcctcctcggaaatcctggggccggagaagacaaaccttggaattcttcctctgcaaaagtctctgagatactgacaagcgtccggaaaggtcgacgagtaattgccctgaaaactcttggctaattgacccacgttgcttatattaagcctttgtgtgtggtgtgtggcttcatacatttggggaccctatttccactccctcctcttggcatgagactgtatacaggatccacccgaggacaatgattgcggagcccgctcacttttacctgtttggattaatatgtctctgttcaggctcccgtcttcgtcaggaagattttccacctcgcattgttgaacacccttcagacctgattgtctcaaaaggagaacctgcaactttgaactgcaaagctgaaggccgccccacacccactattgaatggtacaaagggggagagagagtggagacagacaaagatgaccctcgctcacaccgaatgttgctgccgagtggatctttatttttcttacgtatagtacatggacggaaaagtagacctgatgaaggagtctatgtctgtgtagcaaggaattaccttggagaggctgtgagccacaatgcatcgctggaagtagccatacttcgggatgacttcagacaaaacccttcggatgtcatggttgcagtaggagagcctgcagtaatggaatgccaacctccacgaggccatcctgagcccaccatttcatggaagaaagatggctctccactggatgataaagatgaaagaataactatacgaggaggaaagctcatgatcacttacacccgtaaaagtgacgctggcaaatatgtttgtgttggtaccaatatggttggggaacgtgagagtgaagtagccgagctgactgtcttagagagaccatcatttgtgaagagacccagtaacttggcagtaactgtggatgacagtgcagaatttaaatgtgaggcccgaggtgaccctgtacctacagtacgatggaggaaagatgatggagagctgcccaaatccagatatgaaatccgagatgatcataccttgaaaattaggaaggtgacagctggtgacatgggttcatacacttgtgttgcagaaaatatggtgggcaaagctgaagcatctgctactctgactgttcaagttgggtctgaaggtaggaaacctccacattttgttgtgaaaccccgtgaccaggttgttgctttgggacggactgtaacttttcagtgtgaagcaaccggaaatcctcaaccagctattttctggaggagagaagggagtcagaatctacttttctcatatcaaccaccacagtcatccagccgattttcagtctcccagactggcgacctcacaattactaatgtccagcgatctgatgttggttattacatctgccagactttaaatgttgctggaagcatcatcacaaaggcatatttggaagttacagatgtgattgcagatcggcctcccccagttattcgacaaggtcctgtgaatcagactgtagccgtggatggcactttcgtcctcagctgtgtggccacaggcagtccagtgcccaccattctgtggagaaaggatggagtcctcgtttcaacccaagactctcgaatcaaacagttggagaatggagtactgcagatccgatatgctaagctgggtgatactggtcggtacacctgcattgcatcaacccccagtggtgaagcaacatggagtgcttacattgaagttcaaggtaaagtaaatgaatttggagttccagttcagcctccaagacctactgacccaaatttaatccctagtgccccatcaaaacctgaagtgacagatgtcagcagaaatacagtcacattatcgtggcaaccaaatttgaattcaggagcaactccaacatcttatattatagaagccttcagccatgcatctggtagcagctggcagaccgtagcagagaatgtgaaaacagaaacatctgccattaaaggactcaaacctaatgcaatttaccttttccttgtgagggcagctaatgcatatggaattagtgatccaagccaaatatcagatccagtgaaaacacaagatgtcctaccaacaagtcagggggtggaccacaagcaggtccagagagagctgggaaatgctgttctgcacctccacaaccccaccgtcctttcttcctcttccatcgaagtgcactggacagtagatcaacagtctcagtatatacaaggatataaaattctctatcggccatctggagccaaccacggagaatcagactggttagtttttgaagtgaggacgccagccaaaaacagtgtggtaatccctgatctcagaaagggagtcaactatgaaattaaggctcgccctttttttaatgaatttcaaggagcagatagtgaaatcaagtttgccaaaaccctggaagaaggcaacacccagtgccccaccccaaggtgtaactgtatccaagaatgatggaaacggaactgcaattctagttagttggcagccacctccagaagacactcaaaatggaatggtccaagagtataaggtttggtgtctgggcaatgaaactcgataccacatcaacaaaacagtggatggttccaccttttccgtggtcattccctttcttgttcctggaatccgatacagtgtggaagtggcagccagcactggggctgggtctggggtaaagagtgagcctcagttcatccagctggatgcccatggaaaccctgtgtcacctgaggaccaagtcagcctcgctcagcagatttcagatgtggtgaagcagccggccttcatagcaggtattggagcagcctgttggatcatcctcatggtcttcagcatctggctttatcgacaccgcaagaagagaaacggacttactagtacctacgcgggtatcagaaaagtcccgtcttttaccttcacaccaacagtaacttaccagagaggaggcgaagctgtcagcagtggagggaggcctggacttctcaacatcagtgaacctgccgcgcagccatggctggcagacacgtggcctaatactggcaacaaccacaatgactgctccatcagctgctgcacggcaggcaatggaaacagcgacagcaacctcactacctacagtcgcccagctgattgtatagcaaattataacaaccaactggataacaaacaaacaaatctgatgctccctgagtcaactgtttatggtgatgtggaccttagtaacaaaatcaatgagatgaaaaccttcaatagcccaaatctgaaggatgggcgttttgtcaatccatcagggcagcctactccttacgccaccactcagctcatccagtcaaacctcagcaacaacatgaacaatggcagcggggactctggcgagaagcactggaaaccactgggacagcagaaacaagaagtggcaccagttcagtacaacatcgtggagcaaaacaagctgaacaaagattatcgagcaaatgacacagttcctccaactatcccatacaaccaatcatacgaccagaacacaggaggatcctacaacagctcagaccggggcagtagtacatctggtaaggagtcaggggcacaagaaaggggcaagaacacccaaggtaccaaaacagggtggcatgaactgggcagacctgcttcctcctcccccagcacatcctcctccacacagcaatagcgaagagtacaacatttctgtagatgaaagctatgaccaagaaatgccatgtcccgtgccaccagcaaggatgtatttgcaacaagatgaattagaagaggaggaagatgaacgaggccccactccccctgttcggggagcagcttcttctccagctgccgtgtcctatagccatcagtccactgccactctgactccctccccacaggaagaactccagcccatgttacaggattgtccagaggagactggccacatgcagcaccagcccgacaggagacggcagcctgtgagtcctcctccaccaccacggccgatctcccctccacatacctatggctacatttcaggacccctggtctcagatatggatacggatgcgccagaagaggaagaagacgaagccgacatggaggtagccaagatgcaaaccagaaggcttttgttacgtgggcttgagcagacacctgcctccagtgttggggacctggagagctctgtcacggggtccatgatcaacggctggggctcagcctcagaggaggacaacatttccagcggacgctccagtgttagttcttcggacggctcctttttcactgatgctgactttgcccaggcagtcgcagcagcggcagagtatgctggtctgaaagtagcacgacggcaaatgcaggatgctgctggccgtcgacattttcatgcgtctcagtgccctaggcccacaagtcccgtgtctacagacagcaacatgagtgccgccgtaatgcagaaaaccagaccagccaagaaactgaaacaccagccaggacatctgcgcagagaaacctacacagatgatcttccaccacctcctgtgccgccacctgctataaagtcacctactgcccaatccaagacacagctggaagtacgacctgtagtggtgccaaaactcccttctatggatgcaagaacagacagatcatcagacagaaaaggaagcagttacaaggggagagaagtgttggatggaagacaggttgttgacatgcgaacaaatccaggtgatcccagagaagcacaggaacagcaaaatgacgggaaaggacgtggaaacaaggcagcaaaacgagaccttccaccagcaaagactcatctcatccaagaggatattctaccttattgtagacctacttttccaacatcaaataatcccagagatcccagttcctcaagctcaatgtcatcaagaggatcaggaagcagacaaagagaacaagcaaatgtaggtcgaagaaatattgcagaaatgcaggtacttggaggatatgaaagaggagaagataataatgaagaattagagggaaactgaaagctgaagacaaccaagaggcttatgagatctaatgtgaaaatcatcactcaagatgcctcctgtcagatgacacatgacgccagataaaatgttcagtgcaatcagagtgtacaaattgtcgtttttattcctcttattgggatatcattttaaaaactttattgggtttttattgttgttgtttgatccctaaccctacaaagagccttcctattcccctcgctgttggagcaaaccattataccttacttccagcaagcaaagtgctttgacttcttgcttcagtcatcagccagcaagagggaacaaaactgttcttttgcattttgccgctgagatatggcattgcactgcttatatgccaagctaatttatagcaagatattgatcaaatatagaaagttgatattcaacctcacaagggctctcaaagtataatctttctatagccaactgctaatgcaaattaaaacatatttcattttaacatgatttcaaaatcagtttttcatactaccctttgctggaagaaactaaaaatatagcaaatgcagaaccacaaacaattcgaatggggtagaaacattgtaaatatttactctttgcaaaccctggtggtattttattttggcttcatttcaatcattgaagtatattcttattggaaatgtacttttggataagtagggctaagccagttggatctctggttgtctagtcattgtcataagtaaacctagtaaaaccttgttctatttttcaatcatcaaaaagtaattataaatacgtattacaaacaagtggatgtttttaatgaccaattgagtaagaacatccctgtcttaactggcctaaatttcttctggtagtgtcagttcaactttcagaagtgccacttaaggaagtttgatttttgtttttgtaatgcactgtttttaatctctctctctttttttttttttttttggttttaaaagcacaatcactaaactttatttgtaaaccattgtaactattaaccttttttgtcttattgaaaaaaaaaatgttgagaagcgtttttaacctgttttgttaatgctctatgtttgtatttggaatatttgaataatgacagatggtgaagtaacatgcatactttattgtgggccatgaaccaaatggttcttacttttcctggacttaaagaaaaaaagaggtttaagtttgttgtggccaatgtcgaaacctacaagatttccttaaaatctctaatagaggcattacttgctttcaattgacaaatgatgccctctgactagtagatttctatgatccttttttgtcattttatgaatatcattgattttataattggtgctatttgaagaaaaaaatgtacatttattcatagatagataagtatcaggtctgaccccagtggaaaacaaagccaaacaaaactgaaccacaaaaaaaaaggctggtgttcaccaaaaccaaacttgttcatttagataatttgaaaaagttccatagaaaaggcgtgcagtactaagggaacaatccatgtgattaatgttttcattatgttcatgtaagaagccccttatttttagccataattttgcatactgaaaatccaataatcagaaaagtaattttgtcacattatttattaaaaatgttctcaaatac

SEQ ID NO: 2033 - DNA, 4969 bp, Homo sapiens
ccaccgactcctgcccgcctcaacacaatgccttacctgtgaagcttgaggccactcaagttccaaatttgtgacaaatcccccagggctcactggagtggcagatatagacctgcagctaactggatttgatttataagagagaaatctgcagtcaatgcccactcttgccacactgctaatatggaaaacagaatgttcaataggatatggtctgataaatagtgatgattgaagatgctgctccaatacatgtgaaatcaatgggagatatctgctgtctgaagatctttcagagcttttctcgacaagctcccctgtaagaaatcggaggtatattctaccattatacagtctttctcaagtggatataaatacgtttgcctcactgtaaccagacaactagacaactaatgtgggaccatggcactgcccagatgcacgtggccaaattatgtttggagagcagtgatggcatgcttggtacaccggggattgggtgccccattgactctctgtatgttgggatgtttgcttcaggctggccatgtgctatcacaaaaattggatgatgtggacccactggtggctaccaactttggaaagataagagggattaagaaggaactcaataatgaaattttggggcctgttattcaatttcttggggttccatatgcagccccaccaacaggggaacgtcgttttcagcctccagaaccaccatctccctggtcagatatcagaaatgccactcaatttgctcctgtgtgtccccagaatatcattgatggcagattgccagaagtcatgcttcctgtgtggtttactaataacttggatgtggtttcatcatatgtgcaagaccagagcgaagactgcctatatttaaatatatatgtcccgactgaggatggtgacctgactatgctgaggcaggagaatagcttgaacccaagaaggcagaatattcgggacagtgggggtcccaaaccagtgatggtgtatatccatggtggctcatatatggaaggtactggaaatttatatgatggaagtgtcttggcaagttatggcaatgtgatcgtcatcacagtcaactatcgacttggagtactcggtttcttgagtacaggcgatcaggctgcaaaggggaactatggactccttgatctcatacaagctttaagatggactagtgaaaacattggattctttggtggtgaccccttaagaatcactgtttttggatctggtgctgggggttcatgtgtcaacctgctgactttatcccattattctgaaggtaaccgttggagcaattcaaccaaaggactttttcaacgagcaatagctcaaagtggaacagccctttccagctgggctgttagttttcaacctgcaaaatatgctagaatgttggccacaaaagttggttgcaatgtttcagatacagtagagttagtggaatgcctacagaagaagccttacaaagaacttgttgaccaagatattcaaccagctcgataccacatagcctttggacctgtgattgatggtgatgtaataccagacgacccccagatattgatggagcaaggagagtttctcaactatgatataatgttaggagtgaaccaaggggaagggttaaaatttgttgaaaatatagtagatagcgatgatggtatatcagctagtgattttgactttgctgtttcaaattttgttgataatttatatggatatcctgaaggcaaagatgttttgagagaaaccattaagttcatgtatactgactgggctgaccgtcataaccctgaaaccagaagaaagacattactggctttgtttacggaccatcagtgggtggcaccagctgtagccacagcggatcttcactcaaactttggttcacctacgtacttctatgccttttaccatcattgccaaacagatcaggttccagcttgggctgatgcagcccacggagacgaggttccctatgtactgggaatccccatgattggccctacagagttatttccttgcaatttctccaaaaatgatgtgatgctgagtgcagttgtaatgacatactggacaaattttgctaaaactggtgacccaaatcaaccagtccctcaagacacgaaattcattcataccaaacccaaccgttttgaagaagtagcatggaccagatattcccagaaagaccaactttatctccatattggattaaaaccaagagttaaagaacattacagagccaataaggtgaacctctggttggagttggtacctcatctgcataatctcaatgacatttctcagtatacctctacaacaactaaagtgccatcaactgacatcactttcagacctacgagaaaaaattctgtacctgtcacgtcagcctttcccactgccaagcaggatgatcccaaacaacaaccaagtccattttcagtggatcaaagggactactcaacagagctgagtgtcactattgcagttggagcatcactgctgtttctgaacatcttggcctttgcagccctgtactacaaaaaggataagaggagacatgatgttcacaggagatgcagccctcagcgcactactaccaatgatctaacccatgcacaagaagaggaaatcatgtccctccaaatgaagcacactgatttggatcatgaatgtgagtccattcatccacatgaggtggttcttcggaccgcctgtcccccagattacacactagctatgaggaggtcacctgatgatgttcccttaatgacacccaacaccattacaatgattcccaacactataccagggattcagcccttacacacattcaatacatttactggaggacagaacaatactctgccccatccccatccccacccccattcacattcaacaaccagggtatagccagataagagaaacaaactattttttttgatggattgcagtaaacgatcactgaagattccttggctttcaacctacaagacttactatttaaataaggaggaatattatgtgaatatacatatcaagaactttgggggttttgaaaaaaatgaattgtatatatacaaatcaactttaaaaacaaatttcaattgcttgaagcaattgttctgaatgatactttttcattcacattcaagaattaattttttgaagatttaagttacataatggaattaggcatgtggaacaccaaacaggaaagaactatgtctgaaatataaaaaataaaaataaaaaaacaactatgaatatgcacaagggacacaccagtggaatgtcagataattttcaccagtttttatttggagccgttttattgtgtagaccatatttacatatttggataagtacacaaagcgtcaatgctgttaatggccttagcaaaggctcatgctgaaatttgccagtaaaacaaagaagtttaaagactggcaggtacaccattatcacataagtgctgtcagtataaagttgtggggataaaggaaactggatatttttagcacgatgtgcatgataatttatatgcttggtggctgtgctgctgattaagccgtaattaaaattcttctcatcccattggagtttttaatagaagcttcctccatcaattggcagaacctaaagaagattttaaggggcaaaagtaattacaataaaataattcacagtagtttcaatatagaaggaattagctattaaaggtatttgaagaaactataggtatagtggtgaatactcgctgatatgaatcccagaaaaaaatttcctgtttttaatgttcttttcaatcccatctagataatttatagaaatataaccctaattggacatgtggtacaggatctataagttgctgtgtttttttgttactctgtattttgttccttttggtaaggtgaagtgtgtccaaagagttacttgcaacagtctttcatgatatgaggatgcccccgtattaccactctgattatagttctgagttctttgatttactcatgctgcatgacaaaatgtttactaataacaattcattataaagttatatccctctttacatcacttatctttctcactgaggttcattcactggaatttactcacgcaatctcagtagagtacaacgtagatacagaacctaggagagtcaacatctggaggattttagtctttcttacacatatgtgtgattttaaacgaatattctcagaccacaggaaactcttcatccccctgttgtttaccagtaacagtatatcacagacctttccaaatgtttgtatatgtaatcagatgtacatttatattgaaaaacaaatgagatggacttaaagagcacatcctgataaatactttctctctcacctgtactatatttctattagactaaagttatgtgattttttttttacattttttcagatgactagcaattttgatagtttataagataatgcaaagaactttctctgacaaactaactgcagtaacagaaacctttcttttcagttactctttttcaagaatgaaagattattatacaaaaaattgtatactacttgatggaaccaactttgtacatcttggccatgtcactggtcattgtgtgaaataaagataatctggataatgactattagtccaatgctaagaaacatgatctttgctcattaaagagctaaaatgtttattgctgttttgtctttcttttttctaaaaaaagaaaaaaaagaaaaaaaggaaaagaagaacaaagaaacatgactgtctcaaagagtaatttttctagattagaccagtcaggtttttgaagacatataggtaacttccacagaaaacacaaacatgtatttaaaggcaagtctcatctaagatgaaactcataaaaattatttaatgtttgttatgaatttaaaag

SEQ ID NO: 2034 - DNA, 1012 bp, Homo sapiens; identical to SEQ ID NO: 53

SEQ ID NO: 2035 - DNA, 4037 bp, Homo sapiens; identical to SEQ ID NO: 2023

SEQ ID NO: 2036 - DNA, 2053 bp, Homo sapiens
ctgaagagccggtgcagagcgggcggcggcggcggcggcagcggaggcggcggctccagccggcgcggcgcgaggctcggcggtgggatccggcgggcggtgctagctccgcgctccctgcctcgctcgctgccgggggcggtcggaaggcgcggcgcgaagcccgggtggcccgagggcgcgactctagccttgtcacctcatcttgcccccttggttttggaagtcctgaagagttggtctggaggaggaggaggacattgatgtgcttggtgtgtggccagtggtgaagagatggctgctcctgtcccgtgggcctgctgtgctgtgcttgccgccgccgccgcagttgtctacgcccagagacacagtccacaggaggcaccccatgtgcagtacgagcgcctgggctctgacgtgacactgccatgtgggacagcaaactgggatgctgcggtgacgtggcgggtaaatgggacagacctggcccctgacctgctcaacggctctcagctggtgctccatggcctggaactgggccacagtggcctctacgcctgcttccaccgtgactcctggcacctgcgccaccaagtcctgctgcatgtgggcttgccgccgcgggagcctgtgctcagctgccgctccaacacttaccccaagggcttctactgcagctggcatctgcccacccccacctacattcccaacaccttcaatgtgactgtgctgcatggctccaaaattatggtctgtgagaaggacccagccctcaagaaccgctgccacattcgctacatgcacctgttctccaccatcaagtacaaggtctccataagtgtcagcaatgccctgggccacaatgccacagctatcacctttgacgagttcaccattgtgaagcctgatcctccagaaaatgtggtagcccggccagtgcccagcaaccctcgccggctggaggtgacgtggcagaccccctcgacctggcctgaccctgagtcttttcctctcaagttctttctgcgctaccgacccctcatcctggaccagtggcagcatgtggagctgtccgacggcacagcacacaccatcacagatgcctacgccgggaaggagtacattatccaggtggcagccaaggacaatgagattgggacatggagtgactggagcgtagccgcccacgctacgccctggactgaggaaccgcgacacctcaccacggaggcccaggctgcggagaccacgaccagcaccaccagctccctggcacccccacctaccacgaagatctgtgaccctggggagctgggcagcggcgggggaccctcggcacccttcttggtcagcgtccccatcactctggccctggctgccgctgccgccactgccagcagtctcttgatctggagcccggcaccccatgaggacatgcagagcacctgcagaggagcaggaggccggagctgagcctgcagaccccggtttctattttgcacacgggcaggaggaccttttgcattctcttcagacacaatttgtggagaccccggcgggcccgggcctgccgccccccagccctgccgcaccaagctggccctccttcctccctcaggggaggtgggccatgcagctaacccacccaccaaagaccccctcaccctggccccttgggctggaccctccaatgccagcgactcccaggagcccttgggggacgtgaggggagcctctcacatccgatttctcctcctgccccagcctcctgtctatcccagggtctctgttgccaccatcagattataagctcctgatgctgggggggcccagccatccccctccccccagcacccacaattttcagtcccctcccctctgccctgttttgtatacccctcccctgaccctgctcctatcccacagtatttaatgccctgtcagtcccttctagtctgactcaatggtaacttgctgtatttgaattttttatagatgtatatacagggtggggggagtgggcggttctcattaaacgtcaccatttcatgag

SEQ ID NO: 2037 - DNA, 7859 bp, Homo sapiens
tttttttttttttttcctaatttttggtcggcggcggtgctgggccaggggaaggaagggacacggaggccgccctcgtcccgccacctcctacccgcttccccccagccccggctccgggagatgtgccgggcggggggcccgggttcgccgagccgcaggagagacacgctgggccgaccccagagaggcgctggacaggctggtggtccaggccgtggtgcctgccaggtgatgtggggcaaagccccccgcacaggccactgagagctccggacacgcacccggctgccaccatggcccgcctagccgcagtgctctggaatctgtgtgtcaccgccgtcctggtcacctcggccacccaaggcctgagccgggccgggctcccgttcgggctgatgcgccgggagctggcgtgtgaaggctaccccatcgagctgcggtgccccggcagcgacgtcatcatggtggagaatgccaactacgggcgcacggacgacaagatttgcgatgctgaccctttccagatggagaatgtgcagtgctacctgccggacgccttcaagatcatgtcacagaggtgtaacaaccgcacccagtgcgtggtggtcgccggctcggatgcctttcctgacccctgtcctgggacctacaagtacctggaggtgcagtacgactgtgtcccctacaaagtggagcagaaagtcttcgtgtgcccagggaccctgcagaaggtgctggagcccacctcgacacacgagtcagagcaccagtctggcgcatggtgcaaggacccgctgcaggcgggtgaccgcatctacgtgatgccctggatcccctaccgcacggacacactgactgagtatgcctcgtgggaggactacgtggccgcccgccacaccaccacctaccgcctgcccaaccgcgtggatggcacaggctttgtggtctacgatggtgccgtcttctacaacaaggagcgcacgcgcaacatcgtcaagtatgacctacggacgcgcatcaagagcggggagacggtcatcaataccgccaactaccatgacacctcgccctaccgctggggcggaaagaccgacattgacctggcggtggacgagaacgggctgtgggtcatctacgccactgagggcaacaacgggcggctggtggtgagccagctgaacccctacacactgcgctttgagggcacgtgggagacgggttacgacaagcgctcggcatccaacgccttcatggtgtgtggggtcctgtacgtcctgcgttccgtgtacgtggatgatgacagcgaggcggctggcaaccgcgtggactatgccttcaacaccaatgccaaccgcgaggagcctgtcagcctcaccttccccaacccctaccagttcatctcctccgttgactacaaccctcgcgacaaccagctgtacgtctggaacaactatttcgtggtgcgctacagcctggagttcgggccgcccgaccccagtgctggcccagccacttccccacccctcagcacgaccaccacagccaggcccacgcccctcaccagcacagcctcgcccgcagccaccaccccgctccgccgggcacccctcaccacgcacccagtgggtgccatcaaccagctgggacctgatctgcctccagccacagccccagtccccagcacccggcggcccccagccccgaatctacacgtgtcccctgagctcttctgcgagccccgagaggtacggcgggtccagtggccggccacccagcagggcatgctggtggagaggccctgccccaaggggactcgaggaattgcctccttccagtgtctaccagccttggggctctggaacccccggggccctgacctcagcaactgcacctccccctgggtcaaccaggtggcccagaagatcaagagtggggagaacgcggccaacatcgccagcgagctggcccgacacacccggggctccatctacgcgggggacgtctcctcctctgtgaagctgatggagcagctgctggacatcctggatgcccagctgcaggccctgcggcccatcgagcgcgagtcagccggcaagaactacaacaagatgcacaagcgagagagaacttgtaaggattatatcaaggccgtggtggagacagtggacaatctgctccggccagaagctctggagtcctggaaggacatgaatgccacggagcaggtgcacacggccaccatgctcctcgacgtcctggaggagggcgccttcctgctggccgacaatgtcagggagcctgcccgcttcctggctgccaaggagaacgtggtcctggaggtcacagtcctgaacacagagggccaggtgcaggagctggtgttcccccaggaggagtacccgagaaagaactccatccagctgtctgccaaaaccatcaagcagaacagccgcaatggggtggtcaaagttgtcttcatcctctacaacaacctgggcctcttcctgtccacggagaatgccacagtgaagctggccggcgaagcaggcccgggtggccctgggggcgcctctctagtggtgaactcacaggtcatcgcagcatccatcaacaaggagtccagccgcgtcttcctcatggaccctgtcatcttcaccgtggcccacctggaggacaagaaccacttcaatgctaactgctccttctggaactactcggagcgttccatgctgggctactggtcgacccaaggctgccgcctggtggagtccaacaagacccataccacgtgtgcctgcagccacctcaccaacttcgctgtgctcatggctcaccgtgagatctaccagggccgcatcaacgagctgctgctgtcggtcatcacctgggtgggcattgtgatctccctggtctgcttggccatctgcatctccaccttctgcttcctgcgggggctgcagaccgaccgcaacaccatccacaagaacctgtgcatcaacctcttcctggctgagctgctcttcctggtcgggatcgacaagactcagtatgagattgcctgccccatcttcgccggcctgctgcactatttcttcctggctgccttctcctggctgtgcctggagggcgtgcacctctacctgctactagtggaggtgtttgagagcgagtattcccgcaccaagtactactacctgggtggctactgcttcccggccctggtggtgggcatcgcggctgccattgactaccgcagctacggcaccgagaaggcctgctggctccgagtggacaattacttcatctggagtttcatcgggccagtctccttcgttatcgtggtcaacctggtgttcctcatggtgaccctgcacaagatgatccgaagctcatctgtgctcaagcccgactccagccgcctggacaacattaaatcctgggcgctgggggccatcgcgctgctgttcctgctgggcctcacctgggctttcggcctcctcttcatcaacaaggagtcggtggtcatggcctatctcttcaccaccttcaacgccttccagggggtcttcatcttcgtctttcactgcgccttacagaagaaggtgcacaaggagtacagcaagtgcctgcgtcactcctactgctgcatccgctccccacccgggggcactcacggatccctcaagacctcagccatgcgaagcaacacccgctactacacagggacccagagccgaattcggaggatgtggaatgacactgtgaggaaacagacggagtcctccttcatggcgggtgacatcaacagcacccccaccctgaaccgaggtaccatggggaaccacctgctgaccaaccccgtgctgcagccccgtgggggcaccagtccctacaacaccctcatcgccgagtcagtgggcttcaatccctcctcgccccctgtcttcaactccccagggagctaccgggaacccaagcaccccttgggaggccgggaagcctgtggcatggacaccctgcccctgaacggcaacttcaataacagttactccttgcgaagtggggatttccctcccggggatgggggccctgagccgccccgaggccggaacctagccgatgcggcggcctttgagaagatgatcatctcagagctggtgcacaacaacctgcgggggagcagcagcgcggccaagggccctccaccgcctgagccccctgtgccacctgtgccagggggcgggggcgaggaagaggcgggcgggcccgggggtgctgaccgggccgagattgaacttctctataaggccctggaggagcctctgctgctgccccgggcccagtcggtgctgtaccagagcgatctggacgagtcggagagctgcacggccgaggacggcgccaccagccggcccctctcctcccctcctggccgggactccctctatgccagcggggccaacctgcgggactcaccctcctacccggacagcagccctgaggggcccagtgaggccctgcccccaccccctcccgcaccccccggcccccccgaaatctactacacctcgcgcccgccagccctggtggcccggaatcccctgcagggctactaccaggtgcggcgtcctagccacgagggctacctggcagccccaggccttgaggggccagggcccgatggggacgggcagatgcagctggtcaccagtctctgagggcacctcatggaccaggggctggtggcccaggccagggagggaaccctgggcagggctctggtgggagagggagacagatggaggcagtggctggtgggccactctctccaggtgcccctcagccatgggccctacagtcccctcaggggactctaacctgggggcctgaggtgccagggttcacagacagggtttcccaccagccacacgcaccagctctatttgggggaagtgtagtgaggaggagcccagaggaccccaggggagtgaggagggagaacttggaagggtgcagcccacttccagactctcccctctcccacccttctaccctgtgaagggaaatgagggctttagtttcctgggcagggaggggcagcttctgaggttgccaaaggcccccactggatggaacctgttagctgctcctctccgcagccagaaatgctgccggctgcacccagagggagcagtgaggcaggacagatggacaggttcctcctgcgctgtaattccctgctccctggagactgggaaaaggccgcagggcagggggactgggcggtggtggctggtggtttaaaggttgaactttctctgaagctcctttccccttgctcttggtccctgccccgcaagcaaacctgccccctctgcctcccagtgcacccaatgaccccctcccttggggcgactcctgatgaagcacaactccccgcagggcccccagcccacaggggtggccatatttgggcagttcccagtcctgtgggctcggctatctggggagcagattttgggtctggatctccctggggagtgggtcctgggcttggatctttccctagggggccctcttactccttcctctctcctcctccttccccattgctgtaaatatttcaacgaaatggaaaagaaaaaaaaaagacaaaaaaaaaaaaaaagaaaagaaaaaaaatctcatcacttgaagccaccgggagcctgcggcccgggccagcccgggctttctccggagcagagcagcgctgctggcctggcagccaggacttctccgtgtacgtgcatccccagtccccgccggggcgggcgggccgccagagcagctttttacaatccagagacagaaaacaaaatctagatgcaacagcgaaacaaagaacccatttccttcctggcaccctcctttcctgctccgcctgcccggcatcatcagcccttctggggcgtgtacctctcactgcctgccccaggaccagaggcctgtctcccccttccctccccaccggcccgggggagacctcttcacacccaaagatgctttgtcaagatggctgcgctgtccctttgagttcctgcttcttgtatattgctctggggactctcgccggggaagatggggctgatttcccacctagagaggttgatggcagaaggaaaatggggaggcactggggttgtggagggcatgggtatggctgaggagggtgctgggaacggcaaggcggtctgggggatggggaggggcaaaggtgagagatcaccttccctatcctccaccttcccgcagggaagacgaagccaggtgccagggctggggtcgggacacccatgttctgggcggcttgaccccaaatcccagaccccggaagctccaggctcgggatgtgtcctgagcacctgtcccggccccctcctctccagcctgtcaggccagcctccccagcccccttccctcaactctaggggcagcatagccccaggccaccctagcccagcccctgcattgccgtttccccagaggtggcccctccacctctgctctgacctctccccatctctctgcccctccttttctcacaagtgccatgagttttcaaacatcttcgggtctcagcctgctgctgccatgaactttgttgggttaagggggaggggctctaggaaggaactggggggaaggggacaggtaggtggctggagggaccctttttgctgctagaaagcccctcccttctcccggggagctggggctggcttgtccccatcaattaggggagaaggggtcagaccaaagatggtggtttgtcccgtgtaagggaacaggtgtggggaagaggtggggttgggttccaactctggctttttctggtagaaaggcctaacccattacaccagaagaccatgggtgaagtctagatggggaggagaagtgaggccagggacagtcttgccagacgactctgaggagggcaagggacagttccatggcccttcccggactgcactaggctgggagctctgttgtgtggaggggtggtcagaggtctgtgaagagcgggcaggaggcatgagcaggcgaggagctggcctgtcccgggaagcagcccagcctgtggctgcccccgacaccaggaggagggccaggagagttccagggggctgaggcacacagagaggccaacttcctccctgcccagccttccttgtatctctccagactcggacaatcaaagggagagagggtgtatcgggtcctgttccagccggcatcgccgggtggcttccaggcctcagagctgtgtggcagggccccctgctggggctggacatcactgcagtccagtgcaaagccgcccccagagcccaggtgtccccccaacctaaccagacctggtgccttgacgcccccaccccagctgggacggtacagagaagggtcttggtttcctctcctactcccttccttaggctcctgaactcgtttgctcctaaatcttgttaattctttttctctggattttggtttcttttggctttcccttgccttcccctttctctgtctccaacactctttccccatgtctttctggctgtctctatgttcctcttctcttatcctcaactttctgtccattcgggcctcctccccacctcccacgccccagcccctccctccttggtctccttttcgatatgccaaaccaattttgggtcgagtgcatttaacgagaacaaaacaaaaggctcataacaacaagaacgtttcagaaaaaaacaaaaagttttaaaaaaattgttgagtcaaaaagtcaaacaataaagaaattaagatttcttggaatgacaaga

SEQ ID NO: 2038 - DNA, 6228 bp, Homo sapiens
ggagttctcagacctccagtttcagccctgccctcagcctccaatccgtaagagacacccagccccagcaattggattgggcagcccgtcttgacacaccactgtgctgagtgcttgaggacgtgtttcaacagatggttggggttagtgtgtgtcatcacattcgagtggggattaagagaaggaaggctgccttgctggagctgtgtggtcttctccaagtgagagtcgcaggcaatagaactactttgcttttggaggaaaaggaggaattcattttcagcagacacaagaaaagcagtttttttttcagcgcagaccgtcgctaatgaatcttggggccggtgtcgggccggggcggcttgatcggcaactaggaaaccccaggcgcagaggccaggagcgagggcagcgaggatcagaggccaggccttcccggctgccggcgctcctcggaggtcagggcagatgaggaacatgactctcccccttcggaggaggaaggaagtcccgctgccaccttatctctgctcctctgcctcctccctgttcccagagctttttctctagagaagattttgaaggcggcttttggattcttcacttctcttgaacaaggaactcactcagagactaacacaaaggaagtaatttcttacctggtcattatttagtctacaataagttcatccttcttcagtgtgaccagtaaattcttcccatactcttgaagagagcataattggaatggagaggtggtgctgacggccacccaccatcatctaaagaagataaacttggcaaatgacatgcaggttcttcaaggcagaataattgcagaaaatcttcaaaggaccctatctgcagatgttctgaatacctctgagaatagagattgattattcaaccaggatacctaattcaagaactccagaaatcaggagacggagacattttgtcagttttgcaacattggaccaaatacaatgaagtattcttgctgtgctctggttttggctgtcctgggcacagaattgctgggaagcctctgttcgactgtcagatccccgaggttcagaggacggatacagcaggaacgaaaaaacatccgacccaacattattcttgtgcttaccgatgatcaagatgtggagctggggtccctgcaagtcatgaacaaaacgagaaagattatggaacatgggggggccaccttcatcaatgcctttgtgactacacccatgtgctgcccgtcacggtcctccatgctcaccgggaagtatgtgcacaatcacaatgtctacaccaacaacgagaactgctcttccccctcgtggcaggccatgcatgagcctcggacttttgctgtatatcttaacaacactggctacagaacagccttttttggaaaatacctcaatgaatataatggcagctacatcccccctgggtggcgagaatggcttggattaatcaagaattctcgcttctataattacactgtttgtcgcaatggcatcaaagaaaagcatggatttgattatgcaaaggactacttcacagacttaatcactaacgagagcattaattacttcaaaatgtctaagagaatgtatccccataggcccgttatgatggtgatcagccacgctgcgccccacggccccgaggactcagccccacagttttctaaactgtaccccaatgcttcccaacacatattccaatggaacagacagggtaaggaccaatctggactgtgttatcttttccaggtgcaagtatgtgctatggaactcctagttataactatgcaccaaatatggataaacactggattatgcagtacacaggaccaatgctgcccatccacatggaatttacaaacattctacagcgcaaaaggctccagactttgatgtcagtggatgattctgtggagaggctgtataacatgctcgtggagacgggggagctggagaatacttacatcatttacaccgccgaccatggttaccatattgggcagtttggactggtcaaggggaaatccatgccatatgactttgatattcgtgtgcctttttttattcgtggtccaagtgtagaaccaggatcaatagtcccacagatcgttctcaacattgacttggcccccacgatcctggatattgctgggctcgacacacctcctgatgtggacggcaagtctgtcctcaaacttctggacccagaaaagccaggtaacaggtttcgaacaaacaagaaggccaaaatttggcgtgatacattcctagtggaaagaggcaaatttctacgtaagaaggaagaatccagcaagaatatccaacagtcaaatcacttgcccaaatatgaacgggtcaaagaactatgccagcaggccaggtaccagacagcctgtgaacaaccggggcagaagtggcaatgcattgaggatacatctggcaagcttcgaattcacaagtgtaaaggacccagtgacctgctcacagtccggcagagcacgcggaacctctacgctcgcggcttccatgacaaagacaaagagtgcagttgtagggagtctggttaccgtgccagcagaagccaaagaaagagtcaacggcaattcttgagaaaccaggggactccaaagtacaagcccagatttgtccatactcggcagacacgttccttgtccgtcgaatttgaaggtgaaatatatgacataaatctggaagaagaagaagaattgcaagtgttgcaaccaagaaacattgctaagcgtcatgatgaaggccacaaggggccaagagatctccaggcttccagtggtggcaacaggggcaggatgctggcagatagcagcaacgccgtgggcccacctaccactgtccgagtgacacacaagtgttttattcttcccaatgactctatccattgtgagagagaactgtaccaatcggccagagcgtggaaggaccataaggcatacattgacaaagagattgaagctctgcaagataaaattaagaatttaagagaagtgagaggacatctgaagagaaggaagcctgaggaatgtagctgcagtaaacaaagctattacaataaagagaaaggtgtaaaaaagcaagagaaattaaagagccatcttcacccattcaaggaggctgctcaggaagtagatagcaaactgcaacttttcaaggagaacaaccgtaggaggaagaaggagaggaaggagaagagacggcagaggaagggggaagagtgcagcctgcctggcctcacttgcttcacgcatgacaacaaccactggcagacagccccgttctggaacctgggatctttctgtgcttgcacgagttctaacaataacacctactggtgtttgcgtacagttaatgagacgcataattttcttttctgtgagtttgctactggctttttggagtattttgatatgaatacagatccttatcagctcacaaatacagtgcacacggtagaacgaggcattttgaatcagctacacgtacaactaatggagctcagaagctgtcaaggatataagcagtgcaacccaagacctaagaatcttgatgttggaaataaagatggaggaagctatgacctacacagaatgttgctgttcctggtaccctgttcggcccctctaacctccagagctatggtctcagatgcttccttttagagagaaggtcattagtccaccaagaagccaaatgacaacaggaaaggtgatgggaagatgaaaacaaaggaaggtggacttttgggtatatgttatagccataggacagttatgggatggatgggaaggttaatcagccccgtctcactgcagacatcaactggcaaggcctagaggagctacacagtgtgaatgaaaacatctatgagtacagacaaaactacagacttagtctggtggactggactaattacttgaaggatttagatagagtatttgcactgctgaagagtcactatgagcaaaataaaacaaataagactcaaactgctcaaagtgacgggttcttggttgtctctgctgagcacgctgtgtcaatggagatggcctctgctgactcagatgaagacccaaggcataaggttgggaaaacacctcatttgaccttgccagctgaccttcaaaccctgcatttgaaccgaccaacattaagtccagagagtaaacttgaatggaataacgacattccagaagttaatcatttgaattctgaacactggagaaaaaccgaaaaatggacggggcatgaagagactaatcatctggaaaccgatttcagtggcgatggcatgacagagctagagctcgggcccagccccaggctgcagcccattcgcaggcacccgaaagaacttccccagtatggtggtcctggaaaggacatttttgaagatcaactatatcttcctgtgcattccgatggaatttcagttcatcagatgttcaccatggccaccgcagaacaccgaagtaattccagcatagcggggaagatgttgaccaaggtggagaagaatcacgaaaaggagaagtcacagcacctagaaggcagcgcctcctcttcactctcctctgattagatgaaactgttaccttaccctaaacacagtatttctttttaacttttttatttgtaaactaataaaggtaatcacagccaccaacattccaagctaccctgggtacctttgtgcagtagaagctagtgagcatgtgagcaagcggtgtgcacacggagactcatcgttataatttactatctgccaagagtagaaagaaaggctggggatatttgggttggcttggttttgattttttgcttgtttgtttgttttgtactaaaacagtattatcttttgaatatcgtagggacataagtatatacatgttatccaatcaagatggctagaatggtgcctttctgagtgtctaaaacttgacacccctggtaaatctttcaacacacttccactgcctgcgtaatgaagttttgattcatttttaaccactggaatttttcaatgccgtcattttcagttagatgattttgcactttgagattaaaatgccatgtctatttgattagtcttatttttttatttttacaggcttatcagtctcactgttggctgtcattgtgacaaagtcaaataaacccccaaggacgacacacagtatggatcacatattgtttgacattaagcttttgccagaaaatgttgcatgtgttttacctcgacttgctaaaatcgattagcagaaaggcatggctaataatgttggtggtgaaaataaataaataagtaaacaaaatgaagattgcctgctctctctgtgcctagcctcaaagcgttcatcatacatcatacctttaagattgctatattttgggttattttcttgacaggagaaaaagatctaaagatcttttattttcatcttttttggttttcttggcatgactaagaagcttaaatgttgataaaatatgactagttttgaatttacaccaagaacttctcaataaaagaaaatcatgaatgctccacaatttcaacataccacaagagaagttaatttcttaacattgtgttctatgattatttgtaagaccttcaccaagttctgatatcttttaaagacatagttcaaaattgcttttgaaaatctgtattcttgaaaatatccttgttgtgtattaggtttttaaataccagctaaaggattacctcactgagtcatcagtaccctcctattcagctccccaagatgatgtgtttttgcttaccctaagagaggttttcttcttatttttagataattcaagtgcttagataaattatgttttctttaagtgtttatggtaaactcttttaaagaaaatttaatatgttatagctgaatctttttggtaactttaaatctttatcatagactctgtacatatgttcaaattagctgcttgcctgatgtgtgtatcatcggtgggatgacagaacaaacatatttatgatcatgaataatgtgctttgtaaaaagatttcaagttattaggaagcatactctgttttttaatcatgtataatattccatgatacttttatagaacaattctggcttcaggaaagtctagaagcaatatttcttcaaataaaaggtgtttaaacttt

SEQ ID NO: 2039 - DNA, 3345 bp, Homo sapiens
tcctctgcgtcccgccccgggagtggctgcgaggctaggcgagccgggaaagggggcgccgcccagccccgagccccgcgccccgtgccccgagcccggagccccctgcccgccgcggcaccatgcgcgccgagccggcgtgaccggctccgcccgcggccgccccgcagctagcccggcgctctcgccggccacacggagcggcgcccgggagctatgagccatgaagccgcccggcagcagctcgcggcagccgcccctggcgggctgcagccttgccggcgcttcctgcggcccccaacgcggccccgccggctcggtgcctgccagcgccccggcccgcacgccgccctgccgcctgcttctcgtccttctcctgctgcctccgctcgccgcctcgtcccggccccgcgcctggggggctgctgcgcccagcgctccgcattggaatgaaactgcagaaaaaaatttgggagtcctggcagatgaagacaatacattgcaacagaatagcagcagtaatatcagttacagcaatgcaatgcagaaagaaatcacactgccttcaagactcatatattacatcaaccaagactcggaaagcccttatcacgttcttgacacaaaggcaagacaccagcaaaaacataataaggctgtccatctggcccaggcaagcttccagattgaagccttcggctccaaattcattcttgacctcatactgaacaatggtttgttgtcttctgattatgtggagattcactacgaaaatgggaaaccacagtactctaagggtggagagcactgttactaccatggaagcatcagaggcgtcaaagactccaaggtggctctgtcaacctgcaatggacttcatggcatgtttgaagatgataccttcgtgtatatgatagagccactagagctggttcatgatgagaaaagcacaggtcgaccacatataatccagaaaaccttggcaggacagtattctaagcaaatgaagaatctcactatggaaagaggtgaccagtggccctttctctctgaattacagtggttgaaaagaaggaagagagcagtgaatccatcacgtggtatatttgaagaaatgaaatatttggaacttatgattgttaatgatcacaaaacgtataagaagcatcgctcttctcatgcacataccaacaactttgcaaagtccgtggtcaaccttgtggattctatttacaaggagcagctcaacaccagggttgtcctggtggctgtagagacctggactgagaaggatcagattgacatcaccaccaaccctgtgcagatgctccatgagttctcaaaataccggcagcgcattaagcagcatgctgatgctgtgcacctcatctcgcgggtgacatttcactataagagaagcagtctgagttactttggaggtgtctgttctcgcacaagaggagttggtgtgaatgagtatggtcttccaatggcagtggcacaagtattatcgcagagcctggctcaaaaccttggaatccaatgggaaccttctagcagaaagccaaaatgtgactgcacagaatcctggggtggctgcatcatggaggaaacaggggtgtcccattctcgaaaattttcaaagtgcagcattttggagtatagagactttttacagagaggaggtggagcctgccttttcaacaggccaacaaagctatttgagcccacggaatgtggaaatggatacgtggaagctggggaggagtgtgattgtggttttcatgtggaatgctatggattatgctgtaagaaatgttccctctccaacggggctcactgcagcgacgggccctgctgtaacaatacctcatgtctttttcagccacgagggtatgaatgccgggatgctgtgaacgagtgtgatattactgaatattgtactggagactctggtcagtgcccaccaaatcttcataagcaagacggatatgcatgcaatcaaaatcagggccgctgctacaatggcgagtgcaagaccagagacaaccagtgtcagtacatctggggaacaaaggctgcagggtctgacaagttctgctatgaaaagctgaatacagaaggcactgagaagggaaactgcgggaaggatggagaccggtggattcagtgcagcaaacatgatgtgttctgtggattcttactctgtaccaatcttactcgagctccacgtattggtcaacttcagggtgagatcattccaacttccttctaccatcaaggccgggtgattgactgcagtggtgcccatgtagttttagatgatgatacggatgtgggctatgtagaagatggaacgccatgtggcccgtctatgatgtgtttagatcggaagtgcctacaaattcaagccctaaatatgagcagctgtccactcgattccaagggtaaagtctgttcgggccatggggtgtgtagtaatgaagccacctgcatttgtgatttcacctgggcagggacagattgcagtatccgggatccagttaggaaccttcacccccccaaggatgaaggacccaaggtgaatatggccacaagcaggctaataggggccgtggccggcaccattctggccctgggggtgatttttggaggcacagggtggggaatagagtaagtcctagtgccaccaatctcataataggctccatcgctggtgccatcctggtagcagctattgtccttgggggcacaggctggggatttaaaaatgtcaagaagagaaggttcgatcctactcagcaaggccccatctgaatcagctgcgctggatggacaccgccttgcactgttggattctgggtatgacatactcgcagcagtgttactggaactattaagtttgtaaacaaaacctttgggtggtaatgactacggagctaaagttggggtgacaaggatggggtaaaagaaaactgtctcttttggaaataatgtcaaagaacacctttcaccacctgtcagtaaacgggggagggggcaaaagaccatgctataaaaagaactgttccagaatcttttttttccctaatggacgaaggaacaacacacacacaaaaattaaatgcaataaaggaatcattaaaaaaaatagtaaatgattttttttccctcagcctgctggcacttaatatcttctaaatgatttggcatgatttttttttctttactaccgatgacaaactccagtggcatgaagatctaattttcaaaagggtaaaaactgcatggcatatatacaacaagctagcaagccaattctcagcaaaacctgcaacagaattc

SEQ ID NO: 2040 - DNA, 7713 bp, Homo sapiens
ctctctcccggcgaagctgggaattgggtgggattacacggagcagccccgccgccgccgctggcagaggccggcttggagagggcgggggttcccctccgtcagtcgcccctggcgcccctcgcctcgtcgcactctccgcctcgctctccccgacgtccggccaggaggagccggtagcatcgggagcctcgcgccgagggcgccgcggtccgcgccccgcgactgcagcccccggcctggccccggcggggcgccccctcccctccccctcctgcgagctgggatccggccggcttccgccctcccctggccgcgagaccggccccggcggctgggccgccagtagctccagccatgggctcggggcgcgtacccgggctctgcctgcttgtcctgctggtccacgcccgcgccgcccagtacagcaaagccgcgcaagatgtggatgagtgtgtggaggggactgacaactgccacatcgatgctatctgccagaacaccccgaggtcatacaagtgcatctgcaagtctggctacacaggggacggcaaacactgcaaagacgtggatgagtgcgagcgagaggataatgcaggttgtgtgcatgactgtgtcaacatccctggcaattaccggtgtacctgctatgatggattccacctggcacatgacggacacaactgtctggatgtggacgagtgtgccgagggcaacggcggctgtcagcagagctgtgtcaacatgatgggcagctatgagtgccactgccgggaaggcttcttcctcagcgacaaccagcatacctgtatccagcggccagaagaaggaatgaattgcatgaacaagaaccacggctgtgcccacatttgccgggagacacccaaggggggtattgcctgtgaatgccgtcctggctttgagcttaccaagaaccaacgggactgtaaattgacatgcaactatggtaacggcggctgccagcacacgtgtgatgacacagagcagggtccccggtgcggctgccatatcaagtttgtgctccataccgacgggaagacatgcatcgagacctgtgctgtcaacaacgggggctgtgacagtaagtgccatgatgcagcgactggtgtccactgcacctgccctgtgggcttcatgctgcagccagacaggaagacgtgcaaagatatagatgagtgccgcttaaacaacgggggctgtgaccatatttgccgcaacacagtgggcagcttcgaatgcagttgcaagaaaggctataagcttctcatcaatgagaggaactgccaggatatagacgagtgttcctttgatcgaacctgtgaccacatatgtgtcaacacaccaggaagcttccagtgtctctgccatcgtggctacctgttgtatggtatcacccactgtggggatgtggatgaatgcagcatcaaccggggaggttgccgctttggctgcatcaacactcctggcagctaccagtgtacctgcccagcaggccagggtcggctgcactggaatggcaaagattgcacagagccactgaagtgtcagggcagtcctggggcctcgaaagccatgctcagctgcaaccggtctggcaagaaggacacctgtgccctgacctgtccctccagggcccgatttttgccagagtctgagaatggcttcacggtgagctgtgggacccccagccccagggctgctccagcccgagctggccacaatgggaacagcaccaactccaaccactgccatgaggctgcagtgctgtccattaaacaacgggcctccttcaagatcaaggatgccaaatgccgtttgcacctgcgaaacaaaggcaaaacagaggaggctggcagaatcacagggccaggtggtgccccctgctctgaatgccaggtcaccttcatccaccttaagtgtgactcctctcggaagggcaagggccgacgggcccggacccctccaggcaaagaggtcacaaggctcaccctggaactggaggcagaggtcagagccgaagaaaccacagccagctgtgggctgccctgcctccgacagcgaatggaacggcggctgaaaggatccctgaagatgctcagaaagtccatcaaccaggaccgcttcctgctgcgcctggcaggccttgattatgagctggcccacaagccgggcctggtagccggggagcgagcagagccgatggagtcctgtaggcccgggcagcaccgtgctgggaccaagtgtgtcagctgcccgcagggaacgtattaccacggccagacggagcagtgtgtgccatgcccagcgggcaccttccaggagagagaagggcagctctcctgcgacctttgccctgggagtgatgcccacgggcctcttggagccaccaacgtcaccacgtgtgcaggtcagtgcccacctggccaacactctgtagatgggttcaagccctgtcagccatgcccacgtggcacctaccaacctgaagcaggacggaccctatgcttcccttgtggtgggggcctcaccaccaagcatgaaggggccatttccttccaagactgtgacaccaaagtccagtgctccccagggcactactacaacaccagcatccaccgctgtattcgctgtgccatgggctcctatcagcccgacttccgtcagaacttctgcagccgctgtccaggaaacacaagcacagactttgatggctctaccagtgtggcccaatgcaagaatcgtcagtgtggtggggagctgggtgagttcactggctatattgagtcccccaactacccgggcaactacccagctggtgtggagtgcatctggaacatcaaccccccacccaagcgcaagatccttatcgtggtaccagagatcttcctgccatctgaggatgagtgtggggacgtcctcgtcatgagaaagaactcatccccatcctccattaccacttatgagacctgccagacctacgagcgtcccattgccttcactgcccgttccaggaagctctggatcaacttcaagacaagcgaggccaacagcgcccgtggcttccagattccctatgttacctatgatgaggactatgagcagctggtagaagacattgtgcgagatggccggctctatgcctctgaaaaccaccaggagattttaaaggacaagaagctcatcaaggccttctttgaggtgctagcccacccccagaactacttcaagtacacagagaaacacaaggagatgctgccaaaatccttcatcaagctgctccgctccaaagtttccagcttcctgaggccctacaaatagtaaccctaggctcagagacccaattttttaagcccccagactccttagccctcagagccggcagccccctaccctcagacaaggaactctctcctctctttttggagggaaaaaaaaaatatcactacacaaaccaggcactctccctttctgtctttctagtttcctttccttgtctctctctgcctgcctctctactgttcccccttttctaacacactacctagaaaagccattcagtactggctctagtccccgtgagatgtaaagaaacagtacagccccttccactgcccattttaccagctcacattcccgaccccatcagcttggaagggtgctagaggcccatcaaggaagtgggtctggtgggaaacggggaggggaaagaagggcttctgccattatagggttgtgccttgctagtcaggggccaaaatgtcccctggctctgctccctagggtgattctaacagcccagggtcctgccaaagaagcctttgatttacaggcttaatgccagcaccagtcctctggggcacatggtttgagctctggacttcccacatggccagctttcttgtctatacagatcctctctttctttccctacgtctgcctggggtctactccataagggtttacaaatggcccacaacactgagttagtggacaccggctaaatgaggaagagcagcaggcattgtcatggtgaatgccccgctgtagctccctgagagaaagactgtaactctgcaggacagaaacaaggttttaaagcattgccaaaaaaaagaaaacagaaagaaaaaatgtatcatctaaaggactagacacagaacaattggaagtcaacttcaaacactaatcccttttcttgtcttccctggcccagccacctcctcagccccatgtgatgctccctgggggagccctactccccttgctacatgttgtccttaaacatggttattgacctgaagccagcctaggccttgccctacagttgtttttcccttgtagccccagctggcttgtgggcttcaccaaagaggaccccactctgaagccagcctggagccacctacctctggcctcaggctgtgggcagcaaaaggaatgtgtgtgcacttggcgagcctcctgcccaccctgtccacacctaataagtgcaatcattttgagtctttctatgttgtctagacggaggggtttttgttttctgggtttgttttttgtttttgtttcttcttcctctattagcaaaaccctatttatagctgcccaagagaaaagagtgtatgtttggagtggaagaaaatcggttttgaatctcatgaaccttgagtgctggagcatctgatctgtctctatgccaccactggccacctagagcccttggctgtggtaatccagggtaattgcgcagaggcatctgatgtgtaggaaagtaattctggggatttgatggagcagaaaggagagagacctatgtttgctaaaccaatcttgctatccctatgcctctccatggagtcagtgtggacctcatgattatagaggccaatggaactggtcagtgattctctaccccaagtagggaaaacctccatcttttccctgtcttcatcctgttatcccctggtgtacacatggaagaggaccaggacataccacctggggatgggctgactcagggtcccgaggccagagacaaagctgtgggagccaagaataagacagaaggcatcagatatttgcctggctctggtcacttccctttgaagttgacttcaagcttagcttcctcaactactgtttttcagaaggaagaaagaatcaaatggaagaagaatcaagtccatgcccaagcccaaagcctgcacacattctgcccttaatccaagtgttgcctataaaattattttctgttttctcactctagttcccccaaagctgtagtcccaatcaatcaaaggctaccaactgagtcctcaggttcatttcttttttttttttttttctttttaactctcctggtaactcacagaacagctcaggttcatttctaggtgactgtcctaggctactgctcccccaggagactcaacactaaataaaggagtctgactccctgccctcccatcagtagcattcatcagccaaaacggccatagcagtaggtagccaatgacacagctagattccctgacaaccattagccaacatcatggtccttgtgggtagagtgtctggctacctttgtctttctgggtcaaggagggccactgtaaagatgcaaaatggctgcttccaaacaagggaaatggtcatttagtatgagtgtctctgtacttcccaggaagcaccatgaaaactgctttaatcaactctgactatcctaattctccaccagaagctaggataactttctttctttctttctttttttttttttttttttttgagatggagtctcgctctgtcacccaggctggagtgtaatggtgctatctcggcctactgcaacctccgcctcccaggctcaagcaattctgcctcggcctcccaagtagctgggattacaggcatgcgccaccgcgcccagctaatttttgtatttttagtagagatggggtttcaccatgttgcccgggctggtcttgaactcttgacctcaggtgatccacccgcctcagtctcccaaagtgctgggattacaggcatgagccaccgcgcccagcctaggataactttctgattcctctctgccagccgttttgcgtctcttggaaagccaaacggtgaccatgcttcttaatttatgccttcagggtctggcttctcctttctcccttcctttcctgtcacaccatgcatacatacatacaaatacacatccttcaaccatttattccatggcttatgagacctgcaaatgagttccacagtacggaaggcatagaccactaggcttcttaattgatgtcaaggcagatcttggtgagcaggtaaaaacctgctattgtccaccaagtttaatttaggtcctccaagttggagggttaagaacccaggcaaagctgctgctgaatctatggaggaggctggccctgggacatcaaactaggggttaactggattgaatgaggagtcaacgctcagggacattctaggtctttacaggtcagacagaagagaggtttttaccattggagggaaatggaaagatggtataaataggatcccttcatgaagcaacccagaggcctctctgcagcgtgtagggtgtggggcgacagtattgtggggcttccattcatcttagtacaaaacctcacctgctctgagcctggaaatgggagggcttcacgcaccaagtaatgcacaccagaaaggcacttatatcctcagcaacatggcagttcctctttacttctctgcctccctctttctatattatcaggccatgcctattcctacaacctgagacaactcttggagtcagaagaaaactgaccagatcctggatctgagctgcctgctccaggcctagaaatccccaaaggctggcactgagctgtgactgctttaacagcccccaagatttggtcagtttgaggtggtggagactcagatttgttgctgaaagttcagtaacacagtcctggtctttggccctagagaaactttttatatgagaagtgttctctatatacatgtttgaggtgactctggaatggattatgaggtcatatctcaaaatgtcagaaaacgttatagagcactcgaacttttgtatttgctgcttaacctcaatattacagccacaaacaaggggtaccaagacaaagtataactgagcataagcagaaaatgttaaccctccaggtttctttcttaagcacaataaaagtgggagcgaacaacacaaggatatttttacatttgacccgtctcaaaagtagcacaccctatccttgtgccattatttgtacaaggaaatatatgattagaaggaatagaacccccagttgtcatcagcttttttagacaccacaggttgtagcagtttgaacaaactgaaaactttatacttctgtgtgagctgaactcaagtttcagaataatcatcgccatgtgggaggctttttgttaaatgcagaagaaatttcaaaatattgtatttatatctgccttccactgctgccaatttagtaagcatctcctatacaatcgacaataaacagcaaatgatgcagttcatagagtattttgcacttggggaaaaatatgtatctgaattgtaaaaagaaatgtttggattttgtatgtcttttttattattattaaaatactaaatgaaactcctca

SEQ ID NO: 2041 - DNA, 2347 bp, Homo sapiens; identical to SEQ ID NO: 1154

SEQ ID NO: 2042 - DNA, 8113 bp, Homo sapiens
gtctctccaagggaatgaaaggtgaggggagcgtgagtgcaggcatgatgggaatctccgtgacttgtgaaccaaggactgggttttgctctggaagcctgtcctgattgcttctgtaatctggcgctatgcatccggatcttggacccttatgtacactgctgtatgttactcttacaattctgtgctcttctgtgagttcagacttggcaccttattttacttctgagccgctctctgctgtccagaaacttggtggacctgtagtactgcattgttctgctcaacctgtgaccactcgtatctcatggctgcataacggaaaaacattggatggaaacctggaacatgttaagattcatcaggggactctgacaattctttctctcaactcctctcttttgggttactaccagtgccttgccaacaatagcatcggtgccattgtgagtggccctgcgacagtatctgtggcagttcttggtgattttggttcatccacaaagcatgttattacagcagaagaaaaaagtgctggtttcattggctgcagggtaccggagagtaaccccaaagctgaggtgcgctataaaatccggggaaaatggctggaacattccacagagaattacttaatccttccatcaggaaatcttcagattttgaatgtatccttagaggacaagggatcatacaaatgtgcagcttataatcctgtcacacatcaattaaaagttgaacctattggccgaaagctccttgtgagtcgtccttcttcagatgatgttcacattcttcaccccacccattcacaggcattagctgttctttctcgtagccctgtaaccttggagtgtgtggtgagtggggtcccggctcctcaagtgtattggctaaaggacgggcaggacattgcaccaggaagcaactggagaaggttgtattctcatcttgccactgatagcgttgacccggcggactccggaaactattcctgcatggcgggaaacaagtctggagatgtaaaatatgtgacttacatggttaatgtacttgaacatgcttccatttctaaaggactacaggatcagatagtgtctctgggtgccacagtacactttacctgcgacgttcatgggaacccagcccccaactgtacctggtttcacaatgcacagcctattcatccttctgcacgacatctaactgcaggaaacggactgaaaatcagtggggttactgtggaagatgttgggatgtatcagtgtgtagcagataatgggattggatttatgcactctactggaagacttgaaattgaaaatgacggtggattcaagccagttataattacggcaccagtaagtgcaaaggttgcagacggagactttgttactctgtcctgcaatgccagtgggctgccggttccggtcattcgttggtatgacagccatggattgataaccagccatccatctcaagtcctgagatcgaaatcccgaaaatcacagttatcaagacctgagggcttgaacctggagcctgtgtacttcgtcctgtcccaagctggtgcaagctctctccatattcaggctgtgactcaggaacatgcggggaaatacatctgcgaagctgcaaatgaacatggtaccacacaggcagaagcatctctcatggttgttccttttgaaacaaatacaaaagcagagacagtcacacttcctgatgctgctcagaatgatgacagaagtaagagagatggttcagaaactgggttactgagctcatttccggtgaaggtccatcccagtgcagtggaatcagcaccagagaaaaacgccagcggcatctctgttcctgatgcccccatcatactgagccccccacagacccacacaccagacacgtacaacctggtgtggagggcaggcaaggatggtgggctgcccatcaatgcttactttgtgaagtatcgaaagctggatgatggggttggcatgctgggaagctggcacacggttcgagtcccaggaagtgaaaatgagctccatttagctgagctggagccatctagtctttatgaagtcttgatggtagcaagaagcgcagcaggtgaaggccaacctgccatgcttaccttccgaaccagcaaagaaaaaacagcgtcatcaaaaaacacccaggcatcctctccacccgtgggcatccctaagtatcccgttgtttcagaggctgcaaacaacaattttggagtggtacttacagattcctctaggcacagtggagttccagaggcaccagatcggcctaccatctccactgcatcagagacatcagtctatgtcacttggattcctcgggcaaacgggggttctccaatcactgccttcaaagtcgaatataaacggatgaggaccagcaattggctggtggcagctgaagacatccctccttccaaactttcagtggaagttcgtagtttagaaccaggttcaacatacaaatttagggtcattgccatcaaccattatggtgagagttttcggagttcagcatctcgtccttatcaagtggttgggttccccaatcgcttttccagccgtccaataactggacctcacattgcatacacagaggctgtcagcgatactcagatcatgctaaagtggacgtacattccatcaagtaacaataacactcccattcaaggattttatatctattaccgaccaacagatagtgacaatgacagtgattacaagagggatgttgtagaaggttcaaagcagtggcacatgattggccacctgcagccagaaacctcctatgacattaaaatgcaatgcttcaatgaaggaggagaaagtgaatttagcaatgtgatgatctgcgagactaaagtgaaacgtgttcctggagcttctgaatatcctgtcaaagacttgagtacccctccaaattctttgggaagtggaggaaatgtggggcctgcaaccagccctgccagaagcagtgacatgttatatctgatcgttggctgtgtgctgggcgtcatggtcctcattctgatggttttcattgcaatgtgcctgtggaagaatcgccagcagaataccatacaaaaatatgacccaccaggatatctctaccaaggatcagatatgaacgggcagatggtggactacaccactctctcaggagcaagtcagataaatggaaatgttcacggaggcttcctaaccaatggcggtctcagcagtggctattcccaccttcaccataaggtccccaatgcagtcaatggaattgtgaatgggagcctaaatggagggctttactccgggcacagcaactctctaaccaggacacacgtggattttgaacatcctcatcatctagtgaatggtggtggaatgtacacggccgtgcctcagattgaccctctggagtgtgttaactgccgaaattgtcgaaacaacaataggtgtttcaccaaaaccaacagcactttcagcagcagccctcctcctgtggtccctgtggtagcaccttatcctcaggatggtttggaaatgaagcccctcagtcacgtgaaggtgcctgtatgcctgacttccgcagtccctgattgtggccagttgccggaggagagcgtcaaggacaatgtggaaccagtccctactcagcgtacctgctgtcaggacattgtaaatgacgtcagctctgatggctcagaagatccagcagagttcagcagaggtcaggaaggcatgatcaaccttaggattccagatcatcttcagttagctaagagctgtgtatgggaaggagacagctgtgcccattcagaaacagagatcaacattgtaagttggaatgctcttattttgccacctgtccccgagggctgtgctgagaagacaatgtggtctccacctggcattcctttagacagcccgacagaggtccttcagcagccccgggaaacctgaggacatgcaaacaaccagtcatgttccaacttcaagccggtaactgcacacaacaggcctgggagcgaactgtgtgaaggaccttaattcaaatcagagaaaatcattatttatttttttgtagtagtaatgtcatatgaatgtatcttaaaacgtgtgcccttttatattatttatgccttaaatgttttcttccccattccttcctccccctcggtaggaaacaaccttgttttgcatagtattcagtcacctggagggcagaggggtccttccatgttttctaacagctatagtgacagcaagagctcctcatgcaaaggatcccatctcttggctgcttcggctaggagggaatgcaggggcccgttgaaggttgccaccagctgggttttcaggtggaaaatggtctttcaatagtgtattctcagacttttttttgtttgttttttgagatggagtcttgctgtcatccaggctggagtgcaatggctcgatcttggctcactgcaacctccgcctcccaggttcaagcaattctcccgcctcagcctcctgagtagctgggactacaggcacctgccaccacgtccagctaattgtcttgtatttttattagagacaaggtttcaggctggttttgaactcctgacctcaagtgatccacccgcctccgcctcccaaagtgcgaggattacaggcgtgagccaccacgtctggcctgtattatcagacttcctgagaacactttgaaatcaactgcagttgtgacccatgtttataataacagacctggctgacggattttacaagagtgccttccacagaagtggtaatgtgacctgttgactttgtatctgcacgtgggcacgagtgatgttcagtttgctaggcactagtcatagtgttatggacgtggtggagtgtaaggtcttgatgaattacggcagtatgcagaaaaggaaccaaggccagagagacaaataatgcctcatgtcccactgctttaaaattacattaatttataaaatggccactatgggctctttttgactgtttctcggagtaggaacaaaataagacattaaatggtggcttgaagagaaagatacacattttcagaagaaagaaaggggagggctgcagggagcctgtcttggcgggagctctccagtctgttggattagcacagggacacgcttatggtgccatgacgccgaaactagtcatcccccatctccagcataggcaacggcctgcaggggtgagtgtcagaaaagacttactttggaagaaaagggtttttttttgtttgtttgttttttgtttttttttgtttgtttgttttgggtttttttcctgaaatttcctgatacctttttcagaatgtcacccttgtaaataggcacctaaagccaagttggtcagcagagctcctgaccacggctgcctctgcgtgacaaggacatttgcagctgcctttggaaggctcttcacattaaaaaacaataattatgtaagtgtgtttcatagcttgagtcaagctttcaaggatcactgctcctttgtgcattgtgcatccctttggggaaagaaacagaaaattattctctttctatagagtcaagcaattccagcagaagtgaagaaatgttagtttcccagaaatcgcagtggaatagaatacaatactgtgttaaccaactttctgtataaatgcatcagtattcccttacatatgtctatatattttataatagaactgttagtgaaaatgtgcttgtttaagctgggtcactatgcaagagttacttccagtagaatgtagtgaatgtaattccctagtcggatattagggatgctgtagacccaagttctacattccagatgtccgtgcctatagtatactggatttattcttcatgttgcttaaatgcagttagctctggagggggatagctgcatcccttacttctgtgactagcaaaggacaaagtcccagcgcacagaatatgaaaacataccctgtgttagccaatcaagttacagcaatgctgtcacaaagggagttttagaaaactggggagtcattgtccgtagacagccattttgatttaggaaacaggtgtattagcatgagccttaggtcatgaactgcttttaaagattgagtttgaatatgggatctgtccacgaggaagagaaaatggctttacctttaggacaatctcattgtggactgctttatttatattattagtaacgctgttttaagtgttattctttttattgtattttatttataaaaaatgcctttatatattgaaatatataaatatatatatataaacacacacacacacacacacacacacatatatatatatatatataattgcctttatatttaggcggtatgagttctccctaagcgtgagttggctctgccctgcacaggcacccaaacagtcctacctaatgtcacttcaccaggaaatgagaggacatggtacagtgtgggagacagcactaacacgtgctgaataactactgtgtaccaggcactgtgctcggtgcttgttactgttaactcatttaacccccacaactcatctacaaagttggcattaaaatccccaagtcactcagtgagccatgggacctgaatccgaacctagtttatctggagccataatctgggctcctcccatttttccatactgctttccaaaagcattgtggttcactctttggatggaaccagtcccgttccgtatgctgtgatctatccctgccgtggaattcctccgaggctccaactccgcagccagagaagctgctctctggcctccgcgggcagagctctgcttatgacttcgtcttccagaggtccacatttctccccttgacgccccctgtctaccacctccacctggaaatttgatctttactgtgctcagtgatcacgaaattggtcaagcctattcatgttccttctcatctagaattctgtgtgattgttttagcataaactgccccgctcccactgtatcatttcacgatctccttttaatgtttttctttcagttttgcactgacagtctggtgacaggtgctgccagggtgcaagttacattgcaatgttctaaaccttttgaagtgttcttagcaaaagcctttctttctgggtgtttttgtcgaatgagtctatgaagactcaatgcatccatcttgggctgatcatgccacagatctcattccagctatagtactgccaagaagtgaagtttatcattgaattttacctgtgttgctctcttttaaagtaatgactttgagatgcatgctttgtatcatattgaaaagtatgttttattttccttaaagttgtaatattgtgtgtgaaactgtacatattttaaatgatgtagctttggcaggttttatttggttgatatgattttatattaaaagagaaggctgctttcatatagcatagcccctgaaggtgggaatactccctgtttgtacaacgctgcttatagtttgtgattggggtgggcgaatgtcttcctctgaaattctttggaaccccccacccctgtcctcccctgaaactcccctgtgcacacccctctgttctgactgcagagatcaaggccctgaaggagcaggatcttgggcaagtgttttaggggacgctgagaacatacctgaccctgggggcgatgtggaggcaggcccacctcctcggggcaactttgcgtttccttggagggaagggaggtgggtaggagaggagcttgggaggatgaggaggagcggtcccgcctcacacattgtctatttttaccattaaccgagcgccacatgtttatgaacttcaggatagaaatttagcctccttgtgaaaacgttttgttttactgccctaagaaaatacacatctctaggcttgtctgaccagaaagccagcaaagtcttttgcatcgggtgtggcccttttgtattttatttcccatatttaaataagccttccttaaaccctagccccagtcctgagagctttgagggtagccgaaaccccttatctaataaagtctaactctgtgagaaccaca

SEQ ID NO: 2043 - DNA, 5341 bp, Homo sapiens; identical to SEQ ID NO: 506

SEQ ID NO: 2044 - DNA, 2030 bp, Homo sapiens
gacggcgcttttgtctccggtgagttttgtggcgggaagcttctgcgctggtgcttagtaaccgactttcctccggactcctgcacgacctgctcctacagccggcgatccactcccggctgttcccccggaggtgagcggccctgtgggcttccccggctccccacccccatcgctagagtgctcgccgcgctagcagcctcgcgttccagggctgggggtgcgccgccgggatcctctctgatcgcccacgccccatctggggtccccattcagccgtcagccctgttttgtcctaaggtggtcctaactaggatccacgtggcccatcccacgcccacaggtgctgagttaggcatccctgccatgccctcccagagcaccttcacgatctccttgctgtcccaacacttagcgtgttgcgtgttaactaccctttgtctataaggtttgcaatgtggccctagtatcttccagggtacctaacacattgcagatattcatggtatgtttgttaaataaatgaacttgatagatttgaccctcatagagttatttggacttgcaaaaagtttgtagttaactccaatctgtgatgtgggagagacttctaggcaggttcctttctccagggcatgttcttatatttcccattacccaccacccccctgcaaaaggactgggcctatttcaggaaggtgactgatgcctgcactgtagcacaggggttgtgtattgtgccttgcaggaacaaaattttcaataaagtaaatgtttgtttgtttgtttttgagacggagttttgcttttagggtccagaggcctttcagaaggagaaggcagctctgtttctctgcagaggagtagggtcctttcagccatgaagcatgtgttgaacctctacctgttaggtgtggtactgaccctactctccatcttcgttagagtgatggagtccctagagggcttactagagagcccatcgcctgggacctcctggaccaccagaagccaactagccaacacagagcccaccaagggccttccagaccatccatccagaagcatgtgataagacctccttccatactggccatattttggaacactgacctagacatgtccagatgggagtcccattcctagcagacaagctgagcaccgttgtaaccagagaactattactaggccttgaagaacctgtctaactggatgctcattgcctgggcaaggcctgtttaggccggttgcggtggctcatgcctgtaatcctagcactttgggaggctgaggtgggtggatcacctgaggtcaggagttcgagaccagcctcgccaacatggcgaaaccccatctctactaaaaatacaaaagttagctgggtgtggtggcagaggcctgtaatcccagctccttgggaggctgaggcgggagaattgcttgaacccggggacggaggttgcagtgagccgagatcgcactgctgtacccagcctgggccacagtgcaagactccatctcaaaaaaaaaagaaaagaaaaagcctgtttaatgcacaggtgtgagtggattgcttatggctatgagataggttgatctcgcccttaccccggggtctggtgtatgctgtgctttcctcagcagtatggctctgacatctcttagatgtcccaacttcagctgttgggagatggtgatattttcaaccctacttcctaaacatctgtctggggttcctttagtcttgaatgtcttatgctcaattatttggtgttgagcctctcttccacaagagctcctccatgtttggatagcagttgaagaggttgtgtgggtgggctgttgggagtgaggatggagtgttcagtgcccatttctcattttacattttaaagtcgttcctccaacatagtgtgtattggtctgaagggggtggtgggatgccaaagcctgctcaagttatggacattgtggccaccatgtggcttaaatgattttttctaactaataaagtggaatatatatttcta

SEQ ID NO: 2045 - DNA, 3068 bp, Homo sapiens
ggcgacggcagcgcctcctccgccaccaaactcctggggctccgcgggggcttggggccacctcctcctgagcccggaggaaccctctcccgataggttccagcgtgactccctcccactccacccttttcctttcttcttcctcttttttttttttttttttaaacacatttttttcctggcttcggacctcagactgctgcagccctaaccttcccagggctcagctctttggagctgcccattcctccggctgcgagaaaggacgcgcgccctgcgtcgggcgaagaaaagaagcaaaacttgtcgggagggtttcgtcatcaacctccttcccgcaaacctaaacctcctgccggggccatccctagacagaggaaagttcctgcagagccgaccagccctagtggatctggggcaggcagcggcgctggctgtggaattagatctgttttgaacccagtggagcgcatcgctggggctcggaagtcaccgtccgcgggcaccgggttggcgctgcccgagtggaaccgacagtttgcgagcctcggctgcaagtggcctctcctccccgcggttgttgttcagtgtcgggtgagggctgcgagtgtggcaagttgcaaagagagcctcagaggtccgaagagcgctgcgctcctactcgcgttcgcttcttcctcttctcggttccctactgtgaaatcgcagcgacatttacaaaggcctccgggtcctaccgagaccgatccgcagcgtttggcccggtcgtgcctattgcatcgggagcccccgagcaccggcgaaggactggcgggtggggtagggaggtggcggcggcggcatggcgaggttcccgaaggccgacctggccgctgcaggagttatgttactttgccacttcttcacggaccagtttcagttcgccgatgggaaacccggagaccaaatccttgattggcagtatggagttactcaggccttccctcacacagaggaggaggtggaagttgattcacacgcgtacagccacaggtggaaaagaaacttggactttctcaaggcggtagacacgaaccgagcaagcgtcggccaagactctcctgagcccagaagcttcacagacctgctgctggatgatgggcaggacaataacactcagatcgagttttggcaggtctgatttaagaaaaactgaaggtgtattttcacatagtatgtcagtggtagacttcgtaattagactaaatcgtgtatatttttgcaggaggatacagaccacaattactatatatctcgaatatatggtccatctgattctgccagccgggatttatgggtgaacatagaccaaatggaaaaagataaagtgaagattcatggaatattgtccaatactcatcggcaagctgcaagagtgaatctgtccttcgattttccattttatggccacttcctacgtgaaatcactgtggcaaccgggggtttcatatacactggagaagtcgtacatcgaatgctaacagccacacagtacatagcacctttaatggcaaatttcgatcccagtgtatccagaaattcaactgtcagatattttgataatggcacagcacttgtggtccagtgggaccatgtacatctccaggataattataacctgggaagcttcacattccaggcaaccctgctcatggatggacgaatcatctttggatacaaagaaattcctgtcttggtcacacagataagttcaaccaatcatccagtgaaagtcggactgtccgatgcatttgtcgttgtccacaggatccaacaaattcccaatgttcgaagaagaacaatttatgaataccaccgagtagagctacaaatgtcaaaaattaccaacatttcggctgtggagatgaccccattacccacatgcctccagtttaacagatgtggcccctgtgtatcttctcagattggcttcaactgcagttggtgtagtaaacttcaaagatgttccagtggatttgatcgtcatcggcaggactgggtggacagtggatgccctgaagagtcaaaagagaagatgtgtgagaatacagaaccagtggaaacttcttctcgaaccaccacaaccgtaggagcgacaaccacccagttcagggtcctaactaccaccagaagagcagtgacttctcagtttcccaccagcctccctacagaagatgataccaagatagcactacatctaaaagataatggagcttctacagatgacagtgcagctgagaagaaagggggaaccctccacgctggcctcatcattggaatcctcatcctggtcctcattgtagccacagccattcttgtgacagtctatatgtatcaccacccaacatcagcagccagcatcttctttattgagagacgcccaagcagatggcctgcgatgaagtttagaagaggctctggacatcctgcctatgctgaagttgaaccagttggagagaaagaaggctttattgtatcagagcagtgctaaaatttctaggacagaacaacaccagtactggtttacaggtgttaagactaaaattttgcctatacctttaagacaaacaaacaaacacacacacaaacaagctctaagctgctgtagcctgaagaagacaagatttctggacaagctcagcccaggaaacaaagggtaaacaaaaaactaaaacttatacaagataccatttacactgaacatagaattccctagtggaatgtcatctatagttcactcggaacatctcccgtggacttatctgaagtatgacaagattataatgcttttggcttaggtgcagggttgcaaagggatcagaaaaaaaaaatcataataaagctttagttcatgagggatcgacacctttggttcaaatgttctctgatgtctcaaagataactgttttccaaagcctgaaccctttcactcaaaagagcaatgatgaatgtctcaagattgctaagaaaaacagcccatgcaagagtgagaacaaacacaaaataagagattttctacattttcaaaa

SEQ ID NO: 2046 - DNA, 14385 bp, Homo sapiens; identical to SEQ ID NO: 512

SEQ ID NO: 2047 - DNA, 9736 bp, Homo sapiens; identical to SEQ ID NO: 375

SEQ ID NO: 2048 - DNA, 2637 bp, Homo sapiens
cgccctgtgtagagcggctgcgagcgggcagctgggctcggctgccgggagccaccgcgcgggctccgcaccctcctctcgcactgccttcgcccggtccccgcgccgcggtgccccagtggcccccgccgcgctccacgccgcgcccccgcaccccgccggctaccggccgcacaaccgccaccgccccctggccgcgcggctcgcctcgccccgccccgtccctcctcgccccgccccaccccagtcagccccgccctgccccgcgccgccaagcggttcccgccctcgcccagcgcccaggtagctgcgaggaaacttttgcagcggctgggtagcagcacgtctcttgctcctcagggccactgccaggcttgccgagtcctgggactgctctcgctccggctgccactctcccgcgctctcctagctccctgcgaagcaggatggccgggaccgtgcgcaccgcgtgcttggtggtggcgatgctgctcagcttggacttcccgggacaggcgcagcccccgccgccgccgccggacgccacctgtcaccaagtccgctccttcttccagagactgcagcccggactcaagtgggtgccagaaactcccgtgccaggatcagatttgcaagtatgtctccctaagggcccaacatgctgctcaagaaagatggaagaaaaataccaactaacagcacgattgaacatggaacagctgcttcagtctgcaagtatggagctcaagttcttaattattcagaatgctgcggttttccaagaggcctttgaaattgttgttcgccatgccaagaactacaccaatgccatgttcaagaacaactacccaagcctgactccacaagcttttgagtttgtgggtgaatttttcacagatgtgtctctctacatcttgggttctgacatcaatgtagatgacatggtcaatgaattgtttgacagcctgtttccagtcatctatacccagctaatgaacccaggcctgcctgattcagccttggacatcaatgagtgcctccgaggagcaagacgtgacctgaaagtatttgggaatttccccaagcttattatgacccaggtttccaagtcactgcaagtcactaggatcttccttcaggctctgaatcttggaattgaagtgatcaacacaactgatcacctgaagttcagtaaggactgtggccgaatgctcaccagaatgtggtactgctcttactgccagggactgatgatggttaaaccctgtggcggttactgcaatgtggtcatgcaaggctgtatggcaggtgtggtggagattgacaagtactggagagaatacattctgtcccttgaagaacttgtgaatggcatgtacagaatctatgacatggagaacgtactgcttggtctcttttcaacaatccatgattctatccagtatgtccagaagaatgcaggaaagctgaccaccactgaaactgagaagaaaatatggcacttcaaatatcctatcttcttcctgtgtatagggctagacttacagattggcaagttatgtgcccattctcaacaacgccaatatagatctgcttattatcctgaagatctctttattgacaagaaagtattaaaagttgctcatgtagaacatgaagaaaccttatccagccgaagaagggaactaattcagaagttgaagtctttcatcagcttctatagtgctttgcctggctacatctgcagccatagccctgtggcggaaaacgacaccctttgctggaatggacaagaactcgtggagagatacagccaaaaggcagcaaggaatggaatgaaaaaccagttcaatctccatgagctgaaaatgaagggccctgagccagtggtcagtcaaattattgacaaactgaagcacattaaccagctcctgagaaccatgtctatgcccaaaggtagagttctggataaaaacctggatgaggaagggtttgaaagtggagactgcggtgatgatgaagatgagtgcattggaggctctggtgatggaatgataaaagtgaagaatcagctccgcttccttgcagaactggcctatgatctggatgtggatgatgcgcctggaaacagtcagcaggcaactccgaaggacaacgagataagcacctttcacaacctcgggaacgttcattccccgctgaagcttctcaccagcatggccatctcggtggtgtgcttcttcttcctggtgcactgactgcctggtgcccagcacatgtgctgccctacagcaccctgtggtcttcctcgataaagggaaccactttcttatttttttctatttttttttttttgttatcctgtatacctcctccagccatgaagtagaggactaaccatgtgttatgttttcgaaaatcaaatggtatcttttggaggaagatacattttagtggtagcatatagattgtccttttgcaaagaaagaaaaaaaaccatcaagttgtgccaaattattctcctatgtttggctgctagaacatggttaccatgtctttctctctcactccctccctttctatcgttctctctttgcatggatttctttgaaaaaaaataaattgctcaaataaaaa

SEQ ID NO: 2049 - DNA, 2290 bp, Homo sapiens; identical to SEQ ID NO: 2019

SEQ ID NO: 2050 - DNA, 10876 bp, Homo sapiens; identical to SEQ ID NO: 361

SEQ ID NO: 2051 - DNA, 6385 bp, Homo sapiens; identical to SEQ ID NO: 2024

SEQ ID NO: 2052 - DNA, 1949 bp, Homo sapiens
ttgaagatctctcagttaagtctacatgaaaaggatggtttcttggagcttccacaaacttaaaaccatgaaacatctattattgctactattgtgtgtttttctagttaagtcccaaggtgtcaacgacaatgaggagggtttcttcagtgcccgtggtcatcgaccccttgacaagaagagagaagaggctcccagcctgaggcctgccccaccgcccatcagtggaggtggctatcgggctcgtccagccaaagcagctgccactcaaaagaaagtagaaagaaaagcccctgatgctggaggctgtcttcacgctgacccagacctgggggtgttgtgtcctacaggatgtcagttgcaagaggctttgctacaacaggaaaggccaatcagaaatagtgttgatgagttaaataacaatgtggaagctgtttcccagacctcctcttcttcctttcagtacatgtatttgctgaaagacctgtggcaaaagaggcagaagcaagtaaaagataatgaaaatgtagtcaatgagtactcctcagaactggaaaagcaccaattatatatagatgagactgtgaatagcaatatcccaactaaccttcgtgtgcttcgttcaatcctggaaaacctgagaagcaaaatacaaaagttagaatctgatgtctcagctcaaatggaatattgtcgcaccccatgcactgtcagttgcaatattcctgtggtgtctggcaaagaatgtgaggaaattatcaggaaaggaggtgaaacatctgaaatgtatctcattcaacctgacagttctgtcaaaccgtatagagtatactgtgacatgaatacagaaaatggaggatggacagtgattcagaaccgtcaagacggtagtgttgactttggcaggaaatgggatccatataaacagggatttggaaatgttgcaaccaacacagatgggaagaattactgtggcctaccaggtgaatattggcttggaaatgataaaattagccagcttaccaggatgggacccacagaacttttgatagaaatggaggactggaaaggagacaaagtaaaggctcactatggaggattcactgtacagaatgaagccaacaaataccagatctcagtgaacaaatacagaggaacagccggtaatgccctcatggatggagcatctcagctgatgggagaaaacaggaccatgaccattcacaacggcatgttcttcagcacgtatgacagagacaatgacggctggttaacatcagatcccagaaaacagtgttctaaagaagacggtggtggatggtggtataatagatgtcatgcagccaatccaaacggcagatactactggggtggacagtacacctgggacatggcaaagcatggcacagatgatggtgtagtatggatgaattggaaggggtcatggtactcaatgaggaagatgagtatgaagatcaggcccttcttcccacagcaatagtccccaatacgtagatttttgctcttctgtatgtgacaacatttttgtacattatgttattggaattttctttcatacattatattcctctaaaactctcaagcagacgtgagtgtgactttttgaaaaaagtataggataaattacattaaaatagcacatgattttcttttgttttcttcatttctcttgctcaccaagaagtaacaaaagtatagttttgacagagttggtgttcataatttcagttctagttgattgcgagaattttcaaataaggaagaggggtcttttatccttgtcgtaggaaaaccatgacggaaaggaaaaactgatgtttaaaagtccacttttaaaactatatttatttatgtaggatctgtcaaagaaaacttccaaaaagatttattaattaaaccagactctgttgcaataaaaaaaaaaaaaa

SEQ ID NO: 2053 - DNA, 5186 bp, Homo sapiens; identical to SEQ ID NO: 322

SEQ ID NO: 2054 - DNA, 3902 bp, Homo sapiens; identical to SEQ ID NO: 2006

SEQ ID NO: 2055 - DNA, 4819 bp, Homo sapiens
gggggataggctcagacacaaggagaggcttggagagagcagacgccttctggattcaagaagacgaggcccattcccctcaggctcacctgttactcggcctcccagaaagatggataggagaaatgactacggatatagggtgcctctatttcagggccctctgcctcccccggggagcctggggcttcccttccctccagatatacagactgagaccacagaagaggacagtgtcctgctgatgcataccctgttggcggcaaccaaggactccctggccatggacccaccagttgtcaaccggcctaagaaaagcaagaccaagaaggcccctataaagactattactaaggctgcacctgctgcccctccagtcccagctgccaatgagattgccaccaacaagcccaaaataacttggcaggctttaaacctgccagtcattacccagatcagccaggctttacctaccactgaggtaaccaatactcaggcttcttcagtcactgctcagcctaagaaagccaacaagatgaagagagttactgccaaggcagcccaaggctcccaatccccaactggccatgagggtggcactatacagctgaagtcacccttgcaggtcctaaagctaccagtcatctcacagaatattcacgctccaattgccaatgagtcagccagttcccaagccttgataacctctatcaagcctaagaaagcttccaaggctaagaaggctgcaaataaggccatagctagtgccaccgaggtctcgctggctgcaactgccacccatacagctaccacccaaggccaaattaccaatgagacagccagtatccacaccacagcagcctccatccgaaccaagaaagcctccaaagccaggaagacaattgctaaggtcataaatactgacactgagcatatagaggctctaaatgtcactgacgcagctaccaggcagattgaggcctcagtagtggctatcaggcccaaaaaatccaagggcaagaaggctgccagcaggggcccaaattctgtctctgagatctctgaggccccacttgccactcagatagtcacaaaccaagccctggcagccaccctgcgggtcaagagagggtctagggctcggaaggctgccactaaggctcgggcaactgaaagccagactccaaatgctgaccaaggggcccaggccaagatagcctctgctcagaccaacgtaagtgcccttgagactcaggttgctgctgctgtccaggccctggcagatgactatctggctcagttgagcctggagcccacaaccaggacccggggcaaaagaaaccgaaagtccaagcatctgaatggggatgagagaagtggcagtaattacaggcggatcccatggggccggaggcctgcaccaccgcgagatgtggccattttacaagaaagggctaataagttggtgaaatacctgttggttaaggaccagacaaagatccccatcaaacgctcagacatgctgagggatgtcatccaagaatatgatgaatatttcccagaaatcattgaacgagcaagctacactctggagaagatgtttcgagtcaatctgaaagaaattgataagcaaagtagcttgtatattctcatcagcactcaggaatcctctgcaggcatactgggaacgaccaaggacacacccaagctgggtctcctcatggtgattctgagtgtcatttttatgaatggcaacaaggccagtgaggctgtcatctgggaggtgctgcgcaagttggggctgcgccctggggtgaggcattcactctttggggaagtgaggaagctcatcacagacgagtttgtgaagcagaagtacctggagtacaagagggtccctaacagcagaccacctgaatatgagttcttctggggcttgcgctcctaccacgagactagcaagatgaaagtcctcaagtttgcatgcagggtgcagaagaaagaccccaaggactgggctgtgcagtaccgcgaggcagtggagatggaagtccaagctgcagctgtggctgtggctgaggctgaagccagggctgaggcaagagcccaaatggggattggagaggaagctgtggctgggccctggaattgggatgacatggatatcgactgcctaacaagggaagagttaggcgatgatgctcaggcctggagcagattttcatttgaaattgaggccagagcccaagaaaatgcagatgccagcaccaacgtcaacttcagcagaggagctagtaccagggctggcttcagcgatggtgctagtattagcttcaatggtgcacccagctccagtggtggcttcagtggtggacctggcattacctttggtgttgcacccagcaccagtgccagcttcagcaatacagccagcattagctttggtggtacactgagcactagctccagcttcagcagcgcagccagcattagctttggttgtgcacacagcaccagcactagtttcagcagtgaagccagcattagctttggtggcatgccttgtaccagtgccagctttagtggtggagtcagctctagttttagtggcccactcagcaccagtgccactttcagtggtggagccagctctggctttggaggcacactcagcaccacggctggctttagtggtgtactcagcactagcaccagctttggcagtgcacccacaacgagcacagtcttcagtagtgcgcttagcaccagcactggctttggaggcatactcagcaccagtgtctgttttggtggctctcccagctccagtggtagctttggtggtacactcagtaccagtatctgcttcggtggctctccctgcaccagcactggctttggaggcacacttagcaccagtgtctcctttggtggctcttccagcaccagtgccaattttggtggtacactaagtaccagcatctgctttgatggctctcccagcactggtgctggctttggtggtgctctcaacaccagtgccagctttggcagtgtgctcaacaccagtactggttttggtggtgctatgagcaccagtgctgactttggcggtacactaagcaccagtgtctgctttggtggctctcctggcaccagtgtcagctttggcagtgcactcaacaccaatgctggttatggtggtgctgtcagcaccaacactgactttggtggtacactaagcaccagcgtctgttttggtggctctcccagcaccagtgctggctttggtggtgcactcaacaccaatgccagctttggctgtgccgtcagcaccagtgccagcttcagtggtgctgtcagcaccagtgcttgcttcagtggtgcaccaatcaccaaccctggctttggcggtgcatttagcaccagtgctggcttcggtggggcacttagtaccgctgctgacttcggtggtactcccagcaacagcattggctttggtgctgctcccagcaccagtgtcagctttggtggtgctcatggcaccagcctctgttttggtggagctcccagcaccagcctctgctttggcagtgcatctaatactaacctatgctttggtggccctcctagcaccagtgcctgctttagtggtgctaccagccctagtttttgtgatggacccagcaccagtaccggtttcagctttggcaatgggttaagcaccaatgctggatttggtggtggactgaacaccagtgctggctttggtggtggcctaggcaccagtgctggcttcagtggtggcctaagcacaagttctggctttgatggtgggctaggtaccagcgctggcttcggtggaggaccaggcaccagcactggttttggtggtggactgggcaccagtgctggcttcagtggcggactgggcaccagtgctggctttggtggtggactggtcactagtgatggctttggtggtggactgggcaccaatgctagtttcggcagcacacttggcaccagtgctggctttagtggtggcctcagcaccagcgatggctttggcagtaggcctaatgccagcttcgacagaggactgagtaccatcattggctttggcagtggttccaacaccagcactggctttactggcgaacccagcaccagcacgggcttcagtagtggacccagttctattgttggcttcagcggtggaccaagcactggtgttggcttctgcagtggaccaagcaccagtggcttcagcggtggaccgagcacaggagctggcttcggcggtggaccaaacactggtgctggctttggtggtggaccgagcaccagtgctggctttggcagtggagccgccagtcttggtgcctgtggcttctcgtatggctagtgaggtttcaggtaactgcaatatttccatagccaggacccacagggatgggtacaagagctgggagatgttgtaagaaacactaaggcaggacagcagggtggaaaggtgagggcaattaaggaattatgagaagacagtgtatttggtgctaaaatgtgttcctatttgttttgttttcagatttattccccatgtttacagataccgctaataaattgcagtagtccttcccatggagccaaagtacatccttggaatctttgtccacacagcagtcaaggcagttatggccaatcagctgagggtgtcatgtgatggaaaaatctgtttgctgttcctgctttattgtttgctttctgtgtgctgtcatattttggtatcagagttacattaaatttgcaaaatgaa

SEQ ID NO: 2056 - DNA, 941 bp, Homo sapiens; identical to SEQ ID NO: 1408

SEQ ID NO: 2057 - DNA, 6237 bp, Homo sapiens
ctcctctcttttggaaaccggagaggtggagggagggcaacaccgctgcaaaggagaggcccgccaagtctgcccgcctgcaaagtgttgctttgacacattcttattatggaagttaagtaaaaatatagacatattaaaaaataactccggacgtggagctgctacggagaaggaaaccgggggaaagaaaaccagtaggcaggccaatggtttttcggcagcgcgctggcaagtttgtggaacactttctaggaattaggtcttttcctcccccttcatcatcttgacttctgaaggaagaacttggctttggattgcagtggagcctaaggagagagggttagacacactcgaataatccctctggctgggctgaatttgtgggaatttaggaagccagagtgctggaaatacagcagcctttgaagtaccctctgttaatttggatggatctcagtgtgccccgttcgagacctctccaccaaccccttctgatcttgcgatttgctcttcttgactttaattagtatctaggaaagtctaaactttggacctacctctttttttgatactcatttttgtacttttgctctctgggattggtttcttaaagaatctggatcctttttaatatgtcaaaatgagtctgctgatgtttacacaactactgctctgtggatttttatatgttcgggttgatgaggatcgcgtcttcgccaggaggactttcccccgcggattgtggagcatccttccgatgtcatcgtctctaagggcgagcccacgactctgaactgcaaggcggagggccggccaacgcccaccattgagtggtacaaagatggggagcgagtggagactgacaaggacgatccccggtcccacaggatgcttctgcccagcggatccttattcttcttgcgcatcgtgcacgggcgcaggagtaaacctgatgaaggaagctacgtttgtgttgcgaggaactatcttggtgaagcagtgagtcgaaatgcgtctctggaagtggcattgttacgagatgacttccgacaaaaccccacagatgttgtagtggcagctggagagcctgcaatcctggagtgccagcctccccggggacacccagaacccaccatctactggaaaaaagacaaagttcgaattgatgacaaggaagaaagaataagtatccgtggtggaaaactgatgatctccaataccaggaaaagtgatgcagggatgtatacttgtgttggtaccaatatggtgggagaaagggacagtgacccagcagagctgactgtctttgaacgacccacatttctcaggaggccaattaaccaggtggtactggaggaagaagctgtagaatttcgttgtcaagtccaaggagatcctcaaccaactgtgaggtggaaaaaggatgatgcagacttgccaagaggaaggtatgacatcaaagacgattacacactaagaattaaaaagaccatgagtacagatgaaggcacctatatgtgtattgctgagaatcgggttggaaaaatggaagcctctgctacactcaccgtccgagctcccccacagtttgtggttcggccaagagatcagattgttgctcaaggtcgaacagtgacatttccctgtgaaactaaaggaaacccacagccagctgttttttggcagaaagaaggcagccagaacctacttttcccaaaccaaccccagcagcccaacagtagatgctcagtgtcaccaactggagacctcacaatcaccaacattcaacgttccgacgcgggttactacatctgccaggctttaactgtggcaggaagcattttagcaaaagctcaactggaggttactgatgttttgacagatagacctccacctataattctacaaggcccagccaaccaaacgctggcagtggatggtacagcgttactgaaatgtaaagccactggtgatcctcttcctgtaattagctggttaaaggagggatttacttttccgggtagagatccaagagcaacaattcaagagcaaggcacactgcagattaagaatttacggatttctgatactggcacttatacttgtgtggctacaagttcaagtggagagacttcctggagtgcagtgctggatgtgacagagtctggagcaacaatcagtaaaaactatgatttaagtgacctgccagggccaccatccaaaccgcaggtcactgatgttactaagaacagtgtcaccttgtcctggcagccaggtacccctggaacccttccagcaagtgcatatatcattgaggctttcagccaatcagtgagcaacagctggcagaccgtggcaaaccatgtaaagaccaccctctatactgtaagaggactgcggcccaatacaatctacttattcatggtcagagcgatcaacccccaaggtctcagtgacccaagtcccatgtcagatcctgtgcgcacacaagatatcagcccaccagcacaaggagtggaccacaggcaagtgcagaaagagctaggagatgtccttgtccgtcttcataatccagttgtgctgactcccaccacggttcaggtcacatggacggttgatcgccaaccccagtttatccaaggctaccgagtgatgtatcgtcagacttcaggtctgcaggcgacatcttcgtggcagaatttagatgccaaagtcccgactgaacgaagtgctgtcttagtcaacctgaaaaagggggtgacttatgaaattaaagtacggccatattttaatgagttccaaggaatggatagtgaatctaaaacggttcgtactactgaagaagccccaagtgccccaccacagtctgtcactgtactgacagttggaagctacaatagcacaagtattagtgtttcctgggatcctcctcctccagatcaccagaatggaattatccaagaatacaagatctggtgtctaggaaatgaaacgcgattccatatcaacaaaactgtggatgcagccattcggtccgtaataattggtggattattcccaggtattcaataccgggtagaggttgcagctagtaccagtgcaggggttggagtaaagagtgagccacagccaataataatcgggagacgcaatgaagttgtcattactgaaaacaataacagcataactgagcaaatcactgatgtggtgaagcaaccagcctttatagctggtattggtggtgcctgctgggtaattctgatgggttttagcatatggttgtattggcgaagaaagaagaggaagggactcagtaattatgctgttacgtttcaaagaggagatggaggactaatgagcaatggaagccgtccaggtcttctcaatgctggtgatcccagctatccatggcttgctgattcttggccagccacgagcttgccagtaaataatagcaacagtggcccaaatgagattggaaattttggccgtggagatgtgctgccaccagttccaggccaaggggataaaacagcaacgatgctctcagatggagccatttatagtagcattgacttcactaccaaaaccagttacaacagttccagccaaataacacaggctaccccatatgccacgacacagatcttgcattccaacagcatacatgaattggctgtcgatctgcctgatccacaatggaaaagctcaattcagcaaaaaacagatctgatgggatttggttattctctacctgatcagaacaaaggtaacaatggtgggaaaggtggaaaaaagaagaaaaataaaaactcttctaaaccacagaaaaacaatggatccacttgggccaatgtccctctacctccccccccagtccagccccttcctggcacggagctggaacactatgcagtggaacaacaagaaaatggctatgacagtgatagctggtgcccaccattgccagtacaaacttacttacaccaaggtctggaagatgaactggaagaagatgatgatagggtcccaacacctcctgttcgaggcgtggcttcttctcctgctatctcctttggacagcagtccactgcaactcttactccatccccacgggaagagatgcaacccatgctgcaggctcacctggatgagttgacaagagcctatcagtttgatatagcaaaacaaacatggcacattcaaagcaataatcaacctccacagcctccagttccaccgttaggttatgtgtctggagccttgatttctgatttggaaacggatgttgcagatgatgatgccgacgacgaagaggaagctttagaaatccccaggcccctgagagcactggaccagactcctggatccagcatggacaatctagacagctctgtgacaggaaaagcctttacctcctctcaaagacctcgacctaccagcccattttctactgacagtaacaccagtgcagccctgagtcaaagtcagaggcctcggcccactaaaaaacacaagggagggcggatggaccaacaaccagcattgcctcatcgaagggaaggaatgacagatgaggaggccttggtgccctatagcaagcccagtttcccatctccaggtggccacagctcatcaggaacagcttcttctaagggatccactggacctaggaaaaccgaggtgttgagagcaggccaccagcgcaatgccagcgaccttcttgacataggatatatgggctccaacagtcaaggacagtttacaggtgaattatagtaaatgagaggagacatacaaagctgctctgaaggaccatcaggtccggactcatggaagtgatgactctaaacagtgcaatgaacaatttatttatgtactattaaaagaactgtaaatgcaatgtaaagacacacagccacacatatcccacagatattttcattgtgttcttctcttaagtacaccacccaccttaactctttcttgtcaggagtatataaaaaagaaagaaaacaaaactcgccctacaggaagaaaaggattctcctctgtatataatttcttttgtgcattgctatgcaagctcactctttttagctctgctcatattattgtctgttcttattggtctgttgtactatatgtgaattaataggctgtggtgccatatattaacttttaattgtgtaacttttatgtttaaattttgcactgcaattttatttggtgataagcacaaatctctactcctcatgacatgaagaaaaagactgaatgtgaagggagtttctgtactgtaagctagattggataatgatggctgtaacaaatcatgttagatggttttcagttggggtgtagaaataggaagatgcaaaggaacaatggtgttggcaaagtcttctttgaatatcagggactgagtcaataaaaaaaatagtagaaaggtggcttttactattgacaaaagccggggtcaaaaaaagtagtttaagtcttaagactgaatatgcattaaagtatgcaggtagcaaagatgtaataaatttgcttaaaaaaagaaattaaagttttatttagaatcaattttacctgtcattgtaattgacccatctgagaattacaataagcaagaggaaattaaggtgttttgcaagagctgtatttatattacagttttttaaaaacattttctgaattatcgtaattaagctctccaactcgttaagtcagaatataatatgaagttccccaaggaaacgaacaaaatgaactctagaatatctagcaaatagttaaagaagcaatttattattagggcatactcgggctgtttccaaatataaactctattgcaatatcttatttcatctttctaatacatgtacagtgcacactagaggatagagctgcatcacttaaattcatgacttaaaaaataatacagtttatatacaacttgttttttatttgattaagaagtgaagtttacgccacccaatgtatagccaaattgtacgtgcttaaaaaacagtgccgagagtatgttcagttcgcagtaagtagatttattggaataaatattctatggtacattctcagaaattggcttccaactaaaatacgtttgacccattttgaataaggaaattgaaaagaaaaatttaaaaggagaaaaaaatgcatgtttataaactttttaaataaaaccagaccttgtaagtggacatt

SEQ ID NO: 2058 - DNA, 1634 bp, Homo sapiens; identical to SEQ ID NO: 514

SEQ ID NO: 2059 - DNA, 1682 bp, Homo sapiens
gggagcccccccgccccacatcctgccccgcaaaaggcagcttcaccaaagtggggtatttccagcctttgtagctttcacttccacatctaccaagtgggcggagtggccttctgtggacgaatcagattcctctccagcaccgactttaagaggcgagccggggggtcagggtcccagatgcacaggaggagaagcaggagctgtcgggaagatcagaagccagtcatggatgaccagcgcgaccttatctccaacaatgagcaactgcccatgctgggccggcgccctggggccccggagagcaagtgcagccgcggagccctgtacacaggcttttccatcctggtgactctgctcctcgctggccaggccaccaccgcctacttcctgtaccagcagcagggccggctggacaaactgacagtcacctcccagaacctgcagctggagaacctgcgcatgaagcttcccaagcctcccaagcctgtgagcaagatgcgcatggccaccccgctgctgatgcaggcgctgcccatgggagccctgccccaggggcccatgcagaatgccaccaagtatggcaacatgacagaggaccatgtgatgcacctgctccagaatgctgaccccctgaaggtgtacccgccactgaaggggagcttcccggagaacctgagacaccttaagaacaccatggagaccatagactggaaggtctttgagagctggatgcaccattggctcctgtttgaaatgagcaggcactccttggagcaaaagcccactgacgctccaccgaaagtactgaccaagtgccaggaagaggtcagccacatccctgctgtccacccgggttcattcaggcccaagtgcgacgagaacggcaactatctgccactccagtgctatgggagcatcggctactgctggtgtgtcttccccaacggcacggaggtccccaacaccagaagccgcgggcaccataactgcagtgagtcactggaactggaggacccgtcttctgggctgggtgtgaccaagcaggatctgggcccagctcctttgtccccatgtgagagcagcagaggcggtcttcaacatcctgccagccccacacagctacagctttcttgctcccttcagcccccagcccctcccccatctcccaccctgtacctcatcccatgagaccctggtgcctggctctttcgtcacccttggacaagacaaaccaagtcggaacagcagataacaatgcagcaaggccctgctgcccaatctccatctgtcaacaggggcgtgaggtcccaggaagtggccaaaagctagacagatccccgttcctgacatcacagcagcctccaacacaaggctccaagacctaggctcatggacgagatgggaaggcacagggagaagggataaccctacacccagaccccaggctggacatgctgactgtcctctcccctccagcctttggccttggcttttctagcctatttacctgcaggctgagccactctcttccctttccccagcatcactccccaaggaagagccaatgttttccacccataatcctttctgccgacccctagttccctctgctcagccaagcttgttatcagctttcagggccatggttcacattagaataaaaggtagtaattagaaca

SEQ ID NO: 2060 - DNA, 3383 bp, Homo sapiens; identical to SEQ ID NO: 2022

SEQ ID NO: 2061 - DNA, 4028 bp, Homo sapiens
agactgggtgcctgtggccctgggaggaggtggaaggggaggagcaggccacacaggcacaggccggtgagggacctgcccagacctggagaacccggtccctccctctccgcactagctgtctgccctgccctgccgtaggagatgggctgggagcctcccacgctctccagctcactcggcaggcagcggggaccagggctggcaggttaagcctctgggggtggatcctgaaaggtggtccagccgcctggccctgcgtgggaccctccacctggcagcagacagggtctcgctctgtcacacaggctggagtgcagtggtgtgatcttggctcatcgtaacctccacctcccgggttcaagtgattctcatgcctcagcctcccgagtagctgggattacaggtggtgacttccaagagtgactccgtcggaggaaaatgactccccagtcgctgctgcagacgacactgttcctgctgagtctgctcttcctggtccaaggcaggtcttcccagggcacacatgctaactcctttaggcagtgcagccctgcagcgtgcccacggcaggggccacagggaagactttcgcttctgcagccagcggaaccagacacacaggagcagcctccactacaaacccacaccagacctgcgcatctccatcgagaactccgaagaggccctcacagtccatgcccctttccctgcagcccaccctgcttcccgatccttccctgaccccaggggcctctaccacttctgcctctactggaaccgacatgctgggagattacatcttctctatggcaagcgtgacttcttgctgagtgacaaagcctctagcctcctctgcttccagcaccaggaggagagcctggctcagggccccccgctgttagccacttctgtcacctcctggtggagccctcagaacatcagcctgcccagtgccgccagcttcaccttctccttccacagtcctccccacacggccgctcacaatgcctcggtggacatgtgcgagctcaaaagggacctccagctgctcagccagttcctgaagcatccccagaaggcctcaaggaggccctcggctgcccccgccagccagcagttgcagagcctggagtcgaaactgacctctgtgagattcatgggggacatggtgtccttcgaggaggaccggatcaacgccacggtgtggaagctccagcccacagccggcctccaggacctgcacatccactcccggcaggaggaggagcagagcgagatcatggagtactcggtgctgctgcctcgaacactcttccagaggacgaaaggccggagcggggaggctgagaagagactcctcctggtggacttcagcagccaagccctgttccaggacaagaattccagccaagtcctgggtgagaaggtcttggggattgtggtacagaacaccaaagtagccaacctcacggagcccgtggtgctcactttccagcaccagctacagccgaagaatgtgactctgcaatgtgtgttctgggttgaagaccccacattgagcagcccggggcattggagcagtgctgggtgtgagaccgtcaggagagaaacccaaacatcctgcttctgcaaccacttgacctactttgcagtgctgatggtctcctcggtggaggtggacgccgtgcacaagcactacctgagcctcctctcctacgtgggctgtgtcgtctctgccctggcctgccttgtcaccattgccgcctacctctgctccagggtgcccctgccgtgcaggaggaaacctcgggactacaccatcaaggtgcacatgaacctgctgctggccgtcttcctgctggacacgagcttcctgctcagcgagccggtggccctgacaggctctgaggctggctgccgagccagtgccatcttcctgcacttctccctgctcacctgcctttcctggatgggcctcgaggggtacaacctctaccgactcgtggtggaggtctttggcacctatgtccctggctacctactcaagctgagcgccatgggctggggcttccccatctttctggtgacgctggtggccctggtggatgtggacaactatggccccatcatcttggctgtgcataggactccagagggcgtcatctacccttccatgtgctggatccgggactccctggtcagctacatcaccaacctgggcctcttcagcctggtgtttctgttcaacatggccatgctagccaccatggtggtgcagatcctgcggctgcgcccccacacccaaaagtggtcacatgtgctgacactgctgggcctcagcctggtccttggcctgccctgggccttgatcttcttctcctttgcttctggcaccttccagcttgtcgtcctctaccttttcagcatcatcacctccttccaaggcttcctcatcttcatctggtactggtccatgcggctgcaggcccggggtggcccctcccctctgaagagcaactcagacagcgccaggctccccatcagctcgggcagcacctcgtccagccgcatctaggcctccagcccacctgcccatgtgatgaagcagagattcggcctcgtcgcacactgcctgtggcccccgagcccggcccagccccaggccagtcagccgcagactttggaaagcccaacgaccatggagagatgggccgttgccatggtggacggactcccgggctgggcttttgaattggccttggggactactcggctctcactcagctcccacgggactcagaagtgcgccgccatgctgcctagggtactgtccccacatctgtcccaacccagctggaggcctggtctctccttacaacccctgggcccagccctcattgctgggggccaggccttggatcttgagggtctggcacatccttaatcctgtgcccctgcctgggacagaaatgtggctccagttgctctgtctctcgtggtcaccctgagggcactctgcatcctctgtcattttaacctcaggtggcacccagggcgaatggggcccagggcagaccttcagggccagagccctggcggaggagaggccctttgccaggagcacagcagcagctcgcctacctctgagcccaggccccctccctccctcagccccccagtcctccctccatcttccctggggttctcctcctctcccagggcctccttgctccttcgttcacagctgggggtccccgattccaatgctgttttttggggagtggtttccaggagctgcctggtgtctgctgtaaatgtttgtctactgcacaagcctcggcctgcccctgagccaggctcggtaccgatgcgtgggctgggctaggtccctctgtccatctgggcctttgtatgagctgcattgcccttgctcaccctgaccaagcacacgcctcagaggggccctcagcctctcctgaagccctcttgtggcaagaactgtggaccatgccagtcccgtctggtttccatcccaccactccaaggactgagactgacctcctctggtgacactggcctagggcctgacactctcctaagaggttctctccaagcccccaaatagctccaggcgccctcggccgcccatcatggttaattctgtccaacaaacacacacgggtagattgctggcctgttgtaggtggtagggacacagatgaccgacctggtcactcctcctgccaacattcagtctggtatgtgaggcgtgcgtgaagcaagaactcctggagctacagggacagggagccatcattcctgcctgggaatcctggaagacttcctgcaggagtcagcgttcaatcttgaccttgaagatgggaaggatgttctttttacgtaccaattcttttgtcttttgatattaaaaagaagtacatgttcattgtagagaatttggaaactgtagaagagaatcaagaagaaaaataaaaatcagctgttgtaatcacctagcaaactgg

SEQ ID NO: 2062 - DNA, 2803 bp, Homo sapiens; identical to SEQ ID NO: 526

SEQ ID NO: 2063 - DNA, 2784 bp, Homo sapiens; identical to SEQ ID NO: 2026

SEQ ID NO: 2064 - DNA, 4611 bp, Homo sapiens; identical to SEQ ID NO: 2029

SEQ ID NO: 2065 - DNA, 16883 bp, Homo sapiens
aagacggattctcagacaaggcttgcaaatgccccgcagccatcatttaactgcacccgcagaatagttacggtttgtcacccgaccctcccggatcgcctaatttgtccctagtgagaccccgaggctctgcccgcgcctggcttcttcgtagctggatgcatatcgtgctccgggcagcgcgggcgcagggcacgcgttcgcgcacaccctagcacacatgaacacgcgcaagagctgaaccaagcacggtttccatttcaaaaagggagacagcctctaccgcgattgtagaagagactgtggtgtgaattagggaccgggaggcgtcgaacggaggaacggttcatcttagagactaattttctggagtttctgcccctgctctgcgtcagccctcacgtcacttcgccagcagtagcagaggcggcggcggcggctcccggaattgggttggagcaggagcctcgctggctgcttcgctcgcgctctacgcgctcagtccccggcggtagcaggagcctggacccaggcgccgccggcgggcgtgaggcgccggagcccggcctcgaggtgcataccggacccccattcgcatctaacaaggaatctgcgccccagagagtcccgggagcgccgccggtcggtgcccggcgcgccgggccatgcagcgacggccgccgcggagctccgagcagcggtagcgcccccctgtaaagcggttcgctatgccggggccactgtgaaccctgccgcctgccggaacactcttcgctccggaccagctcagcctctgataagctggactcggcacgcccgcaacaagcaccgaggagttaagagagccgcaagcgcagggaaggcctccccgcacgggtgggggaaagcggccggtgcagcgcggggacaggcactcgggctggcactggctgctagggatgtcgtcctggataaggtggcatggacccgccatggcgcggctctggggcttctgctggctggttgtgggcttctggagggccgctttcgcctgtcccacgtcctgcaaatgcagtgcctctcggatctggtgcagcgacccttctcctggcatcgtggcatttccgagattggagcctaacagtgtagatcctgagaacatcaccgaaattttcatcgcaaaccagaaaaggttagaaatcatcaacgaagatgatgttgaagcttatgtgggactgagaaatctgacaattgtggattctggattaaaatttgtggctcataaagcatttctgaaaaacagcaacctgcagcacatcaattttacccgaaacaaactgacgagtttgtctaggaaacatttccgtcaccttgacttgtctgaactgatcctggtgggcaatccatttacatgctcctgtgacattatgtggatcaagactctccaagaggctaaatccagtccagacactcaggatttgtactgcctgaatgaaagcagcaagaatattcccctggcaaacctgcagatacccaattgtggtttgccatctgcaaatctggccgcacctaacctcactgtggaggaaggaaagtctatcacattatcctgtagtgtggcaggtgatccggttcctaatatgtattgggatgttggtaacctggtttccaaacatatgaatgaaacaagccacacacagggctccttaaggataactaacatttcatccgatgacagtgggaagcagatctcttgtgtggcggaaaatcttgtaggagaagatcaagattctgtcaacctcactgtgcattttgcaccaactatcacatttctcgaatctccaacctcagaccaccactggtgcattccattcactgtgaaaggcaaccccaaaccagcgcttcagtggttctataacggggcaatattgaatgagtccaaatacatctgtactaaaatacatgttaccaatcacacggagtaccacggctgcctccagctggataatcccactcacatgaacaatggggactacactctaatagccaagaatgagtatgggaaggatgagaaacagatttctgctcacttcatgggctggcctggaattgacgatggtgcaaacccaaattatcctgatgtaatttatgaagattatggaactgcagcgaatgacatcggggacaccacgaacagaagtaatgaaatcccttccacagacgtcactgataaaaccggtcgggaacatctctcggtctatgctgtggtggtgattgcgtctgtggtgggattttgccttttggtaatgctgtttctgcttaagttggcaagacactccaagtttggcatgaaaggttttgttttgtttcataagatcccactggatgggtagctgaaataaaggaaaagacagagaaaggggctgtggtgcttgttggttgatgctgccatgtaagctggactcctgggactgctgttggcttatcccgggaagtgctgcttatctggggttttctggtagatgtgggcggtgtttggaggctgtactatatgaagcctgcatatactgtgagctgtgattggggaacaccaatgcagaggtaactctcaggcagctaagcagcacctcaagaaaacatgttaaattaatgcttctcttcttacagtagttcaaatacaaaactgaaatgaaatcccattggattgtacttctcttctgaaaagtgtgctttttgaccctactggacatttattgacttaattgcttctgtttattaaaattgacctgcaaagttaaaaaaaaattaaagttgagaacaggtataagtgcacactgaatagtctaatctacatgtaacacatattttagtgtgattttctatactctaatcagcactgaattcagagggtttgactttttcatctataacacagtgactaaaagagttaagggtatatataccatcactttgggacttggtagtattattaaaaggttatttccttcactgtcaataaaagtccaaatgtttagcttaggtctgagagtcaaacaatgttaaggattgtcttaaagttccttagccagcaaaacaaaacaaaacaaaacaaacaaatgaaaaacgtttaaaaagaagaagaagaaaaaaaacaagaacaagcagcaacagctgttttgttggggctatagatttaagttaggcatagtcaatttcagaataactaagagtggaatatatgcatatggtgaaattataaccttgcccttttttatttgccctctgcgatccacctgctttttagaagtctgccgagtgagaaggccacagtatctcatgctgtttgcattacagaactgcagcttttctactctgaaaaggcctgggagcagaatggctggcctgctgtgagcaggagaggagattctaagaaggatagtcccccctacaacatactgtcatactgctgggttttcatgggtaggaaagcttgtcctgaccccagcagcaaagaggtggcaggtcgctaatgaatatatgctttataatgtccttcttcattgctgagagggcagccttagagctgtggatttctgcatcccccctgagtctgacccatggacacctgtttcattcactttagcatcacagtgacctttgtatgctctgttcagtctgtgtcaggcagtatgcttgtcctgaagagaggtttggctatccccaccccaccccaccccaccctgttccttttttatcaggaggacttcagagccaggcctgcagcattttgtttgaaaacacaatcagctctgacagttagacatgcacacagacgccatagctggattggaaacattgatgttttaaaaatttattttttttggaaatagttgcacaaatgctgcaatttagctttaaggttctatagatttttaactagtccaacacagtcagaaacattgttttgaatcctctgtaaaccaaggcattaatcttaataaaccaggatccatttaggtaccacttgatataaaaaggatatccataatgaatattttatactgcatcctttacattagccactaaatacgttattgcttgatgaagacctttcacagaatcctatggattgcagcatttcacttggctacttcatacccatgccttaaagaggggcagtttctcaaaagcagaaacatgccgccagttctcaagttttcctcctaactccatttgaatgtaagggcagctggcccccaatgtggggaggtccgaacattttctgaattcccattttcttgttcgcggctaaatgacagtttctgtcattacttagattccgatctttcccaaaggtgttgatttacaaagaggccagctaatagcagaaatcatgaccctgaaagagagatgaaattcaagctgtgagccaggcaggagctcagtatggcaaaggttcttgagaatcagccatttggtacaaaaaagatttttaaagcttttatgttataccatggagccatagaaaggctatggattgtttaagaactattttaaagtgttccagacccaaaaaggaaaaataaaaaaaaaggaatatttgtacccaacagctagaaggattgcaaggtagatttttgttttaaaatggagagaagtggacagataaggccatttaatatatcaaagatcagttgacatctcctagggaatgatgaaaacagcaggctattagaaaattatttcatatagttctcgtgttcttttcttttttttaatccctgaagggatgatcagtaacatagcttctcttttctgtactctagaccaccccttttcatcattttgctttttatgtctcccataagaaatgtgctttttagagcttcctaatgcatgtgttgcattattgcagcattagaaaaggagaggtagcatttttgctgaaatcgggcctgtcactctccaataaaggttctggcacttcaatgccaggcaggtctcctaaatgaacagaatgatctgtgtgagccgatgcctgcccttccagaggggccactgtccccagccgcagccaactgtgtcccacaggaatgggagcctaggtttccaaatcttgtgattctttaggagaaacatgaaacctggatttcgtgtgaaatgtcccgattgttaaaaagttggctcaattatttttaaaacattttgtaagccaacaaaagtctgtgggctgccagtttattacttttgtcttaaaacatgatcattgttctctcacggtatccttctgtcttcccgttgcaaattcacttttctttcttcctgacattgccattgagggctttgttaccacaagctaagaaactgagtttaacagcccagttatctgcaacatgtcaattacctttgctcctctcctgtgattcccaccatgctgtgaccctcagctgtctccctttgctgggaattctgcaccaatgtctcccctcaacccattccctggttggtcctactcccgtgtggccagagacatcctagcaaatccttcctcctattatatctgacactaatttcttttcaacagcgctcatgtctcttggcccagtcaggtgctgccaggtttagataggaaagtacatgtcccattttcatgggtgcccttaatgtggtccacgtcctatatcttattatatttactcatggctcaatgggggcctccagagaccctctcaggctgctgagctagactaaggaatgcatccaccgtcatcacatgagacactgactctgtgacgacaaaagtacaaacagtctgaggctaagaaaggttcatctcacaacaggaaaaacaaatctcaacacacattagagataattgattcaggggttttctctcccagtctcccagcagggactgatttcatttctgacccactaggttttctttccagaaataggtagcaaggacaagaactaaacaatcccagccccacccagcaacacagaacacaggagtttgcttttggcttctcactctccaagtaaccctgaattaggcccagaatggctgaggcttggagcatctcctcagacagagcagaggcgacacctcttcaggggtgtgtggagtaaatagctcgaagagctgaagacagaaaaccagtttcacgccaggtgcgagagagagcataatggagggaagcccgctttctctctcctcttcttttctctttatttctttagagcacttgacttttttttctctctctctctagtattctaaactgaccccatgaccaactgagaatttatttttgtttcattggttgtttcacagaattagaacacacacgactttttattcctccattgcaaaatggaatcaagatactacacaagacctgtgctttcttcctttgcatgatttacacctccgcctgttttggtgctagctgtctagaacttctctcttggtttgaatctgattccttcacactacactagaagtttatttcatcttgttttgtctagactccagatacagagggacagctggactgaggacaagcaattccatctagcatagggtctctcagggttggtgcatccagccacatgggcagggccagtcacatctagtctatgtccccagagcccttggagttgcgcagcttagctgacttgactccaaggaaattagtacagaagtaaccactctattaagtgtgttctgctatgttcacatgcctgtagtacctgcaaaccatgccaggttcatctaaagacataggggaagattaaggactcttttggacagaccatgaattgaatttgctgccaggtgctgccagactgaatttggctgacagaactcccagcccaggaaagttccatgacaatgactgtcgcagaaggaaatttcccactaaagtcagtccattttcaagttttggtcttcagagacaaaagaacgtcccagccacctgattttgatggtgaggtaactctaagttgaattcaggctagtgttgcagtatagctttggcatgttcatgagtgagcacccagaatgtgttgaaccaacccccacccctaactactgactatgactgcagtgggtttttatggggaaaaaaagtgtgaaaagcaaaaagaaaggaacagagattttttatcacctttattgtaagacagtccatttatgaattgagtataaacacatacaaagtaacaagagattcctaagaaacgcaaatccttgagtttcacgcacttcatgttcaaccatttgctgtaatccagaggcagcctgtgaatcattctcatgccctgttttttttttttttttcctataatgttctgggtttaaaagccatcttttccacattttctgtaaataatggataatcattttaaaaatttttatttttagtgctgttttaacaatgtagatagatcataaatgtacttgctgaattcaatcatttttaacaagccaataaagtttgataattcatctcatttctcatggtttggatttgggaaagtaaaatcaagacaaggtgttggcccagcctccgttatcagcaatgatgatgactctgccagcccactccatcacatctccaatgggagtaacactccatcttcttcggaaggtggcccagatgctgtcattattggaatgaccaagatccctgtcattgaaaatccccagtactttggcatcaccaacagtcagctcaagccagacacatggcccagaggttcccccaagaccgcctgataataatttggtatttggaggctcctgtgtcactgcaggaactaaaggaggctaaatccatgcctgatggaggagaagagttctatggttatctgcaaattctggccagacaacatcttgacgtcactccttagcttccataacctagccaagcaagaagttgcctttccaagacaaagcagtgtgctctaatgactaacccctcaaagtactatgccactttaactatagacccatctcctcgatcaatcaggatggcaagatggagctgaggagctcagcaacatcaagtctggagttggtctttaactcaactagctcgtttagacgtgtctgaacaccacatcacctgacagcacggggtggtttcccagtaaaatttacaaactcagctcaagggcagctgtgttgctttcctttccttgactgctgagaaactttttgacagggaacaatggaaacacaccttctgagctgaaacaaacaaacagaaacaaaacatactaaccagcaaaatccccaaatcatcaatcttgggttctcttgaagggcaggagtgtgttttatcttctcccgtcggagcaaacactatagatgtcctccctaaaattctgtcttccctagagcagccttgtaaattagctagggtcctagggttgaggcctaaatcaacttaaaattgtctctaaatatgtacctggatgtgtttgtacttgcagagcatgccctcttcatgtgcctagggctagtaactccctgtggcagaggcatgtaaagtattctgactttttttttttcaacttaattccatttccaatgaaatggatttttaaaaattttctccagagtgtgccatacttctccagctattatagttaatgtgtgtgtatccttgtgtatatgtgtgtttgtgtgtgcatatgtgttttcctagtggttacatgcttactaggcaattatgtaaataagcacagattcataggccagctaggcctgaggaaagaagacattataaagggagggagtattttaacattagctaaagctatcacacaaggcacccattctgctcccctcaacagccacagcccacttcgtccttgtcttaccaataaggggaaaggctggaggtgatatttttcacagaaccgcagaggttttgaacatatttgcaacattactttgagtacacatgagcaaaaattctgaattacatccaggaccccagaagctcattagatcaaagagtgcggggcccctcagagttaccagagattatctgcagacttcagtgcaatcgaatgaccatggtccattttgatggtcagaggtaggactgaaaaacgggtagaaacaattgctttagcgcttccttctgtactttgcctattaatgttttgtctttcaaaaatatattttctcctaattgtttaattggccaaataatggctgctttgggagttgtttgtatgccttggaaggccatggcctgcactttaaaaataagctaagtccattctgcccagcacgagcattaggacagagaatgcacttattttaggatccttaaaaattgcttcttttatggcacactgggttgacgactcatctcgtgggagccttcatggcacattgctgctgttctgcaggtcccaatacaattccttccccctctcagtgccacggcccccccattgctagctacaacaatttgatatcatattcccttttcaactccaaaggagatgataagaagctatcaaataatgctttaaaaaagcaacttgagtttcttaaaagaaaggaaatgaatacatgctgcataattacatttaaaatgtaagccatgttattataagccgcactgagatgaagatttgttagcaaaccagtttcaagcacactcacagtgaagtaaaatcatgtttttagcatctgaccattgggtaatattattctttgttatcaaaagagaaatatcacccaagtatagtatacttagacctcctagaggaaacactccagtcctaagcttggtgtctgaaaagaaaaacaaaaataaagattatggatttaggtcagggagacagagtgatattctgaagactgtgtttactccctcatcatcggccaaccaagatggagttctgcatcctgcacatatcagacatttcagtccaatttcaccaaagcatcagtgatgttctagaagcatcccagcagatggaggatcctaatgtatttgttctgggtatttcccaaggcccagcctgactggagtgtgtgtaccaacaggatgaatccaatcaagctacgcccccattttggtttcggattggccactcttgcatgtgctagtagattgtggaccaggaccagctgagcaaacacagttgcagagtagcctcctatgttgctaagaagctcctgctacccaggtgctttgaacaattgagtgctccctctggttaagtagagatggcaccaccggagtttttcttggatgtgaggctcaatcctttacggcagctattataacaaagtgaaggttttctccctgggaaatgcagcttttctctgtctttactaattctgccagcctgtgagagtaaccaccgtagctgggcttcttctcagattaattgtcatgccaggtctccttcctggggagctgtgatgctgctctgaggttgattgctgaggttgtagtgggtttttgtttgtttttgtttagtttttcttgattgttcttctttctcttgaatggcaagagaagaaacactttctctaacccacggccaggaaggaaatggggagagagctacttcttagttcaacctggttgccacataaaggaatctctctccttggactcagcccctaactggaagcaagagccactgccctctgagactgagagagcagcccgaggaggagatgaatccattctgccctttgtttgggtttgcttcctgtcagtgagagaatgctgaggcagttcctgttatgtgaaactttcatttttaaaaccaggacagtcctaaacagactggaatgagttggtcaatcccagttggtataggcccaatgatttttgctagtaagataggattgtcttcctcacccaaaatgccttcaagtgccctaaaatgggtattttaaaataagaataaataatgtagatttagtagaaaacctggaaaacataagaaacaaagatgaaacgaaaagtcccatgtaattccaccagttagagttaaccactgatatcgtttggatatatggctttctagtcttgtggatatccttttaatctcttgtaatataaagtctgaccatatgtgtccttgcatttgtttgtactggactctgttaatatttctatagtaatggctcactttggggagattgtgctgcacagtgtgtaggaagcacattgggtgtattattcccagttttgtattttgtatttccttggagatgtgcaggggttaagagcgggggtctggccatagctggccacgtcagactctcatatggtaagtatcacagagcacatgaggcctgtgttatgcgctggaaagactcaggaaatgagaggctctcttgttctgacaaggcaggctgagagctctcatttagggtcatcactccagataactccaaatgcagtttattgctcaactgaagcagatgatcactttttgcctccaagttcttcaccctagctagctcctttcaaagagccgagtatgctggatcttaaagggccaaactagttacatctcatacatttcctgatgtttagggatgccttcacttccatcaaggataccttggctgtgcaaggacctctgatagctggagtctccttttggtcactcccagctttgcttaaacttgatggagtttgctgtccagtgatccccggatctttcatcatgaaagccttccttcctctcctgatgtctcaggcctctagacctagactggggttctggcaaggaggcctctatcaatagtatgacatccaataatatgttagtgttgatattttgcacagtaatattaagtttaagagattataaaaatgagttcaaatgaataagttcctgtgatgtaagagattagatatgtgtgatttcagaaccaaaggcaggggggaatcccagaaagaaaacaataatataatcctagtttctatatattatttttattcattactgtatatgggtagagatcaatattctttcttatgctgttactattaattaacacattttttaaccatgccattgaacttttgggtgcattaaagtggaacccaagctcctcattagataataatggcatttggactgagtgccatattcctaaatttccaataaagtggttgatatagagaggacaggataaagccctatagtgtgcagttatatcaaaacagctagtctccactttagggaatgcctttactagagattacatgaaatgtctgcttataaaataagcagagatggcaccactaagcagccacctgaattgttttcctacaggaatgattacttttcagatccatttatgttttcatgctcaatacttactccccttccctgcaacacccaaagagtttacttttgcaagtcatttggtcttcagtctactactgaggaatagagaggcactaactgctttacccaggatcagaactcatgttcttaccttctattaatagagtacttgagccagatggactaactggtctcacattttctctatcttggttttacttccataaacatcaatatctttacccacatgatttttccatcctcccatttttttccatatgtattagggttcaggaactatgatgctaatgatcacatttcttcctagttcctaatttcattagtgccatttcctgatatctacagaaacaattatcaatacatgtagctgcttgagccttatttagaaggctagcctttcttttccaagtgctgtcagaatgtatacatttagtctgtctttttcccttttaggagtctttgttctgggttgatggcaaaattcctctttttacatgtgagatttttgatttcactgaattctacctagatttttatggacattggattttaaagaggaaaacactcattttcttagtaagatattggtgatacatagctatgccattgatttccatactcctgagctttggggagggagacagtggccaagtagcaggcagaataagatcatcactcatgtcctgaatcaatcacactttccttctcggattgtgtatatgctctgccacttcctacatattacatcctgagtttttaagtaaagtggatcttagccagatttgagtctaatggctgattcatcggcatagttcttggcgttaacatctcagtgtcctctttagttctctttgaggattcatgtcattgagggcctttgtgcctccacttgtctcagtatgaggaagaactttggtgtgagggcggagctatgtgaagggttgctgggttgggggattagttcatatggtccccatgccatctatttacttttggagagaggggactttgagtgggtgggtatggatagatgttcctcaaggaaaccctgctggctaatgggcactacatctgtgtattactgtgattctctctgtaagctccccatgtggccaaggacccccctcctaccagggcacttcctgccacctcattgcactggtctcaaccattcagcctgctgctgctgcaccatgttgggctgcggtaggatagggaaggggttctgttgattgctaaatgttgcctaactttatttccctctcccacatttcatgcaagggagcggacctaacacatgacttgcattctcttcctatgttcagaaactccagggcttgcccacgtgtatgtatgagtgaccaatggagcttggaattctttatctatatgatctgtccgaaaatgagatcttttgtactggaatttgtgatgtagttgatcattcagagccaaacgcatataccaataaagacaagactgtcatatattgttcagcacatcaagcgacataacattgttctgaaaagggagctaggcgaaggagcctttggaaaagtgttcctagctgaatgctataacctctgtcctgagcaggacaagatcttggtggcagtgaagaccctgaaggatgccagtgacaatgcacgcaaggacttccaccgtgaggccgagctcctgaccaacctccagcatgagcacatcgtcaagttctatggcgtctgcgtggagggcgaccccctcatcatggtctttgagtacatgaagcatggggacctcaacaagttcctcagggcacacggccctgatgccgtgctgatggctgagggcaacccgcccacggaactgacgcagtcgcagatgctgcatatagcccagcagatcgccgcgggcatggtctacctggcgtcccagcacttcgtgcaccgcgatttggccaccaggaactgcctggtcggggagaacttgctggtgaaaatcggggactttgggatgtcccgggacgtgtacagcactgactactacagggtcggtggccacacaatgctgcccattcgctggatgcctccagagagcatcatgtacaggaaattcacgacggaaagcgacgtctggagcctgggggtcgtgttgtgggagattttcacctatggcaaacagccctggtaccagctgtcaaacaatgaggtgatagagtgtatcactcagggccgagtcctgcagcgaccccgcacgtgcccccaggaggtgtatgagctgatgctggggtgctggcagcgagagccccacatgaggaagaacatcaagggcatccataccctccttcagaacttggccaaggcatctccggtctacctggacattctaggctagggcccttttccccagaccgatccttcccaacgtactcctcagacgggctgagaggatgaacatcttttaactgccgctggaggccaccaagctgctctccttcactctgacagtattaacatcaaagactccgagaagctctcgagggaagcagtgtgtacttcttcatccatagacacagtattgacttctttttggcattatctctttctctctttccatctcccttggttgttcctttttctttttttaaattttctttttcttttttttttcgtcttccctgcttcacgattcttaccctttcttttgaatcaatctggcttctgcattactattaactctgcatagacaaaggccttaacaaacgtaatttgttatatcagcagacactccagtttgcccaccacaactaacaatgccttgttgtattcctgcctttgatgtggatgaaaaaaagggaaaacaaatatttcacttaaactttgtcacttctgctgtacagatatcgagagtttctatggattcacttctatttatttattattattactgttcttattgtttttggatggcttaagcctgtgtataaaaaagaaaacttgtgttcaatctgtgaagcctttatctatgggagattaaaaccagagagaaagaagatttattatgaaccgcaatatgggaggaacaaagacaaccactgggatcagctggtgtcagtccctacttaggaaatactcagcaactgttagctgggaagaatgtattcggcaccttcccctgaggacctttctgaggagtaaaaagactactggcctctgtgccatggatgattcttttcccatcaccagaaatgatagcgtgcagtagagagcaaagatggcttccgtgagacacaagatggcgcatagtgtgctcggacacagttttgtcttcgtaggttgtgatgatagcactggtttgtttctcaagcgctatccacagaacctttgtcaacttcagttgaaaagaggtggattcatgtccagagctcatttcggggtcaggtgggaaagccaagaacttggaaaagataagacaagctataaattcggaggcaagtttcttttacaatgaacttttcagatctcacttccctccgacccctaacttccatgcccacccgtccttttaactgtgcaagcaaaattgtgcatggtcttcgtcgattaataccttgtgtgcagacactactgctccagacgtcgtttccctgataggtagagcagatccataaaaaggtatgacttatacaattaggggaagctaatggagtttattagctgagtatcaatgtctctgcgttgtacggtggtgatgggttttaatgaatatggaccctgaagcctggaaatcctcatccacgtcgaacccacaggactgtgggaagggcagaatcaatccctaagggaaaggaaacctcaccctgagggcatcacatgcactcatgttcagtgtacacaggtcaagtcccttgctctgggctctagttgggagagtggtttcattccaagtgtactccattgtcagtatgctgtttttgtttccttcactccattcaaaaagtcaaaatacaaaatttggcacagcatgccaacgggaggctgtgcccagaccaagcactggaagtgtgcttctaggcatagtcattggttttgcaaaaagagggctcaaatttaaatagaaatttacagctatttgaatggtcagatataccaagaaagaaaaatatttctgttcctcaagaaaacttgctaccctctgtgaggggaattttgctaaacttgacatctttataacatgagccagattgaaagggagtgattttcattcatcttaggtcatgttatttcatatttgtttctgaaggtgcgatagctctgttttaggttttgcttgcgcctgttaattactggaacaccttatttttcattaaaggctttgaaagccaattctcaaaaattcaaaagtgcaaattaacagaacaaaaggaaatccagtagcaactgcagtcaagcgagggagttgacaagataaaccttacgtccattcaagttatatgctggcctatgagagatgagagttgggtcgtttgttctctttgttgatgattt

SEQ ID NO: 2066 - DNA, 1025 bp, Homo sapiens
atgagagccccgctgctaccgccggcgccagtggtgctgtcgctcttgatactcggctcaggccattatgctgctggattggacctcaatgacacctactctgggaagcgtgaaccattttctggggaccacagtgctgatggatttgaggttacctcaagaagtgagatgtcttcagggagtgagatttcccctgtgagtgaaatgccttctagtagtgaaccgtcctcgggagccgactatgactactcagaagagtatgataacgaaccacaaatacctggctatattgtcgatgattcagtcagagttgaacaggtagttaagcccccccaaaacaagacggaaagtgaaaatacttcagataaacccaaaagaaagaaaaagggaggcaaaaatggaaaaaatagaagaaacagaaagaagaaaaatccatgtaatgcagaatttcaaaatttctgcattcacggagaatgcaaatatatagagcacctggaagcagtaacatgcaaatgtcagcaagaatatttcggtgaacggtgtggggaaaagtccatgaaaactcacagcatgattgacagtagtttatcaaaaattgcattagcagccatagctgcctttatgtctgctgtgatcctcacagctgttgctgttattacagtccagcttagaagacaatacgtcaggaaatatgaaggagaagctgaggaacgaaagaaacttcgacaagagaatggaaatgtacatgctatagcataactgaagataaaattacaggatatcacattggagtcactgccaagtcatagccataaatgatgagtcggtcctctttccagtggatcataagacaatggaccctttttgttatgatggttttaaactttcaattgtcactttttatgctatttctgtatataaaggtgcacgaaggtaaaaagtattttttcaagttgtaaataatttatttaatatttaatggaagtgtatttattttacagctcattaaacttttttaaccaaac

SEQ ID NO: 2067 - DNA, 5537 bp, Homo sapiens
ggtgcgctgggcgcggcgtcccctgcgttgtcctcctgctgccgcccccgcggccgccgctttctgccgcggggaccctgagccccggcccgccggtgtcagccgccgcgcgcgcgcacagacacacacacagagacacacaaacacacacagaaaagacacacacgcgcacacacggcgcgcacaccctcacgcccgccacagccacaacacgcccgcacgcgccctccctctccggcccgcaacttctcggtcctcggctcctttgttgctccagccgcggccgctcgcccgtgttgtgtgtccccggtgtcaccgagcgtgttgtgtgtccgtgcggcgcggcgctgtgtggctccctcgcgcccaccacgctggcccccgggccccggctcgcccttcccaggcgccggctgcagcagaggtttctcatagttggcgtcttctaaaggaaaaacactaaaatgaggaactcagcggaccgggagcgacgcagcttgagggaagcatccctagctgttggcgcagaggggcgaggctgaagccgagtggcccgaggtgtctgaggggctggggcaaaggtgaaagagtttcagaacaagcttcctggaacccatgacccatgaagtcttgtcgacatttataccgtctgagggtagcagctcgaaagtagaagaagtggttagagatagtttttctcatcctcaagtattgggagtccaactttgagtggaatctggactaaacttcagagtgttgccagggacggcagtatctctttgtgtgaccctggcggcttatgggacgttggcttcagacctttgtgatacaccatgctgcgtgggacgatgacggcgtggagaggaatgaggcctgaggtcacactggcttgcctcctcctagccacagcaggctgctttgctgacttgaacgaggtccctcaggtcaccgtccagcctgcgtccaccgtccagaagcccggaggcactgtgatcttgggctgcgtggtggaacctccaaggatgaatgtaacctggcgcctgaatggaaaggagctgaatggctcggatgatgctctgggtgtcctcatcacccacgggaccctcgtcatcactgcccttaacaaccacactgtgggacggtaccagtgtgtggcccggatgcctgcgggggctgtggccagcgtgccagccactgtgacactagccagtgagtctgctcctttgcctccctgccatggtgcggtccctcctcatctctcccaccctgaagcccccaccattcatgctgcctcttgttactcttagcataaaatgggccttaactgcagaaatgtcaaatcagaacagtagctgcctagtaatgcccagtgatgggggacccttgtgcccttggaaaacctcactccaagtagaggctgtatctggagtgagtgtctacagagaggggaattggtcagtgcatggcagaacttgacatggcagaactgttccgtgggccccagagcagggccgtgccgtgccttcctacttggtcatcctgtggctgtaggtgcactgtcccaactgctcacacaccttccagtcccctccctccattctcaccacagttacagtcggagcagggagagacaggacaccaagagacatgggcagggccacgtgtagtctggacagagcccacccagcccagacttggcctcctgtctctctgtgaggggcaagcatagtccgaaggcctggattataaatattagaacataatgaaaaggaaactgtgtggcaaagggataaagggatacagagaaaagaaacaaggaagagatgaggtgacagtttggaccaaggaaaatgccaagagaagacttcacactaccttttttttttctggttttgccattcttttattcatgttgttacactcagtataggatagtttattaaaatcattatgtctgtagacattctaatctccaggacttcaagttagatgtgcagcacgtgattgaagtggatgagggaaacacagcagtcattgcctgccacctgcctgagagccaccccaaagcccaggtccggtacagcgtcaaacaagagtggctggaggcctccagaggtaactacctgatcatgccctcagggaacctccagattgtgaatgccagccaggaggacgagggcatgtacaagtgtgcagcctacaacccagtgacccaggaagtgaaaacctccggctccagcgacaggctacgtgtgcgccgctccaccgctgaggctgcccgcatcatctaccccccagaggcccaaaccatcatcgtcaccaaaggccagagtctcattctggagtgtgtggccagtggaatcccacccccacgggtcacctgggccaaggatgggtccagtgtcaccggctacaacaagacgcgcttcctgctgagcaacctcctcatcgacaccaccagcgaggaggactcaggcacctaccgctgcatggccgacaatggggttgggcagcccggggcagcggtcatcctctacaatgtccaggtgtttgaaccccctgaggtcaccatggagctatcccagctggtcatcccctggggccagagtgccaagcttacctgtgaggtgcgtgggaaccccccgccctccgtgctgtggctgaggaatgctgtgcccctcatctccagccagcgcctccggctctcccgcagggccctgcgcgtgctcagcatggggcctgaggacgaaggcgtctaccagtgcatggccgagaacgaggttgggagcgcccatgccgtagtccagctgcggacctccaggccaagcataaccccaaggctatggcaggatgctgagctggctactggcacacctcctgtatcaccctccaaactcggcaaccctgagcagatgctgagggggcaaccggcgctccccagacccccaacgtcagtggggcctgcttccccgcagtgtccaggagagaaggggcagggggctcccgccgaggctcccatcatcctcagctcgccccgcacctccaagacagactcatatgaactggtgtggcggcctcggcatgagggcagtggccgggcgccaatcctctactatgtggtgaaacaccgcaagcaggtcacaaattcctctgacgattggaccatctctggcattccagccaaccagcaccgcctgaccctcaccagacttgaccccgggagcttgtatgaagtggagatggcagcttacaactgtgcgggagagggccagacagccatggtcaccttccgaactggacggcggcccaaacccgagatcatggccagcaaagagcagcagatccagagagacgaccctggagccagtccccagagcagcagccagccagaccacggccgcctctcccccccagaagctcccgacaggcccaccatctccacggcctccgagacctcagtgtacgtgacctggattccccgtgggaatggtgggttcccaatccagtccttccgtgtggagtacaagaagctaaagaaagtgggagactggattctggccaccagcgccatccccccatcgcggctgtccgtggagatcacgggcctagagaaaggcacctcctacaagtttcgagtccgggctctgaacatgctgggggagagcgagcccagcgccccctctcggccctacgtggtgtcgggctacagcggtcgcgtgtacgagaggcccgtggcaggtccttatatcaccttcacggatgcggtcaatgagaccaccatcatgctcaagtggatgtacatcccagcaagtaacaacaacaccccaatccatggcttttatatctattatcgacccacagacagtgacaatgatagtgactacaagaaggatatggtggaaggggacaagtactggcactccatcagccacctgcagccagagacctcctacgacattaagatgcagtgcttcaatgaaggaggggagagcgagttcagcaacgtgatgatctgtgagaccaaagctcggaagtcttctggccagcctggtcgactgccacccccaactctggccccaccacagccgccccttcctgaaaccatagagcggccggtgggcactggggccatggtggctcgctccagcgacctgccctatctgattgtcggggtcgtcctgggctccatcgttctcatcatcgtcaccttcatccccttctgcttgtggagggcctggtctaagcaaaaacatacaacagacctgggttttcctcgaagtgcccttccaccctcctgcccgtatactatggtgccattgggaggactcccaggccaccaggccagtggacagccctacctcagtggcatcagtggacgggcctgtgctaatgggatccacatgaataggggctgcccctcggctgcagtgggctacccgggcatgaagccccagcagcactgcccaggcgagcttcagcagcagagtgacaccagcagcctgctgaggcagacccatcttggcaatggatatgacccccaaagtcaccagatcacgaggggtcccaagtctagcccggacgagggctctttcttatacacactgcccgacgactccactcaccagctgctgcagccccatcacgactgctgccaacgccaggagcagcctgctgctgtgggccagtcaggggtgaggagagcccccgacagtcctgtcctggaagcagtgtgggaccctccatttcactcagggcccccatgctgcttgggccttgtgccagttgaagaggtggacagtcctgactcctgccaagtgagtggaggagactggtgtccccagcaccccgtaggggcctacgtaggacaggaacctggaatgcagctctccccggggccactggtgcgtgtgtcttttgaaacaccacctctcacaatttaggcagaagctgatatcccagaaagactatatattgttttttttttaaaaaaaaaaagaagaaaaaagagacagagaaaattggtatttatttttctattatagccatatttatatatttatgcacttgtaaataaatgtatatgttttataattctggagagacataaggagtcctacccgttgaggttggagagggaaaataaagaagctgccacctaacaggagtcacccaggaaagcaccgcacaggctggcgcgggacagactcctaacctggggcctctgcagtggcaggcgaggctgcaggaggcccacagataagctggcaagaggaaggatcccaggcacatggttcatcacgagcatgagggaacagcaaggggcacggtatcacagcctggagacacccacacagatggctggatccggtgctacgggaaacattttcctaagatgcccatgagaacagaccaagatgtgtacagcactatgagcattaaaaaaccttccagaatcaataatccgtggcaacatatctctgtaaaaacaaacactgtaacttctaaataaatgtttagtcttccctgtaaccttcaaa

SEQ ID NO: 2068 - DNA, 6529 bp, Homo sapiens
ataacgtctttgtcactaaaatgttccccaggggccttcggcgagtctttttgtttggttttttgtttttaatctgtggctcttgataatttatctagtggttgcctacacctgaaaaacaagacacagtgtttaactatcaacgaaagaactggacggctccccgccgcagtcccactccccgagtttgtggctggcatttgggccacgccgggctgggcggtcacagcgaggggcgcgcagtttggggtcacacagctccgcttctaggccccaaccaccgttaaaaggggaagcccgtgccccatcaggtccgctcttgctgagcccagagccatcccgcgctctgcgggctgggaggcccgggccaggacgcgagtcctgcgcagccgaggttccccagcgccccctgcagccgcgcgtaggcagagacggagcccggccctgcgcctccgcaccacgcccgggaccccacccagcggcccgtacccggagaagcagcgcgagcacccgaagctcccggctggcggcagaaaccgggagtggggccgggcgagtgcgcggcatcccaggccggcccgaacgctccgcccgcggtgggccgacttcccctcctcttccctctctccttcctttagcccgctggcgccggacacgctgcgcctcatctcttggggcgttcttccccgttggccaaccgtcgcatcccgtgcaactttggggtagtggccgtttagtgttgaatgttccccaccgagagcgcatggcttgggaagcgaggcgcgaacccggcccccgaagggccgccgtccgggagacggtgatgctgttgctgtgcctgggggtcccgaccggccgcccctacaacgtggacactgagagcgcgctgctttaccagggcccccacaacacgctgttcggctactcggtcgtgctgcacagccacggggcgaaccgatggctcctagtgggtgcgcccactgccaactggctcgccaacgcttcagtgatcaatcccggggcgatttacagatgcaggatcggaaagaatcccggccagacgtgcgaacagctccagctgggtgagtagccctaatggagaaccttgtggaaagacttgtttggaagagagagacaatcagtggttgggggtcacactttccagacagccaggagaaaatggatccatcgtgacttgtgggcatagatggaaaaatatattttacataaagaatgaaaataagctccccactggtggttgctatggagtgccccctgatttacgaacagaactgagtaaaagaatagctccgtgttatcaaggtagcatcagcaagtacagagctaggacataacagaagtgagcagaattggggtgaatgtcaacagagcatgtcagaggatatctgcagcaaaactaaaatccaacaatgcgtctttaggagctaagaaacatatgaatgcaaattcataattttctaaccaccctcactcaaaaaaaatccctcagcacgcaaagaaaaattttattggttggcaaaactttggccaagtatttgagttcaattatgggtgctaataagactttggtctttcttccttggaatgtgatgtcacagagcagcttatattacatatattcctattttgccttcggatacccaaaagataaaaaagtgaatattgattctcagttgcaataaaactcagtcttgatttctgattatgtgaaaaaatttggagaaaattttgcatcatgtcaagctggaatatccagtttttacacaaaggatttaattgtgatgggggccccaggatcatcttactggactggctctctttttgtctacaatataactacaaataaatacaaggcttttttagacaaacaaaatcaagtaaaatttggaagttatttaggatattcagtcggagctggtcattttcggagccagcatactaccgaagtagtcggaggagctcctcaacatgagcagattggtaaggcatatatattcagcattgatgaaaaagaactaaatatcttacatgaaatgaaaggtaaaaagcttggatcgtactttggagcttctgtctgtgctgtggacctcaatgcagatggcttctcagatctgctcgtgggagcacccatgcagagcaccatcagagaggaaggaagagtgtttgtgtacatcaactctggctcgggagcagtaatgaatgcaatggaaacaaacctcgttggaagtgacaaatatgctgcaagatttggggaatctatagttaatcttggcgacattgacaatgatggctttgaagatgttgctatcggagctccacaagaagatgacttgcaaggtgctatttatatttacaatggccgtgcagatgggatctcgtcaaccttctcacagagaattgaaggacttcagatcagcaaatcgttaagtatgtttggacagtctatatcaggacaaattgatgcagataataatggctatgtagatgtagcagttggtgcttttcggtctgattctgctgtcttgctaaggacaagacctgtagtaattgttgacgcttctttaagccaccctgagtcagtaaatagaacgaaatttgactgtgttgaaaatggatggccttctgtgtgcatagatctaacactttgtttctcatataagggcaaggaagttccaggttacattgttttgttttataacatgagtttggatgtgaacagaaaggcagagtctccaccaagattctatttctcttctaatggaacttctgacgtgattacaggaagcatacaggtgtccagcagagaagctaactgtagaacacatcaagcatttatgcggaaagatgtgcgggacatcctcaccccaattcagattgaagctgcttaccaccttggtcctcatgtcatcagtaaacgaagtacagaggaattcccaccacttcagccaattcttcagcagaagaaagaaaaagacataatgaaaaaaacaataaactttgcaaggttttgtgcccatgaaaattgttctgctgatttacaggtttctgcaaagattgggtttttgaagccccatgaaaataaaacatatcttgctgttgggagtatgaagacattgatgttgaatgtgtccttgtttaatgctggagatgatgcatatgaaacgactctacatgtcaaactacccgtgggtctttatttcattaagattttagagctgttgtttcatttttcccattaggaagagaagcaaataaactgtgaagtcacagataactctggcgtggtacaacttgactgcagtattggctatatatatgtagatcatctctcaaggatagatattagctttctcctggatgtgagctcactcagcagagcggaagaggacctcagtatcacagtgcatgctacctgtgaaaatgaagaggaaatggacaatctaaagcacagcagagtgactgtagcaatacctttaaaatatgaggttaagctgactgttcatgggtttgtaaacccaacttcatttgtgtatggatcaaatgatgaaaatgagcctgaaacgtgcatggtggagaaaatgaacttaactttccatgttatcaacactggcaatagtatggctcccaatgttagtgtggaaataatggtaccaaattcttttagcccccaaactgataagctgttcaacattttggatgtccagactactactggagaatgccactttgaaaattatcaaagagtgtgtgcattagagcagcaaaagagtgcaatgcagaccttgaaaggcatagtccggttcttgtccaagactgataagaggctattgtactgcataaaagctgatccacattgtttaaatttcttgtgtaattttgggaaaatggaaagtggaaaagaagccagtgttcatatccaactggaaggccggccatccattttagaaatggatgagacttcagcactcaagtttgaaataagagcaacaggttttccagagccaaatccaagagtaattgaactaaacaaggatgagaatgttgcgcatgttctactggaaggactacatcatcaaagacccaaacgttatttcaccatagtgattatttcaagtagcttgctacttggacttattgtacttctattgatctcatatgttatgtggaaggctggcttctttaaaagacaatacaaatctatcctacaagaagaaaacagaagagacagttggagttatatcaacagtaaaagcaatgatgattaaggacttctttcaaattgagagaatggaaaacagactcaggttgtagtaaagaaatttaaaagacactgtttacaagaaaaaatgaattttgtttggacttcttttactcatgatcttgtgacatattatgtcttcatgcaaggggaaaatctcagcaatgattactctttgagatagaagaactgcaaaggtaataatacagccaaagataatctctcagcttttaaatgggtagagaaacactaaagcattcaatttattcaagaaaagtaagcccttgaagatatcttgaaatgaaagtataactgagttaaattatactggagaagtcttagacttgaaatactacttaccatatgtgcttgcctcagtaaaatgaaccccactgggtgggcagaggttcatttcaaatacatctttgatacttgttcaaaatatgttctttaaaaatataattttttagagagctgttcccaaattttctaacgagtggaccattatcactttaaagccctttatttataatacatttcctacgggctgtgttccaacaaccattttttttcagcagactatgaatattatagtattataggccaaactggcaaacttcagactgaacatgtacactggtttgagcttagtgaaattacttctggataattatttttttataattatggatttcaccatctttctttctgtatatatacatgtgtttttatgtaggtatatatttaccattcttcctatctattcttcctataacacacctttatcaagcatacccaggagtaatcttcaaatcttttgttatattctgaaacaaaagattgtgagtgttgcactttacctgatacacgctgatttagaaaatacagaaaccatacctcactaataactttaaaatcaaagctgtgcaaagactagggggcctatacttcatatgtattatgtactatgtaaaatattgactatcacacaactatttccttggatgtaattctttgttaccctttacaagtataagtgttaccttacatggaaacgaagaaacaaaattcataaatttaaattcataaatttagctgaaagatactgattcaatttgtatacagtgaatataaatgagacgacagcaaaattttcatgaaatgtaaaatatttttatagtttgttcatactatatgaggttctattttaaatgactttctggattttaaaaaatttctttaaatacaatcatttttgtaatatttattttatgcttatgatctagataattgcagaatatcattttatctgactctgccttcataagagagctgtggccgaattttgaacatctgttatagggagtgatcaaattagaaggcaatgtggaaaaacaattctgggaaagatttctttatatgaagtccctgccactagccagccatcctaattgatgaaagttatctgttcacaggcctgcagtgatggtgaggaatgttctgagatttgcgaaggcatttgagtagtgaaatgtaagcacaaaacctcctgaacccagagtgtgtatacacaggaataaactttatgacatttatgtatttttaaaaaactttgtatcgttataaaaaggctagtcattctttcaggagaacatctaggatcatagatgaaaaatcaagccccgatttagaactgtcttctccaggatggtctctaaggaaatttacatttggttctttcctactcagaactactcagaaacaactatatatttcaggttatctgagcacagtgaaagcagagtactatggttgtccaacacaggcctctcagatacaaggggaacacaattacatattgggctagattttgcccagttcaaaatagtatttgttatcaacttactttgttacttgtatcatgaattttaaaaccctaccactttaagaagacagggatgggttattcttttttggcaggtaggctatataactatgtgattttgaaatttaactgctctggattagggagcagtgaatcaaggcagacttatgaaatctgtattatatttgtaacagaatataggaaatttaacataattgatgagctcaaatcctgaaaaatgaaagaatccaaattatttcagaattatctaggttaaatattgatgtattatgatggttgcaaagtttttttgtgtgtccaataaacacattgtaaaaaaaagaatttgaattgatatctaaaaa

SEQ ID NO: 2069 - DNA, 1750 bp, Homo sapiens
gaggagtggattacatattccaacagttgttattacattggtaaggaaagaagaacttgggaagaaagagtttgctggcctgtgcttcgaagaactctgatctgctttctatagataatgaggaagaaatggtatgtgtggggacttcccagttggctgtaagttgccatttgaactaaacgaaatagatcaggaactgaggacatatctaaattttctagttttatagaaggcttttatccacaagaatcaagatcttccctctctgagcaggaatcctttgtgcattgaagactttagattcctctctgcggtagacgtgcacttataagtatttgatggggtggattcgtggtcggaggtctcgacacagctgggagatgagtgaatttcataattataacttggatctgaagaagagtgatttttcaacacgatggcaaaagcaaagatgtccagtagtcaaaagcaaatgtagagaaaatgcatctccattttttttctgctgcttcatcgctgtagccatgggaatccgtttcattattatggtaacaatatggagtgctgtattcctaaactcattattcaaccaagaagttcaaattcccttgaccgaaagttactgtggcccatgtcctaaaaactggatatgttacaaaaataactgctaccaattttttgatgagagtaaaaactggtatgagagccaggcttcttgtatgtctcaaaatgccagccttctgaaagtatacagcaaagaggaccaggatttacttaaactggtgaagtcatatcattggatgggactagtacacattccaacaaatggatcttggcagtgggaagatggctccattctctcacccaacctactaacaataattgaaatgcagaagggagactgtgcactctatgcctcgagctttaaaggctatatagaaaactgttcaactccaaatacgtacatctgcatgcaaaggactgtgtaaagatgatcaaccatctcaataaaagccaggaacagagaagagattacaccagcggtaacactgccaactgagactaaaggaaacaaacaaaaacaggacaaaatgaccaaagactgtcagatttcttagactccacaggaccaaaccatagaacaatttcactgcaaacatgcatgattctccaagacaaaagaagagagatcctaaaggcaattcagatatccccaaggctgcctctcccaccacaagcccagagtggatgggctgggggaggggtgctgttttaatttctaaaggtaggaccaacacccaggggatcagtgaaggaagagaaggccagcagatcactgagagtgcaaccccaccctccacaggaaattgcctcatgggcagggccacagcagagagacacagcatgggcagtgccttccctgcctgtgggggtcatgctgccacttttaatgggtcctccacccaacggggtcagggaggtggtgctgccccagtgggccatgattatcttaaaggcattattctccagccttaagtaagatcttaggacgtttcctttgctatgatttgtacttgcttgagtcccatgactgtttctcttcctctctttcttccttttggaatagtaatatccatcctatgtttgtcccactattgtattttggaagcacataacttgtttggtttcacaggttcacagttaagaaggaattttgcctctgaataaatagaatcttgagtctcatgca

SEQ ID NO: 2070 - DNA, 760 bp, Homo sapiens; identical to SEQ ID NO: 311

SEQ ID NO: 2071 - DNA, 1977 bp, Homo sapiens; identical to SEQ ID NO: 252

SEQ ID NO: 2072 - DNA, 3008 bp, Homo sapiens; identical to SEQ ID NO: 278

SEQ ID NO: 2073 - DNA, 474 bp, Homo sapiens; identical to SEQ ID NO: 249

SEQ ID NO: 2074 - DNA, 4109 bp, Homo sapiens; identical to SEQ ID NO: 94

SEQ ID NO: 2075 - DNA, 2929 bp, Homo sapiens; identical to SEQ ID NO: 51

SEQ ID NO: 2076 - DNA, 2034 bp, Homo sapiens; identical to SEQ ID NO: 919

SEQ ID NO: 2077 - DNA, 4986 bp, Homo sapiens; identical to SEQ ID NO: 50

SEQ ID NO: 2078 - DNA, 14829 bp, Homo sapiens; identical to SEQ ID NO: 297

SEQ ID NO: 2079 - DNA, 3917 bp, Homo sapiens; identical to SEQ ID NO: 319

SEQ ID NO: 2080 - DNA, 1553 bp, Homo sapiens; identical to SEQ ID NO: 270

SEQ ID NO: 2081 - DNA, 4722 bp, Homo sapiens; identical to SEQ ID NO: 258

SEQ ID NO: 2082 - DNA, 2586 bp, Homo sapiens; identical to SEQ ID NO: 74

SEQ ID NO: 2083 - DNA, 628 bp, Homo sapiens; identical to SEQ ID NO: 294

SEQ ID NO: 2084 - DNA, 2035 bp, Homo sapiens; identical to SEQ ID NO: 265

SEQ ID NO: 2085 - DNA, 3037 bp, Homo sapiens; identical to SEQ ID NO: 1277

SEQ ID NO: 2086 - DNA, 5518 bp, Homo sapiens; identical to SEQ ID NO: 334

SEQ ID NO: 2087 - DNA, 5190 bp, Homo sapiens; identical to SEQ ID NO: 44

SEQ ID NO: 2088 - DNA, 2547 bp, Homo sapiens; identical to SEQ ID NO: 56

SEQ ID NO: 2089 - DNA, 2102 bp, Homo sapiens; identical to SEQ ID NO: 298

SEQ ID NO: 2090 - DNA, 1578 bp, Homo sapiens; identical to SEQ ID NO: 81

SEQ ID NO: 2091 - DNA, 631 bp, Homo sapiens
ggggagctcggctcttgagacaggaatcttgcccattccccgaacgaataaaccccttccttaactcagcgtctgaggaattttgtctgcggctcctcctgctacattctgagtggggaaagggactaaggtggtctgaggaccccacagagtcaggaagattgagagctccccagcctgataaaggtcctgcgggcaggacaggacctcccaaccaagccctccagcaaggattcagagagtgcccctccggcctcgccatgaggctcttcctgtcgctcccggtcctggtggtggttctgtcgatcgtcttggaaggcccagccccagcccaggggaccccagacgtctccagtgccttggataagctgaaggagtttggaaacacactggaggacaaggctcgggaactcatcagccgcatcaaacagagtgaactttctgccaagatgcgggagtggttttcagagacatttcagaaagtgaaggagaaactcaagattgactcatgaggacctgaagggtgacatcccaggaggggcctctgaaatttcccacaccccagcgcctgtgctgaggactccctccatgtggccccaggtgccaccaataaaaatcctacagaaaattc

SEQ ID NO: 2092 - DNA, 6377 bp, Homo sapiens; identical to SEQ ID NO: 105

SEQ ID NO: 2093 - DNA, 4948 bp, Homo sapiens
gtgaactgttgcaccgtgcaattgcacactataaatgtctttccttatctgtgtgtactcttatctcactgttctattttttctcctcatttatattaactctttcttacctttttttctgaacttctaggccttctctttccagaactggtggaagacaaatgaaacggccaagatggtaaggcattagagtcaaggattacattcttcctggagccaagcatggggccagctgtaaacaagccgcatttctccttggggagactgataatttaaaaggtttgttgtgtcagaaacattcccagcttcatcaccaaccctttccttccacctctgcccactggagaccacttatatcccgaagcggacgcggcagctgaagtcaggaaaccatgcatcacattagcaggagccaactgcagactttaaactccgttcaacatgtggatgcggcagagaaatgacctgtccagacaagccggggcagctcataaactggttcatctgctccctgtgcgtcccgcgggtgcgtaagctctggagcagccggcgtccaaggacccggagaaaccttctgctgggcactgcgtgtgccatctacttgggcttcctggtgagccaggtggggagggcctctctccagcatggacaggcggctgagaaggggccacatcgcagccgcgacaccgccgagccatccttccctgagatacccctggatggtaccctggcccctccagagtcccagggcaatgggtccactctgcagcccaatgtggtgtacattaccctacgctccaagcgcagcaagccggccaatatccgtggcaccgtgaagcccaagcgcaggaaaaagcatgcagtggcatcggctgccccagggcaggaggctttggtcggaccatcccttcagccgcaggaagcggcaagggaagctgatgctgtagcacctgggtacgctcagggagcaaacctggttaagattggagagcgaccctggaggttggtgcggggtccgggagtgcgagccgggggcccagacttcctgcagcccagctccagggagagcaacattaggatctacagcgagagcgccccctcctggctgagcaaagatgacatccgaagaatgcgactcttggcggacagcgcagtggcagggctccggcctgtgtcctctaggagcggagcccgtttgctggtgctggaggggggcgcacctggcgctgtgctccgctgtggccctagcccctgtgggcttctcaagcagcccttggacatgagtgaggtgtttgccttccacctagacaggatcctggggctcaacaggaccctgccgtctgtgagcaggaaagcagagttcatccaagcagcagcagcagcgtgtctttccatgcgcttggcattctttattttcccagcctgggaggatatgagagttccagggaaatgctgtattggacatgcaagaatggccgcccatgccccatcattctttgggatgcatctttatcttcagcaagtaatgacacccattcttctgttaagctcacctggggaacttatcagcagttgctgaaacagaaatgctggcagaatggccgagtacccaagcctgaatcgggttgtactgaaatacatcatcatgagtggtccaagatggcactctttgattttttgttacagatttataatcgcttagatacaaattgctgtggattcagacctcgcaaggaagatgcctgtgtacagaatggattgaggccaaaatgtgatgaccaaggttctgcggctctagcacacattatccagcgaaagcatgacccaaggcatttggtttttatagacaacaagggtttctttgacaggagtgaagataacttaaacttcaaattgttagaaggcatcaaagagtttccagcttctgcagtttctgttttgaagagccagcacttacggcagaaacttcttcagtctctgtttcttgataaagtgtattgggaaagtcaaggaggtagacaaggaattgaaaagcttatcgatgtaatagaacacagagccaaaattcttatcacctatatcaatgcacacggggtcaaagtattacctatgaatgaatgacaaaagaatcttctggctagggtgttagatatatttatgcatttttggttttgtttttaaatcaagcacatcaacctcaagcccgtttagcaatgaggcagtgtagatgaatacgtaaaataaatgactttaaccaagtagctataatgggacttagcactgtatgcatacttaaaaaggttttgaaaaacaaactacttgagaaatatttgtttatatttttctctaacatcatgctatgtgtcagtctgaacatctgacaacagaaatttcagttattattctagctaagttttgaaaacatttgtcatgctgtttaatagaaaactgcaaaccagagacactgactccattaataaaccatattttgtgccgttttgactgttctgaccaaatactaatgggaacaattcttgacgtttttctgttgctgattgttaacatagagcagtctctacactaccctgaggcaactctacattggaacactgaggcttacagcctgcaagagcatcagagctgaccatacatttaaacagaaatgctggtttatttgcaaaatcaccagtatattttctattgtgtctataaaaaatcagtcatttaagtacaagaatcatattttccattcctttttagaaatttattttgttgtccctatggaaatcattcacatctgacaatttatatgttaaagagttttactctctctattttggtccaatttgtatctagtggctgagaaattaaataattctaaagtatgaagttacctatctgaaaatgtacttacagagtatcattttaaaatggatgtctctttaaaaattttgttacttttaccaacaatgtaatataatttatgtatattttattaataatagtgaattccttaaaatttgttctatgtacttatatttaatttgatttaatggttactgcccagatattgagaattggttcaaatattgagtgtgtttcaatatattatctggcttatttcaacatgagtaatatgagcaaaataagttaaaacctgcgtctgatcaattttcctcatgactagaactaaaacagtaaatttggacaatattaagcctcaaataatcatctccaaactccttctaacactttttaaatcagattggaagacatggacaaatcaggttcatgtgttgcatctttatgtcctttgccaatatccaagatcatcacatatggtagatattcacatggagtttcaaattcagaatagattaccattaccttcctgcccttacacatcctactccttatttaaaagttctatttgtgacttttcatttcctgaaagtttaaaaatacaatttgagaatgtttataatacattctctcctgtcttttcacggttacgtctgttattgctgaaatacaccacattttctttgttctggtcaaggttaactcaatatctgtgtgaaagagaactactaacaacgttacaatagaggctagatttgaaaaaaaaaatctatagatctaattgatacaattgtagaacaaaatgtcaaaataatgttttaagtataagagaagatggaccaaggagagagagatcatttgaaaatctaattgtagcttttctaggctcacattcatgtactacttttagcacccttatgggctgtgctcgccccctggacagttgagctttggattatcttcctcttcaattttccctctattgacccgagtgtctccctctgcttctacagatttatagtactccttggctcttttgagtctccacttttactcactgtctctgggatttttaagatccttttcttctcttataaatcatcctcttaatgaaaattagcctaacaaaagtttggagactggaatcctactttgagccactgacttgaaataactcttttggcaagttgcctgacatcctgtcttaccaaggtggcatatttgcatttttactgcttaaaacatttttttttttttaccatctttatccaaatttatcatattgatggtaggactaacaggctttttagaagctggctttaactttgagtctcaagctacaatgctgttgggcagcctggtcttcccacgtgagggtttaactttgtttatttgcctccagttattccaaaatgcttattaaatgaaagtcccaggaacatgtttattttagtcacctttgctttttaacaattttgttttgtaatcaatgagtaattcatgatgaattatttttgactaatggatagccgaaggccaggcttttaattctaataggtaatgttcttcttttgtcttattgaaacaatgagaatactctgtgcatttcaaatgcactccgattatgctgtggttttattcacataagcacaatatgtgttttatttataacttcataacaaacttataatataataatttaccttagcagacatgcaaaagcttattcttgtgtgacttactttctttaagctaataatataaaaataaatatgtatcttaaaaatctataataaaacattagaaattaaagatatgtgctttttattttgcagatgagttcatttgcttttgtagatgtgttttcagagctaggtacagaggaatgtttgctacctttagcggtgaaaaaagaaagagagtcaagaattttgttggattgtgtttgtgtgtgcatatatttgatatcatcattatatttgtaatctttggacttgtaatcatagcctgtttattctactgtgccattaaatatactttaccttatacataacgaataaaatacctagaagtagatttatttaca

SEQ ID NO: 2094 - DNA, 1940 bp, Homo sapiens; identical to SEQ ID NO: 1311

SEQ ID NO: 2095 - DNA, 5844 bp, Homo sapiens; identical to SEQ ID NO: 1014

SEQ ID NO: 2096 - DNA, 1536 bp, Homo sapiens; identical to SEQ ID NO: 332

SEQ ID NO: 2097 - DNA, 3965 bp, Homo sapiens; identical to SEQ ID NO: 276

SEQ ID NO: 2098 - DNA, 2544 bp, Homo sapiens; identical to SEQ ID NO: 373

SEQ ID NO: 2099 - DNA, 2995 bp, Homo sapiens; identical to SEQ ID NO: 329

SEQ ID NO: 2100 - DNA, 1594 bp, Homo sapiens
tggaggcctggctggtgctcacatacaataattaactgctgagtggccttcgcccaatcccaggctccactcctgggctccattcccactccctgcctgtctcctaggccactaaaccacagctgtcccctggaataaggcaagggggagtgtagagcagagcagaagcctgagccagacggagagccacctcctctcccagggaaaggattttctcagcccccatccccagcactgtgtgttggccgcacccatgagagcctcagcactctgaaggtgcagggggcaaaggccaaaagagctctggcctgaacttgggtggtccctactgtgtgacttggggcatggccctcatctgtgctgaaatgattccacaaagattaaactggctatcatttgttgatttcccccttcttacatttaatccttgcaggagaaagctaagcctcaagatagtttgcttctctttcccccaaggccaaggagaaggtggagtgagggctggggtcgggacaggttgaacgggaaccctgtgctctaaacagttagggtttgttcccgcaggaactgaacccaaaggatcacctggtattccctgagagtacagatttctccggcgtggccctcaagcattccttggtgccactgaccacagctctttcttcagggacagacatggctcagcggatgacaacacagctgctgctccttctagtgtgggtggctgtagtaggggaggctcagacaaggattgcatgggccaggactgagcttctcaatgtctgcatgaacgccaagcaccacaaggaaaagccaggccccgaggacaagttgcatgagcagtgtcgaccctggaggaagaatgcctgctgttctaccaacaccagccaggaagcccataaggatgtttcctacctatatagattcaactggaaccactgtggagagatggcacctgcctgcaaacggcatttcatccaggacacctgcctctacgagtgctcccccaacttggggccctggatccagcaggtggatcagagctggcgcaaagagcgggtactgaacgtgcccctgtgcaaagaggactgtgagcaatggtgggaagattgtcgcacctcctacacctgcaagagcaactggcacaagggctggaactggacttcagggtttaacaagtgcgcagtgggagctgcctgccaacctttccatttctacttccccacacccactgttctgtgcaatgaaatctggactcactcctacaaggtcagcaactacagccgagggagtggccgctgcatccagatgtggttcgacccagcccagggcaaccccaatgaggaggtggcgaggttctatgctgcagccatgagtggggctgggccctgggcagcctggcctttcctgcttagcctggccctaatgctgctgtggctgctcagctgacctccttttaccttctgatacctggaaatccctgccctgttcagccccacagctcccaactatttggttcctgctccatggtcgggcctctgacagccactttgaataaaccagacaccgcacatgtgtcttgagaattatttgg

SEQ ID NO: 2101 - DNA, 1925 bp, Homo sapiens; identical to SEQ ID NO: 248

SEQ ID NO: 2102 - DNA, 3280 bp, Homo sapiens; identical to SEQ ID NO: 54

SEQ ID NO: 2103 - DNA, 2104 bp, Homo sapiens; identical to SEQ ID NO: 366

SEQ ID NO: 2104 - DNA, 5367 bp, Homo sapiens; identical to SEQ ID NO: 296

SEQ ID NO: 2105 - DNA, 1971 bp, Homo sapiens; identical to SEQ ID NO: 1282

SEQ ID NO: 2106 - DNA, 750 bp, Homo sapiens; identical to SEQ ID NO: 1269

SEQ ID NO: 2107 - DNA, 2805 bp, Homo sapiens
atggtccgaggggggcggggctgacgtcgcgctgggaatgccctggccgagacactgaggcagggtagagagcgcttgcgggcgccgggcggagctgctgcggatcaggacccgagccgattcccgatcccgacccagatcctaacccgcgcccccgccccgccgccgccgccatgtacgacgcagagcgcggctggagcttgtccttcgcgggctgcggcttcctgggcttctaccacgtcggggcgacccgctgcctgagcgagcacgccccgcacctcctccgcgacgcgcgcatgttgttcggcgcttcggccggggcgttgcactgcgtcggcgtcctctccggtatcccgctggagcagactctgcaggtcctctcagatcttgtgcggaaggccaggagtcggaacattggcatcttccatccatccttcaacttaagcaagttcctccgacagggtctctgcaaatgcctcccggccaatgtccaccagctcatctccggcaaaataggcatctctcttaccagagtgtctgatggggaaaacgttctggtgtctgactttcggtccaaagacgaagtcgtggatgccttggtatgttcctgcttcatccccttctacagtggccttatccctccttccttcagaggcgtgcgatatgtggatggaggagtgagtgacaacgtacccttcattgatgccaaaacaaccatcaccgtgtcccccttctatggggagtacgacatctgccctaaagtcaagtccacgaactttcttcatgtggacatcaccaagctcagtctacgcctctgcacagggaacctctaccttctctcgagagcttttgtccccccggatctcaaggtgctgggagagatatgccttcgaggatatttggatgcattcaggttcttggaagagaagggcatctgcaacaggccccagccaggcctgaagtcatcctcagaagggatggatcctgaggtcgccatgcccagctgggcaaacatgagtctggattcttccccggagtcggctgccttggctgtgaggctggagggagatgagctgctagaccacctgcgtctcagcatcctgccctgggatgagagcatcctggacaccctctcgcccaggctcgctacagcactgagtgaagaaatgaaagacaaaggtggatacatgagcaagatttgcaacttgctacccattaggataatgtcttatgtaatgctgccctgtaccctgcctgtggaatctgccattgcgattgtccagagactggtgacatggcttccagatatgcccgacgatgtcctgtggttgcagtgggtgacctcacaggtgttcactcgagtgctgatgtgtctgctccccgcctccaggtcccaaatgccagtgagcagccaacaggcctccccatgcacacctgagcaggactggccctgctggactccctgctcccccaagggctgtccagcagagaccaaagcagaggccaccccgcggtccatcctcaggtccagcctgaacttcttcttgggcaataaagtacctgctggtgctgaggggctctccacctttcccagtttttcactagagaagagtctgtgagtcacttgaggaggcgagtctagcagattctttcagaggtgctaaagtttcccatctttgtgcagctacctccgcattgctgtgtagtgacccctgcctgtgacgtggaggatcccagcctctgagctgagttggttttatgaaaagctaggaagcaacctttcgcctgtgcagcggtccagcacttaactctaatacatcagcatgcgttaattcagctggttgggaaatgacaccaggaagcccagtgcagagggtcccttactgactgtttcgtggccctattaatggtcagactgttccagcatgaggttcttagaatgacaggtgtttggatgggtgggggccttgtgatggggggtaggctggcccatgtgtgatcttgtggggtggagggaagagaatagcatgatcccacttccccatgctgtgggaaggggtgcagttcgtccccaagaacgacactgcctgtcaggtggtctgcaaagatgataaccttgactactaaaaacgtctccatggcgggggtaacaagatgataatctacttaattttagaacacctttttcacctaactaaaataatgtttaaagagttttgtataaaaatgtaaggaagcgttgttacctgttgaattttgtattatgtgaatcagtgagatgttagtagaataagccttaaaaaaaaaaaaatcggttgggtgcagtggcacacggctgtaatcccagcactttgggaggccaaggttggcagatcacctgaggtcaggagttcaagaccagtctggccaacatagcaaaaccctgtctctactaaaaatacaaaaattatctgggcatggtggtgcatgcctgtaatcccagctattcggaaggctgaggcaggagaatcacttgaacccaggaggcggaggttgcggtgagctgagattgcaccatttcattccagcctgggcaacatgagtgaaagtctgactcaaaaaaaaaaaatttaaaaaacaaaataatctagtgtgcagggcattcacctcagccccccaggcaggagccaagcacagcaggagcttccgcctcctctccactggagcacacaacttgaacctggcttattttctgcagggaccagccccacatggtcagtgagtttctccccatgtgtggcgatgagagagtgtagaaataaagac

SEQ ID NO: 2108 - DNA, 2367 bp, Homo sapiens; identical to SEQ ID NO: 1058

SEQ ID NO: 2109 - DNA, 4221 bp, Homo sapiens; identical to SEQ ID NO: 304

SEQ ID NO: 2110 - DNA, 2244 bp, Homo sapiens; identical to SEQ ID NO: 340

SEQ ID NO: 2111 - DNA, 3650 bp, Homo sapiens; identical to SEQ ID NO: 46

SEQ ID NO: 2112 - DNA, 3574 bp, Homo sapiens
gcggcggcggcggcggcggctggagagggtcctcggcagcctctgaggagcgcggggcgcggccatgagcgagtccagcggcagtgcgctccagcccggcaggcccagccggcagccggcggtccatccagagaacctctctctagactccagttgcttctcttctccacctgtgaacttcctccaagaattgccaagctaccggtccattgcacgtaggagaacgactgtccattcccgggacaagcaaagcggaactttgctaaagccaaccgactcttacagctcccagctggaggacagaatcgctgaaaacctcagcagccattctcttcgaaattatgcactgaacatctctgagaagcggagactaagggacattcaagagacacaaatgaagtatctctccgaatgggaccagtggaagcggtatagcagcaagtcttggaagaggttcctagagaaggctcgagagatgacgacccacctggagctgtggcgggaggacatccgcagcatagaagggaaatttggcactgggattcagtcctatttctccttcttgagattcctggtgttgctgaatttggtgatatttctgatcatctttatgctggttttgctcccagtcttactcacgaaatacaagatcaccaacagcagcttcgtgctcattcctttcaaagacatggataaacaatgtacagtctatccagtaagcagttctggactcatttacttttacagttatatcatagacttgctttctggcactggtttcctggaggaaactagcctcttttacggacattacaccattgatggggtgaaatttcagaacttcacctatgatctgcccctggcgtatttgttaagcacaatcgcctccctggccctgagccttctttggatagtgaaaaggtcggtggaaggattcaaaatcaacctgattcggagtgaggagcactttcagagttactgcaacaagatatttgccggctgggacttctgcatcactaaccgcagcatggcggatctgaagcacagcagcttgcggtacgagctccgagcagatctggaggaagaaagaatgcggcagaaaatagcagaaaggacctcagaagaaacaatacgcatttactctttgagactgtttttgaactgtattgttctggctgttttaggggcatgcttttatgcaatatacgtagcaactgtcttctcgcaagagcacatgaaaaaggaaatcgacaagatggtttttggagagaacctcttcatattgtatctaccgtctattgtgatcacgctggccaattttatcaccccaatgatctttgccaagatcatccgctatgaggattattctccaggctttgagatccgtctgacaatccttaggtgtgtctttatgcggctggccaccatatgtgtcctggtgttcacgctgggctccaagatcacatcctgtgatgatgacacatgtgacctttgcggctacaaccagaaactctacccgtgctgggagacccaagttgggcaggaaatgtacaagctgatgatcttcgacttcatcatcatcttggctgtgacactcttcgtggattttcctagaaagctcctggtgacctactgttcctcttgcaagctgattcagtgctgggggcagcaggagtttgccattcctgataacgtcctggggatagtttacgggcaaaccatctgctggatcggagcctttttctcaccccttctccctgcaattgcaaccctgaaattcattatcatcttctatgtgaaagagtggagtctgctttacacctgcagaccctcccccaggccgttcagagcatccaattctaatttcttcttcctgttggtgttgttgatcgggctgtgtttggcaataatacctctgacaatcagcatatcacgcatcccttcctcgaaagcctgtgggccgttcaccaacttcaacaccacctgggaggtcatccccaagacggtgagcaccttccccagctcgctgcagtccttcatccatggtgtcacatccgaagcctttgcagttcctttcttcatgattatttgcctcatcatgttttacttcattgccttagctggagcacacaaacgggtggtcatccagctccgagagcagctatccctggaaagtcgtgacaagtgctacctaatccagaaactaacagaagcccaaagggacatgaggaactaactagactgagcgtgaagatggtgctgcctgttgcttctaagctgacctagtgattctgctgagcctacagagtctacctgggttttgagtggacatttaaaaatatatttttcttgagtttaggcttttccatatgtgcagctgtgtttacctaacccagcccttaattagggcttcagtgacttagaaaagcaggggaaacccaaggctttgcctgcagaccggccactctgtgacaactctaccaaaaaccaacaagccattcaagcttttacaagaatgaaagagcggagacggtagtttagtatttgagccacgagtttatgtgcacaagtgttttgggttgtggactgaagctcagcctgttaatcagaccagcccatgagtgtataacaaacagaattggaggctggtttcttaaacacacacgtccacattttttagggttgttttcctgtgcttacaatttttaatgcatgtgcctttatttcacaaaacatgtggctgggcgcagcggctcacgcctgttatcccaacactttgggaggccgaggcaggcggagcacctaagttggggagttcaagaccagcctgaccaacgtggagaaactccgtctccactaaaatacaaaattagctgggtgtggtggcacatgcctgtaatatcagctactcaggaggctgaggcaggagaattgcttgaacccaggaggtggagtttgcagtgagctgagatcacaccattgcactccagcctgggcaaaaagagcaaaactctccctaaaaaaaaaatgtagaatatctcttaagatttccgttatggtaaaaaccatatgcaataaatacctcattgtaagcttacccaaaattgatagatgtcaaccttttaacagaagaacagaagtttaagttattgtttaatgtaatcagttttcattttaatatctttgaaatctttttcaaaggactgtagttttgtaatggacttttcaagccttccttccattgtttttcttccgttcactggctccacacgtttcctggggagtagcctggaatttaaagttgggtgcaggttttagaaagctgttgctgttaacaataattctcccggccatctccactccactactcaaaaatgcctgaatccttgctcagaggagcaaaggtatcttctcgtccctttcttacagccattttcttgcttttccacaaagatattatttaaagtggaatatttttgtaactgggataccaatgagcttttcggtcttttcctgacttggtaaggtttatgggtttctaaatctaataactacagtcataccaccctgaaaa

SEQ ID NO: 2113 - DNA, 1968 bp, Homo sapiens; identical to SEQ ID NO: 1302

SEQ ID NO: 2114 - DNA, 4355 bp, Homo sapiens
cgcctaatcttcacccgctgctaggctcgtttaatgagtcttctgagagctaaggagtcctcggattcattcaaagcattctacaatgaacgctaggggggaaaaagaacaaacaaaatacatttcaaatataggattcaattacttttcactactcaatgatgtgtcaaaggcacgctgtgttttgttttgagggcggggagatgacaggagggaatcctgggcccccattggctcgccgctcgccgctgcagttgagctccagccgctccgagagcattattgatctgaagggtaaatgtggagggagccacagagaggggtccaggcttttctgagaagagaggcagcctcttccaggaagaaagtggtgtctactggctgcccggcctggagaaccttctttgaatgaaaacggacaaaatgcaaagcagtgtgttggcacagtgatttggaaaggggaaacagaagagaagggtctcaccttccgcgcaaggctgagctgttggcaccctgctgcggccgtcggtgctgctgctcctgcagctgccttttctgccatcagttgtctttccagctttgttacctaacagcttggctcttttgggaaatatagacaagctggaacccaggagcagttgggagttttaaagaatgccagcctttttaaagctttgatgtccagtgctatagaatcaagttactgtggaggtcaaaacaatttgagatacataagctggccttagaaaataaattgcctctaacttacagtgaggagctcaacataacagggaaaaggagcacaggatgcagctacttggagggtgttgattgaaaacttcgatctccccaccccattcacggttgatttgacggatttctcacctcgttcacagagaaaatttcaattaaggcccctttagatggaatataatacagcagaagccttttcatcaaaaggattaatgcctgcatcatcatttctgcaataaaacaagaagctaagtggtggaggccacagacacctcaaacctggattccacaattctacgttaagtgttggagtttttattactctgctgtaggaaagcctttgccaatgcttacaaggaactgtttatccctgcttctctgggttctgtttgatggaggtctcctaacaccactacaaccacagccacagcagactttagccacagagccaagagaaaatgttatccatctgccaggacaacggtcacatttccaacgtgttaaacgtggctgggtatggaatcaattttttgtgctggaagaatacgtgggctccgagcctcagtatgtgggaaagctccattccgacttagacaagggagagggcactgtgaaatacaccctctcaggagatggcgctggcaccgtttttaccattgatgaaaccacaggggacattcatgcaataaggagcctagatagagaagagaaacctttctacactcttcgtgctcaggctgtggacatagaaaccagaaagcccctggagcctgaatcagaattcatcatcaaagtgcaggatattaatgataatgagccaaagtttttggatggaccttatgttgctactgttccagaaatgtctcctgtgggtgcatatgtactccaggtcaaggccacagatgcagatgacccgacctatggaaacagtgccagagtcgtttacagcattcttcagggacaaccttatttctctattgatcccaagacaggtgttattagaacagctttgccaaacatggacagagaagtcaaagaacaatatcaagtactcatccaagccaaggatatgggaggacagcttggaggattagccggaacaacaatagtcaacatcactctcaccgatgtcaatgacaatccacctcgattccccaaaagcatcttccacttgaaagttcctgagtcttcccctattggttcagctattggaagaataagagctgtggatcctgattttggacaaaatgcagaaattgaatacaatattgttccaggagatgggggaaatttgtttgacatcgtcacagatgaggatacacaagagggagtcatcaaattgaaaaagcctttagattttgaaacaaagaaggcatacactttcaaagttgaggcttccaaccttcaccttgaccaccggtttcactcggcgggccctttcaaagacacagctacggtgaagatcagcgtgctggacgtagatgagccaccggttttcagcaagccgctctacaccatggaggtttatgaagacactccggtagggaccatcattggcgctgtcactgctcaagacctggatgtaggcagcagtgctgttaggtacttcatagattggaagagtgatggggacagctactttacaatagatggaaatgaaggaaccatcgccactaatgaattactagacagagaaagcactgcgcagtataatttctccataattgcgagtaaagttagtaaccctttattgaccagcaaagtcaatatactgattaatgtcttagatgtaaatgaatttcctccagaaatatctgtgccatatgagacagccgtgtgtgaaaatgccaagccaggacagataattcagatagtcagtgctgcagaccgagatctttcacctgctgggcaacaattctcctttagattatcacctgaggctgctatcaaaccaaattttacagttcgtgacttcagaaacaacacagcggggattgaaacccgaagaaatggatacagccgcaggcagcaagagttgtatttcctccctgttgtaatagaagacagcagctaccctgtccagagcagcacaaacacaatgactattcgagtctgtagatgtgactctgatggcaccatcctgtcttgtaatgtggaagcaatttttctacctgtaggacttagcactggggcgttgattgcaattctactatgcattgttatactcttagccatagttgtactgtatgtagcactgcgaaggcagaagaaaaaagacaccctgatgacctctaaagaagacatcagagacaacgtcatccattacgatgatgaaggaggtggggaggaagatacccaggctttcgacatcggggctctgagaaacccaaaagtgattgaggagaacaaaattcgcagggatataaaaccagactctctctgtttacctcgtcagagaccacccatggaagataacacagacataagggatttcattcatcaaaggctacaggaaaatgatgtggatccaactgccccaccatacgattcactggccacatatgcctacgaagggagtgggtccgtggcagagtccctcagctctatagactctctcaccacagaagccgaccaggactatgactatctgacagactggggaccccgctttaaagtcttggcagacatgtttggcgaagaagagagttataaccctgataaagtcacttaagggagtcgtggaggctaaaatacaaccgagaggggagatttttaaaaaagaaaaagaaacacaaatattaatagaaatctctctcacacacacacacacacacaaacacacacacacacacacacactctgggacaagattcctttgattacctggtttctagtaagttactaaattaatcatattgtcagttttggtttattctgccaacaagagatacatcctataatgtgtacttgctttgttttgttgttttgttttttcacaatcacactgagacaagctcaggcctattcaatacaatttactgacatgacaacctagaacgaagatagctatgtggcatcacggtggaagagtgttagatttttcttaattccactaaagtgcctattgaaactcttatcatttaaagtggtgtacagtacactctgctgtgatggtattgcgggattcagagataaagacataaaacaaagacaccgtctttatgtcaagaagcaatagcgacactctgactctcctcattccttttgagaacaaaagaagaacactttctgatctccaccttcttctaattcaaaaggttttctttttcttttttaaactgtatgctaaaacgtatttgtttatcctatcctttcagaaaattgaaataaatatgaaaatatcaagttcaatatgtaagtcccaaattctagaaacaatgtttgatcttaacattagttcacattaaagctgttcattaaaatgttactttcttttccaaaaaaaaaagaaagaaaaaaaagaaaaaatattcctctttataaagagaggcctcagggctcaaattacacattaaaataaatattggttttgcttaatattg

SEQ ID NO: 2115 - DNA, 7087 bp, Homo sapiens; identical to SEQ ID NO: 326

SEQ ID NO: 2116 - DNA, 4132 bp, Homo sapiens; identical to SEQ ID NO: 1039

SEQ ID NO: 2117 - DNA, 4979 bp, Homo sapiens; identical to SEQ ID NO: 321

SEQ ID NO: 2118 - DNA, 4143 bp, Homo sapiens; identical to SEQ ID NO: 57

SEQ ID NO: 2119 - DNA, 5370 bp, Homo sapiens
ccgtcgccggccgcgtcctccgggcatggaaggaggcggcaagcccaactcttcgtctaacagccgggacgatggcaacagcgtcttccccgccaaggcgtccgcgacgggcgcggggccggccgcggccgagaagcgcctgggcaccccgccggggggcggcggggccggcgcgaaggagcacggcaactccgtgtgcttcaaggtggacggcggtggcggcggtggcggcggcggcggcggcggcgaggagccggcggggggcttcgaagacgccgaggggccccggcggcagtacggcttcatgcagaggcagttcacctccatgctgcagcccggggtcaacaaattctccctccgcatgtttgggagccagaaggcggtggaaaaggagcaggaaagggttaaaactgcaggcttctggattatccacccttacagtgatttcaggttttactgggatttaataatgcttataatgatggttggaaatctagtcatcataccagttggaatcacattctttacagagcaaacaacaacaccatggattattttcaatgtggcatcagatacagttttcctattggacctgatcatgaattttaggactgggactgtcaatgaagacagttctgaaatcatcctggaccccaaagtgatcaagatgaattatttaaaaagctggtttgtggttgacttcatctcatccatcccagtggattatatctttcttattgtagaaaaaggaatggattctgaagtttacaagacagccagggcacttcgcattgtgaggtttacaaaaattctcagtctcttgcgtttattacgactttcaaggttaattagatacatacatcaatgggaagagatattccacatgacatatgatctcgccagtgcagtggtgagaatttttaatctcatcggcatgatgctgctcctgtgccactgggatggttgtcttcagttcttagtaccactactgcaggacttcccaccagattgctgggtgtctttaaatgaaatggttaatgattcttggggaaagcagtattcatacgcactcttcaaagctatgagtcacatgctgtgcattgggtatggagcccaagccccagtcagcatgtctgacctctggattaccatgctgagcatgatcgtcggggccacctgctatgccatgtttgtcggccatgccaccgctttaatccagtctctggattcttcgaggcggcagtatcaagagaagtataagcaagtggaacaatacatgtcattccataagttaccagctgatatgcgtcagaagatacatgattactatgaacacagataccaaggcaaaatctttgatgaggaaaatattctcaatgaactcaatgatcctctgagagagggagatagtcaacttcaactgtcggaaactggtggctacaatgcctttatttgctaatgcggatcctaattttgtgactgccatgctgagcaagttgagatttgaggtgtttcaacctggagattatatcatacgagaaggagccgtgggtaaaaaaatgtatttcattcaacacggtgttgctggtgtcattacaaaatccagtaaagaaatgaagctgacagatggctcttactttggagagatttgcctgctgaccaaaggacgtcgtactgccagtgttcgagctgatacatattgtcgtctttactcactttccgtggacaatttcaacgaggtcctggaggaatatccaatgatgaggagagcctttgagacagttgccattgaccgactagatcgaataggaaagaaaaattcaattcttctgcaaaagttccagaaggatctgaacactggtgttttcaacaatcaggagaacgaaatcctcaagcagattgtgaaacatgacagggagatggtgcaggcaatcgctcccatcaattatcctcaaatgacaaccctgaattccacatcgtctactacgaccccgacctcccgcatgaggacacaatctccaccggtgtacacagcgaccagcctgtctcacagcaacctgcactcccccagtcccagcacacagaccccccagccatcagccatcctgtcaccctgctcctacaccaccgcggtctgcagccctcctgtacagagccctctggccgctcgaactttccactatgcctcccccaccgcctcccagctgtcactcatgcaacagcagccgcagcagcaggtacagcagtcccagccgccgcagactcagccacagcagccgtccccgcagccacagacacctggcagctccacgccgaaaaatgaagtgcacaagagcacgcaggcgcttcacaacaccaacctgacccgggaagtcaggccactctccgcctcgcagccctcgctgccccatgaggtgtccactctgatttccagacctcatcccactgtgggcgagtccctggcctccatccctcaacccgtgacggcggtccccggaacgggccttcaggcagggggcaggagcactgtcccgcagcgcgtcaccctcttccgacagatgtcgtcgggagccatccccccgaaccgaggagtccctccagcaccccctccaccagcagctgctcttccaagagaatcttcctcagtcttaaacacagacccagacgcagaaaagccacgatttgcttcaaatttatgatccctgctgattgtcaaagcagaaagaaatactctcataaactgagactatactcagatcttattttattctatctcctgatagatccctctagcctactatgaagagatattttagacagctgtggcctacacgtgaaatgtaaaaatatatatacatatactataaaatatatatctaaattcccaagagagggtcaaaagacctgtttagcattcagtgttatatgtcttcctttctttaaatcattaaaggatttaaaatgtcgttgtaagattatttatttctaacctacttttacttaagtcctttgatatgtatatttctctattttatgaagagttcttggattcaatggaaacaaaactgattttaaaaaggcaactcaaatgaactagtaaatagcaccaatcaaaactttctttcattagctgtgtctctgcatctaaattgttaatcattaatggtggagaattaaataacaaatcccattttatagatctaaattgtatttcggtgctttcaatttcaaattaggttaaagaatgcactacttgcttggccaccgtaggagactagcattgccactgtttgttaagaatatcactaacctcaaacatgttcattgatctttcagaaagctgagggaaaattaatatttgtcttcatgtgttatcggacttttaccaagactcgatcaatgttagttgtaaataactttttcaacccaaataaaaatagctattctgtgttgtatgaaggtaaaagtcattgtttaagaatttagttttattgcttcacttcaaaacttagagttttaaattttacaaaacctgattgtgagaattattcaattgtaatgcaatggcttgaaacctacaatattattttaacctgcaatgttttatgcaaaattgtatgctcgaatctacaaattgcttgtattacaccaaaaatcgttacttttctttcttcttgccataatcaagcatctgaaaatagtccctgcatgcttctggggaaaaaaaaataggttcaaatcagtcattgtagagaaaggcttacagtatttctcgtttctagaaaagcataacaattcattaattgcctatcttataattcctataaggctgacttggatctctgacttaagtctagaagtgaggttttcacttttatttaatattattgctattattatttaaataattatttgtaaaccacagcttgatttggagttaagtgttgtctgtgtcttcactgtagctggtaatttactatggtattaatttaaagaaataaattcaatacagcatcacgtctgtttgggaacacacattttgctctatgtatattgtaactaaatggttagtaaactttaaggcatgtggtgactaacgtagcccttagataggaggtttgtcatttttaatgtgttgaaaatagtacagacatggtgacagaaagcaggggtaaagttgaacgtctatgagcattgtctgtctgttttcttaactctttacatgatctgtgagcacctgcttcttctcaaagaactcccttagtaatcatttgtgcctaatgcatcccacacatgtggagtatgactggaacacaattgaaagattcctaacaactggctgcggtaaataacccaagttaagagcatgacttaaagtggaggtcttcagtatctctggcactggcaatacatttaagaacatacagagatcacacattatgtgggacagggcctgcagatagacttgaggacagaaaacaaaaacaaaagcagaaactctaaagtggatccttgctgcctgttatgccttttgtggatataatacctataataccaaaatgagttgttatgtttaatttcaaacaaatcccaactggtgtggaagtaattaactgctagtcgatgtaatgtaatcatcaatatgctggtgacatatgatggcatgtcaggaatactgttgtaagaaagggattgttcagtctacctagaacctatgggaaagctgcaagaccatttacatatcagtacaaaactcctttattttattaaaatatgagaattaacttcaatttattaagattacgtattggtcctttaaattattaaaggtttacatttgataggattaatggatttggtagtgaaatatttttatatatataaatttttggttttttattttgagcactattgggaaacataagcaaaattgaaatgcatggtctttcagtgcaaccatacaatttttattcactttgtaatagaatggacaaaaaaactaaggtttatatattaaactaataaaaaggtacagggtaaattatatacatatatgtatgaatgtatatatacttagattaagaaaaaaaaatgactcacattcctgtaatataaaggtccattgctagttgaaaagtgacctcttttctctgtacatagtgaagcccgtatgtatggagttttaatctgtacagaaagaaatgtattattcattggtctttctgctgctggaaagataatagaatagctgattcttacaacaactgtatgatcagggatgagttagagtatttcttttgtctttgctcaaagccatacatatataaatatatataaagattattaataaattcaacaaaaaataaacta

SEQ ID NO: 2120 - DNA, 5334 bp, Homo sapiens
gagcgggcgggctgcgaggccgcggggcatgcgggaggcggaggggtggggaccggggtgggctgcgccctcccgctctggcccattccacaccccgccgaaagcggacactgtcagctgaatcactccccttttaggaggagggaggggaaaaaggtgtctagctcctttctgcttaaaaaagcacagggagatcgcgggcagctttgcagtcgctgccttctcgcgcctgaccatgcacccctgcatcttcctgctgggccacaggcgagcgctttatttctggagctgagggctaaaacttttttgacttttcttctcctcaacatctgaatcatgccatgtgcccagaggagctggcttgcaaacctttccgtggtggctcagctccttaactttggggcgctttgctatgggagacagcctcagccaggcccggttcgcttcccggacaggaggcaagagcattttatcaagggcctgccagaataccacgtggtgggtccagtccgagtagatgccagtgggcattttttgtcatatggcttgcactatcccatcacgagcagcaggaggaagagagatttggatggctcagaggactgggtgtactacagaatttctcacgaggagaaggacctgttttttaacttgacggtcaatcaaggatttctttccaatagctacatcatggagaagagatatgggaacctctcccatgttaagatgatggcttcctctgcccccctctgccatctcagtggcacggttctacagcagggcaccagagttgggacggcagccctcagtgcctgccatggactgactggatttttccaactaccacatggagactttttcattgaacccgtgaagaagcatccactggttgagggagggtaccacccgcacatcgtttacaggaggcagaaagttccagaaaccaaggagccaacctgtggattaaagggtattgtgactcacatgtcctcctgggttgaagaatctgttttgttcttttggttgttttattaaaacatgacctattcttactcaagtctcttatctcctctgtattcttttttttttaatatcttcatgacattcaaatctcttctgtattctcttgccagaaagtgtacattctttttgcttgtataaaccctttcacttgtcacagtgttaacatctcccagaagcaagagctatggcgggagaagtgggagaggcacaacttgccaagcagaagcctctctcggcgttccatcagcaaggagagatgggtggagacactggtggtggccgacacaaagatgattgaataccatgggagtgagaatgtggagtcctacatcctcaccatcatgaacatggtcactgggttgttccataacccaagcattggcaatgcaattcacattgttgtggttcggctcattctactcgaagaagaagagcaaggactgaaaatagttcaccatgcagaaaagacactgtctagcttctgcaagtggcagaagagtatcaatcccaagagtgacctcaatcctgttcatcacgacgtggctgtccttctcaccagaaaggacatctgtgctggtttcaatcgcccctgcgagaccctgggcctgtctcacctttcaggaatgtgtcagcctcaccgcagttgtaacatcaatgaagattcgggactccctctggctttcacaattgcccatgagctaggacacagcttcggcatccagcatgatgggaaagaaaatgactgtgagcctgtgggcagacatccgtacatcatgtcccgccagctccagtacgatcccactccgctgacatggtccaagtgcagcgaggagtacatcacccgcttcttggaccgaggctgggggttctgtcttgatgacatacctaaaaagaaaggcttgaagtccaaggtcattgcccccggagtgatctatgatgttcaccaccagtgccagctacaatatggacccaatgctaccttctgccaggaagtagaaaacgtctgccagacactgtggtgctccgtgaagggcttttgtcgctctaagctggacgctgctgcagatggaactcaatgtggtgagaagaagtggtgtatggcaggcaagtgcatcacagtggggaagaaaccagagagcattcctggaggctggggccgctggtcaccctggtcccactgttccaggacctgtggggctggagtccagagcgcagagaggctctgcaacaaccccgagccaaagtttggagggaaatattgcactggagaaagaaaacgctatcgcttgtgcaacgtccacccctgtcgctcagaggcaccaacatttcggcagatgcagtgcagtgaatttgacactgttccctacaagaatgaactctaccactggtttcccatttttaacccagcacatccttgtgagctctactgccgacccatagatggccagttttctgagaaaatgctggatgctgtcattgatggtaccccttgctttgaaggcggcaacagcagaaatgtctgtattaatggcatatgtaagatggttggctgtgactatgagatcgattccaatgccaccgaggatcgctgcggtgtgtgcctgggagatggctcttcctgccagactgtgagaaagatgtttaagcagaaggaaggatctggttatgttgacattgggctcattccaaaaggagcaagggacataagagtgatggaaattgagggagctggaaacttcctggccatcaggagtgaagatcctgaaaaatattacctgaatggagggtttattatccagtggaacgggaactataagctggcagggactgtctttcagtatgacaggaaaggagacctggaaaagctgatggccacaggtcccaccaatgagtctgtgtggatccagcttctattccaggtgactaaccctggcatcaagtatgagtacacaatccagaaagatggccttgacaatgatgttgagcagcagatgtacttctggcagtacggccactggacagagtgcagtgtgacctgcgggacaggtatccgccgccaaactgcccattgcataaagaagggccgcgggatggtgaaagctacattctgtgacccagaaacacagcccaatgggagacagaagaagtgccatgaaaaggcttgtccacccaggtggtgggcaggggagtgggaagcatgctcggcgacatgcgggccccacggggagaagaagcgaaccgtgctgtgcatccagaccatggtctctgacgagcaggctctcccgcccacagactgccagcacctgctgaagcccaagaccctcctttcctgcaacagagacatcctgtgcccctcggactggacagtgggcaactggagtgagtgttctgtttcctgtggtggtggagtgcggattcgcagtgtcacatgtgccaagaaccatgatgaaccttgcgatgtgacaaggaaacccaacagccgagctctgtgtggcctccagcaatgcccttctagccggagagttctgaaaccaaacaaaggcactatttccaatggaaaaaacccaccaacactaaagcccgtccctccacctacatccaggcccagaatgctgaccacacccacagggcctgagtctatgagcacaagcactccagcaatcagcagccctagtcctaccacagcctccaaagaaggagacctgggtgggaaacagtggcaagatagctcaacccaacctgagctgagctctcgctatctcatttccactggaagcacttcccagcccatcctcacttcccaatccttgagcattcagccaagtgaggaaaatgtttccagttcagatactggtcctacctcggagggaggccttgtagctacaacaacaagtggttctggcttgtcatcttcccgcaaccctatcacttggcctgtgactccattttacaataccttgaccaaaggtccagaaatggagattcacagtggctcaggggaagaaagagaacagcctgaggacaaagatgaaagcaatcctgtaatatggaccaagatcagagtacctggaaatgacgctccagtggaaagtacagaaatgccacttgcacctccactaacaccagatctcagcagggagtcctggtggccacccttcagcacagtaatggaaggactgctccccagccaaaggcccactacttccgaaactgggacacccagagttgaggggatggttactgaaaagccagccaacactctgctccctctgggaggagaccaccagccagaaccctcaggaaagacggcaaaccgtaaccacctgaaacttccaaacaacatgaaccaaacaaaaagttctgaaccagtcctgactgaggaggatgcaacaagtctgattactgagggctttttgctaaatgcctccaattacaagcagctcacaaacggccacggctctgcacactggatcgtcggaaactggagcgagtgctccaccacatgtggcctgggggcctactggagaagggtggagtgcagcacccagatggattctgactgtgcggccatccagagacctgaccctgcaaaaagatgccacctccgtccctgtgctggctggaaagtgggaaactggagcaagtgctccagaaactgcagtgggggcttcaagatacgcgagattcagtgcgtggacagccgggaccaccggaacctgaggccatttcactgccagttcctggccggcattcctcccccattgagcatgagctgtaacccggagccctgtgaggcgtggcaggtggagccttggagccagtgctccaggtcctgtggaggtggagttcaggagagaggagtgttctgtccaggaggcctctgtgattggacaaaaagacccacatccaccatgtcttgcaatgagcacctgtgctgtcactgggccactgggaactgggacctgtgttccacttcctgtggaggtggctttcagaagaggactgtccaatgtgtgccctcagagggcaataaaactgaagaccaagaccaatgtctatgtgatcacaaacccagacctccagaattcaaaaaatgcaaccagcaggcctgcaagaaaagtgccgatttactttgcactaaggacaaactgtcagccagtttctgccagacactgaaagccatgaagaaatgttctgtgcccaccgtgagggctgagtgctgcttctcgtgtccccagacacacatcacacacacccaaaggcaaagaaggcaacggttgctccaaaagtcaaaagaactctaagcccaaa

SEQ ID NO: 2121 - DNA, 2815 bp, Homo sapiens; identical to SEQ ID NO: 61

SEQ ID NO: 2122 - DNA, 5996 bp, Homo sapiens; identical to SEQ ID NO: 70

SEQ ID NO: 2123 - DNA, 2022 bp, Homo sapiens; identical to SEQ ID NO: 355

SEQ ID NO: 2124 - DNA, 2352 bp, Homo sapiens
gcctcgcctcggcgccgcggccggcatttctcctcgcagctcgctgcctcctctatccctgcctccctctcccccctctgtttttctcccttccttccctctccgaccctcttcctctccctcccgatcctttccctcctcctctcatctttcccctgtctctccgttctagctcgtcccccaccccaccttttcttctttctcctcctctccttcctctccccctctcctctgtctccttccaccgtctcccctgcctccctgtctttcagtccctgtttttcagccccgtctccctctcggtttctctcccccaccctccctccgggtttcctccccggtgccctccctcctctctccctcccctccccctccgcccctcgcagccccgccgctcgcagctcccagtctgcctccccgaaccggcgccgccgcccgcactcgccgcaggaccggcccgcccggctcccggggtgcgccctcctcggtcccgcgccctccgggctcgcagggacgtctcctccctcccggctcgcggccccgcccggcccggcccccgcccagagccccagcgcgccgaggatgtgagtcctgctcgcctctggcggagcagcagccactcgcgcgcggagccggagcgcagcgcagcgcagccgcgggcgctctccgggccgctcgcgcgagtgccgcgctcttgccctagcggcgtcccccggcctctcgccggcgccaccgccgcagcagcccgcgggccgtccccggccggccgcccccggccccagcgccgctgaccctgtccgccgcgggcggggacgcgggcggaggaggcgccgcggcggagcccccggacgcgaccatgtcggaggtgctgccctacggcgacgagaagctgagcccctacggcgacggcggcgacgtgggccagatcttctcctgccgcctgcaggacaccaacaacttcttcggcgccgggcagaacaagcggccgcccaagctgggccagatcggccggagcaagcggggttgttattgaagatgataggattgatgacgtgctgaaaaatatgaccgacaaggcacctcctggtgtctaactcccccaaagacaatgagttaagggagagaataagaacggcggtaacagttattggcaaaaagcatgaaaagagaaagcactttgaaatttattactagcttgctacccacgatgaaatcaacaacctgtatctggtatcaggccgggagacagatgaggcgagaggaggaggaggaggaggagaaggctctgggctcctctgcaaaaataaaaataaaaaaataaataaaattttaaaaataataaaaattcactatatacacatataaagaaataaaaagaagtctcagttgcagctatttgtcaaaattaatatccatttctttttatatacggtgaatattgcgcaattatagatctggattttgaaccacttaatgaagcggcaacaccaggtgttttgaggtgttggcattcttcgctgatttggctgttcccaatgtttacattatttaatcttgcaaaaatggttctgtgcacttggatgtgaaatgctgtccagttttattttttttatgttgttatccttggatgtacaaaaaattcagaaaatgatctctgtagatattctgttttattttggtcatctttagaagttatcaggaatgtgtttaaaacaagaagagaacttttctaaggaatgatacatagaaaagattttattttaaaatgagttgtaaagcttgtgtttctttgttgctgcaagctatctgcccaagttaatgcaaatggacacattttttatgtcagaaaaacacacacacacacacacacacacacacacacacacgaaaaacaaagaaaaaaatgcttgagctttttctaacttccccttgcagtctgttgtgtgagcagcctgtttatttctctaatattatgtcagtttattctctttaatggactgtaaaaaaatgtaatcacaagagtgccaaatatcttgaaatgccaaaaggcattttagtttcttttctctgtgctctgagtccacgtacaggaatgcttggagtgtcttttctgttatttatagggattctcttaaggcacaccagctgcctgttttgcatggtatttgcaaaaatgcctcttgcgtgaggaaatcttttaccattttttgtttgcaactttggacctcaagaggtttcccttcccttccccgttccctcttttcttaattcaatattctgtatgttgcaccttgaaccagcacacagggctatttctccaatgtacaataaaagaattgttcctgtgtctca

SEQ ID NO: 2125 - DNA, 6335 bp, Homo sapiens; identical to SEQ ID NO: 300

SEQ ID NO: 2126 - DNA, 6237 bp, Homo sapiens; identical to SEQ ID NO: 99

SEQ ID NO: 2127 - DNA, 1047 bp, Homo sapiens; identical to SEQ ID NO: 73

SEQ ID NO: 2128 - DNA, 2116 bp, Homo sapiens; identical to SEQ ID NO: 1310

SEQ ID NO: 2129 - DNA, 8202 bp, Homo sapiens
gcttcccgcgggaacctctccagccgtccacctgaagggcactggcatcatggtctaacgtggcaccttcctggattcccctctatctcctgttcttcctaccttctactccttccctcctcttctcctccgaagaccctggcgcccactccactgcggacccctgaacacttaaggaataacccttggcagctgcacgactacgctctccgaaacctcatgggcagtttctcccgccggcgatgatggagaacctaataaggggaaggaatcccccgcaataccagagaagtccttgtaaagaggttcgtgcagcacttcggaagaggcctgaagaggagtgagcccgctacatgaaaaaaaatgcaagtcaaagtggtcacaacctagaagtctgcagagacaggaataactagcaattctgcgtttctctagtgcagtgcctggagatgaccaccaaacggaaaatcatcggccgtctggtgccatgccgatgtttccgaggtgaagaagaaatcatctcagttttagattactcccactgcagtcttcagcaggtgccaaaggaggtctttaacttcgaacgaacattagaggagctttatctagatgccaatcaaattgaagaactacccaagcaattgttcaactgtcaagctctacgaaaactaagtattcctgataacgacctttcaaatctgccaaccactattgctagtttagttaatcttaaagaactcgacatcagtaaaaatggtgtacaagaatttccagaaaacataaagtgctgtaagtgtttaacaattattgaagccagtgtcaatcccatttctaaactacctgatggcttcacacagctcctaaacctgacccagctctacctgaatgacgcctttcttgaatttcttccagccaattttggaagacttgtcaaattgcggatcttggagttaagagaaaatcacttgaaaactctaccaaacatctgaagatccagagtgtgccccttgcccaatcgcctgagactatacagtgacacctacaacagaggatgtggagggagcagcttttcgggcaccagaaatggcagcatcaggagcatcagcacgaatagactttgtagaggtagttctcccaaactatattatgaaaccaaacatttttggtgcgctacctgctgatgggggctgccttcttactgcctagtatctacaaaatgtttggtctttgttaaagtttaacgatgacatttctgactaatatagagagacctgatttttttccaaatgtgttcagttgccataactttcaatgaatatgaaattttatcagtctcagaaaaacattaatacccatatttttatctaattgatttcactatttgttatgttaaggtgcttttgtgtataatttttgtatatatttttaaatgggatcaaactaagccataatttaaaagtcatcctaatgcagtaaataagataatttctctagtttgttaaattcttcagagaccgaatataattgctcgtttttctgtcatactccctgatgatgttccattgtggacttattttgcaaagttcccagatggcacaagtcaaaatatgaaatgctgatgattgattgattttatgtatcctttcatcttatgtaatttaatgtggaacagttattttgtagctctaaaatacatttgttaattaaccatattggcttttcatgcagttcaatggcttatagcatttcaatttgcatagaaaatgaatctctgtaatgatacttttgctaaataaataacaatcgacataatgggttcatttgcttttaacattttatacatacaatttagaagtaggatatatttcatattgaaattttgaaaagcttgaaattcaacatacaaggtcaccatcttgctgatgcctaatgcagtacagcaaattcattcttcatcccatgttaactcctttttggaacaagtcaaaatacaaataatttacaatgattgtgttggagctattgcttgattaaatacaattcaaaggttctttttataaaacaggtgtgagcaggacacattgcacttacgggcttttcctatttttttggttctatttcattttactgcctaggaaagaaacatttttttgtaaaacctatgctatggaactgaaatgtactttattgaatatttctattctgttttatgaatatcaattatgtgaaatatataaatataaaattgccttagaatgcctaactctttgtataaaacagatatctgaaagtagatgttggttttttgttcaaattgtgtaaatgctgatttttccatgagtacttatgaagatctatatgtaaaaattttaagtctgcttactgtgtttgtaccaccttgttcttagctgtgtatactctatgctaattgacttctgtcattgtcacatatattgcatatgtctctcaaaaattaaaaggtatattgctattctaaaaataaaaaatgtaaattcctgagtcaatgcacaaactggcccagttggaaagacttgacctaggcaataatgaattcggtgagctgcctgaagttctggatcaaatacaaaatttgagggagttatggatggataataatgcattacaagtgttacctgggtctatagggaagttaaagatgttggtatacctggatatgtcaaaaaacagaatagaaacagttgacatggacatttctggatgtgaagcccttgaggacctcttattgtcatccaatatgttgcaacaattgcctgattctataggacttttgaaaaaactaacaactctaaaagtagatgacaatcaacttacaatgctacccaatacaattggaaatttatctttattagaagaatttgactgtagctgtaatgaactggagtcactaccttctactattggctaccttcatagtcttcggacattagcagttgatgagaatttccttccagaattacccagagaaattggaagttgtaagaatgtaacagtcatgtctctacgctccaacaaattagaatttcttcctgaagagattggacagatgcagaaactaagagtcctaaatttgagtgacaacagattgaagaatttaccattctcatttaccaaacttaaagagcttgcagctttgtggctttctgacaatcagtccaaagcccttatccctttacaaacagaagcccatccagaaacaaagcaaagagtattgactaactacatgtttccccagcagcctcgtggtgatgaagatttccagtcagacagtgacagctttaaccctacactgtgggaagagcagagacaacaacgcatgactgttgcctttgaatttgaagacaaaaaagaagatgacgaaaatgctgggaaagttaaggatctctcctgccaagccccctgggaaaggggccagcgtgggattactctccaacctgccagactgtctggcgattgctgcacaccatgggccaggtgtgatcagcagatccaagatatgcccgtcccccagaatgacccacagctggcatggggttgtataagtggcctccagcaggaaaggagcatgtgtactccattgccagttgcagcacaatccaccactcttccctctctaagtggcagacaggttgaaataaacctaaaacgatatccaactccttacccagaggatttaaagaatatggtaaaatctgttcaaaatttggtgggtaagccaagccatggagtgcgtgttgagaattcaaatccaactgctaacacggagcaaactgtgaaagaaaaatatgaacacaagtggccggtagccccaaaggagattacagtggaggattcttttgttcatccagctaatgaaatgaggattggggaacttcacccttcattagctgagacccctctgtacccacccaaacttgttctgctagggaaggacaaaaaagaatcaactgatgagtctgaagttgacaaaactcactgtctgaataacagtgtttcctcaggcacttactcagactactcgccttcccaggcttcctcaggatcctctaatacccgggttaaagtggggtccttgcagacaacagctaaagatgcagtacataattctttgtggggtaacaggattgcaccatctttcccacagcctcttgattcaaagccattactcagccagcgggaggctgttcccccaggcaatataccacagcgtcctgaccggctgcccatgagtgatactttcactgacaactggactgatggctcgcattatgacaacacagggtttgttgctgaggaaaccacagccgagaatgccaacagtaatcctctcttaagttcgaaatctagaagcacatcttcgcatggacgcaggcctttgatcaggcaagacaggattgttggtgttcccctggaactcgagcagtctacacacagacacacaccagaaacagaagtgcctccttccaatccttggcagaattggaccagaacccctagtccgtttgaagacaggaccgcttttccttccaaattagagacaacccccactaccagcccattgcctgaaaggaaagaacatataaaggaatctactgaaatacctagtcctttttctccaggcgtaccatgggagtatcatgattccaatcccaacaggagtcttagtaatgtcttttctcaaatccactgccgcccggaatcttctaaaggtgttatttcaattagcaaaagcacagagaggctttcccccctaatgaaagatatcaagtctaataaattcaaaaagtcacagagtatcgatgagattgacattggtacatataaggtgtataacataccattagaaaactatgcttctgggagtgatcacttaggaagccacgaacgaccggataagatgctgggaccagagcatggtatgtccagtatgtctcgaagccagtcagtcccaatgctggatgatgagatgctcacctacggaagtagtaaggggccacaacaacaaaaagcttctatgacaaaaaaagtctatcagtttgaccaaagcttcaatcctcaaggatcagtggaagtgaaagccgaaaagaggataccacccccttttcaacacaatcccgagtacgtgcaacaggccagcaaaaacatcgccaaggatttgattagtcctagagcttacagaggatacccaccgatggagcaaatgttttcattttctcagccatctgtgaatgaggatgctgtggtgaatgcccagttcgcaagccaaggggccagggcgggcttcctgagaagggccgactccctggtgagcgccacagaaatggccatgtttagaagggtcaatgagcctcatgagctgcccccaactgataggtacggcagacccccatataggggagggctggatcgccaaagcagcgttacagtgactgagtcccagttcctgaaaaggaatggcaggtatgaagatgaacacccttcatatcaagaagtgaaagctcaggcgggaagttttccggttaaaaaccttacccaaaggaggccattgtctgcgagaagctacagtacagagagttacggtgcctcccaaaccaggccagtttcagctaggcctactatggcagctcttttggaaaaaataccatctgactataacttgggtaactatggtgacaagccatcagataacagtgatttaaagacgaggcctactcctgtgaagggagaggagagctgtggtaaaatgcctgcagactggagacaacagctgcttagacatatagaagctagacggttagacaggaatgctgcttacaaacacaatacagttaaccttggcatgctgccctatggaggtatttcagcaatgcatgcaggcagaagcatgactttaaacttgcagactaagtctaaatttgatcatcaagaactacctcttcagaaaaccccgtcccagcaaagcaacattttagacaatggacaagaagatgtatctcctagtggccaatggaatccttatccacttgggaggcgggatgtacctccggacaccattactaagaaggcaggcagccacatccagacgttgatggggtcccaaagccttcagcatcgcagccgggagcagcagccgtatgaaggaaatataaacaaagtgaccatccagcaatttcagtcaccattgcctattcagatcccctcttcacaggccacccggggacctcagcctggacggtgcttaattcaaactaaagggcaaaggagtatggatggatatccagagcagttttgtgtgagaatagaaaagaatcctggccttggatttagtatcagtggtggaattagtggacaaggaaatccattcaaaccttctgacaagggtatctttgttactagggttcagcctgatgggccagcatcaaacctactgcagcctggtgataagatccttcaggcaaatggacacagttttgtacatatggaacatgaaaaagctgtattactactgaagagtttccagaacacagtagacctagttattcaacgtgagcttactgtctaaatattttttataaatagtgaagatacgtctagccagacctaatgttcaaaaataaatttatacatagaaacaaattttgccaattgctggaccaatggcaaacattagtgccaaatgtataatactatatgttagcactgaccatccttaaaaaatgttaactctataaatatgatgttcatgtggttatgtattagttttaattgtcagcctctggctgtgcattggtgcagttttgtttctgtttttgtttttgtttttaatcaaataagtttcttctcaaaatggatttcatataatttcggagcacggaagcacacacaagctctttatgaattctgctctccatcagaaacactgcctcaaagttgtatatgcctttatatagaaaatacaaatataaagaattgtaattcccataaaatatttctagcacaaggtatatgttggcatatatacaaaaagaatatagagaaaaacaatattttcataaactaaacatctcagatagagaaaaaatatatcttaaaataagactttactatattgaatctttttcaataaaaattacatgataatgccttatgaaagtaactgtacatatggtataaagtgtttatatttggttccatattcatttgctaaattctcatgacacagagtgaaatatttcataaattagccatttatctctgggacccaaataaaaataggatgaactaatttgttcaatgcctttagctaattacaatacatgcagagtttagaaacagactaaaggtcattgtagttaagtctttttcaccacaaatttaagcagtggatgatgggtggcaggaaaggtattgctttatttctttcaagttcatgttgattataaactgtagcccctgtgatttctttacttgtaaatgtggaatttatttgtgtgttgcttaatctaatttgctgctttttaaattatttaaaacgaattttggaaattgataaaatttatcattacgaaagactgctgttagaaagttatggtaggtgattttaaatccttggtatttaaatatgaaacttcaaatataatttctcagagctgtggtctacctgtatcattaatttcaatggctgtttttctgggcagaaatagataaaatactttttttccaaaaacagtttcaaggtatgtaaaatcctgaatgctttttcactgaagagaaagacaagcatggttaatgtagaattatttacttttccattgaaactattttcctgcataaatgatcaaaatttattttataatcctttaaaatacttatctttcatattagtcattaatttaattacaatattaatttgaatttccaggataatttcccggagttggttgcatgcattatctttcataattttacatagttcttttgttatataatgaatttactttacatgctagtgtttcaagtattgtatgaggattttcacaatagtatcactgaatgatgtcaccagagctctgagaataatatttgtaagttaactgttttatggggacattgaaaatattgtatttttgtagggtctattaaaatgagtgtcacttattagaa

SEQ ID NO: 2130 - DNA, 6220 bp, Homo sapiens
tttttttttttgcccttatacctcttcgcctttctgtggttccatccacttcttccccctcctcctcccataaacaactctcctacccctgcacccccaataaataaataaaaggaggagggcaaggggggaggaggaggagtggtgctgcgaggggaaggaaaagggaggcagcgcgagagagccgggcagagtccgaaccgacagccagaagcccgcacgcacctcgcaccatgagatggcgacgcgccccgcgccgctccgggcgtcccggcccccgggcccagcgccccggctccgccgcccgctcgtcgccgccgctgccgctgctgccactactgctgctgctggggaccgcggccctggcgccgggggcggcggccggcaacgaggcggctcccgcgggggcctcggtgtgctactcgtccccgcccagcgtgggatcggtgcaggagctagctcagcgcgccgcggtggtgatcgagggaaaggtgcacccgcagcggcggcagcagggggcactcgacaggaaggcggcggcggcggcgggcgaggcaggggcgtggggcggcgatcgcgagccgccagccgcgggcccacgggcgctggggccgcccgccgaggagccgctgctcgccgccaacgggaccgtgccctcttggcccaccgccccggtgcccagcgccggcgagcccggggaggaggcgccctatctggtgaaggtgcaccaggtgtgggcggtgaaagccgggggcttgaagaaggactcgctgctcaccgtgcgcctggggacctggggccaccccgccttcccctcctgcgggaggctcaaggaggacagcaggtacatcttcttcatggagcccgacgccaacagcaccagccgcgcgccggccgccttccgagcctctttcccccctctggagacgggccggaacctcaagaaggaggtcagccgggtgctgtgcaagcggtgcggcgcctgcctccaacctgcgggcgggaggtgggtggctgcggggcaattgaaaaagagccggcgaggagttccccgaaacttgttggaactccgggctcgcgcggaggccaggagctgagcggcggcggctgccggacgatgggagcgtgagcaggacggtgataacctctccccgatcgggttgcgagggcgccgggcagaggccaggacgcgagccgccagcggtgggacccatcgacgacttcccggggcgacaggagcagccccgagagccagggcgagcgcccgttccaggtggccggaccgcccgccgcgtccgcgccgcgctccctgcaggcaacgggagacgcccccgcgcagcgcgagcgcctcagcgcggccgctcgctctccccctcgagggacaaacttttcccaaacccgatccgagcccttggaccaaactcgcctgcgccgagagccgtccgcgtagagcgctccgtctccggcgagatgtccgagcgcaaagaaggcagaggcaaagggaagggcaagaagaaggagcgaggctccggcaagaagccggagtccgcggcgggcagccagagcccagccttgcctccccgattgaaagagatgaaaagccaggaatcggctgcaggttccaaactagtccttcggtgtgaaaccagttctgaatactcctctctcagattcaagtggttcaagaatgggaatgaattgaatcgaaaaaacaaaccacaaaatatcaagatacaaaaaaagccagggaagtcagaacttcgcattaacaaagcatcactggctgattctggagagtatatgtgcaaagtgatcagcaaattaggaaatgacagtgcctctgccaatatcaccatcgtggaatcaaacgagatcatcactggtatgccagcctcaactgaaggagcatatgtgtcttcagagtctcccattagaatatcagtatccacagaaggagcaaatacttcttcatctcaagaaggacaaagaggagtagtcgggggtggggtggaggcagggcggggaagggagtgaccgcccctcctggctgcactcttgcctccggagccctctgatcctgtttgcagtgatgctccgagggcaggcacctgctgctctgtaatgattcagcccctttcagccgtcgtcgcgttaacacaacaggatgctgttgctattgtcactactgcctctcctgccgccgctgctgctgccgccgccgccaccgccgctggtcctccttctgcttttacttctcctgcatgacagttgttttcttcatctgagcagacaccagcttcagatgctcgaggtgagaaacatgcctttcagtttgggctactggtttacttaattaatcagccggcagctccgtcgatctattttcgtccctgtcctcttgacgagcccgggatggtttggagtagcatttaaaagaactagaaaagtggcccagaaacagcagcttaaagaattattacgatatactttgattttgtagttgctaggagcttttcttccccccttgcatctttctgaactcttcttgattttaataatggccttggacttggacgatttatcgatttccccctgtaagatgctgtatcatttggttgggggggcctctgcgtggtaatggaccgtgagagcggccaggccttcttctggaggtgagccgatggagatttattccccagacatgtctgaggtcgccgccgagaggtcctccagcccctccactcagctgagtgcagacccatctcttgatgggcttccggcagcagaagacatgccagagccccagactgaagatgggagaacccctggactcgtgggcctggccgtgccctgctgtgcgtgcctagaagctgagcgcctgagaggttgcctcaactcagagaaaatctgcattgtccccatcctggcttgcctggtcagcctctgcctctgcatcgccggcctcaagtgggtatttgtggacaagatctttgaatatgactctcctactcaccttgaccctggggggttaggccaggaccctattatttctctggacgcaactgctgcctcagctgtgtgggtgtcgtctgaggcatacacttcacctgtctctagggctcaatctgaaagtgaggttcaagttacagtgcaaggtgacaaggctgttgtctcctttgaaccatcagcggcaccgacaccgaagaatcgtatttttgccttttctttcttgccgtccactgcgccatccttcccttcacccacccggaaccctgaggtgagaacgcccaagtcagcaactcagccacaaacaacagaaactaatctccaaactgctcctaaactttctacatctacatccaccactgggacaagccatcttgtaaaatgtgcggagaaggagaaaactttctgtgtgaatggaggggagtgcttcatggtgaaagacctttcaaacccctcgagatacttgtgcaagtaagaaaagaaatcctgtgtgtcgcttatgtctataactccttgtttcagatgattctatgtctcatgatgtattgttgctttttttccaattttgttgcatcatgttgaataatgctgttttatatgtagagtgttttaaaacattcacaccattcgtcatcactcctctgtcatatgcagaattgttttttgctcttttcaatgtgtgtgaggtgttttttgtttttgtttttgttttttgccatgttatttatagtgttgctttccttgtggtttttcttgttgttattcagaaaagatgtgcagatatcacagaggcctataacttttggtatctacttctacatccaatgtatgaattaagctgtaagataatgttgctttcttatcccagtgatcacctgccaaatgaataagacaacaaagagaagcagaagggcagaagattatttactgacatatatctattacacttgggattgtcttactgttgcataactattttttaaacggagtttagttttatattgctagtaaaaaaagagaaaaaagtgccaacctggattcactggagcaagatgtactgagaatgtgcccatgaaagtccaaaaccaagaaagtgcccaaatgagtttactggtgatcgctgccaaaactacgtaatggccagcttctacagtacgtccactccctttctgtctctgcctgaataggagcatgctcagttggtgctgctttcttgttgctgcatctcccctcagattccacctagagctagatgtgtcttaccagatctaatattgactgcctctgcctgtcgcatgagaacattaacaaaagcaattgtattacttcctctgttcgcgactagttggctctgagatactaataggtgtgtgaggctccggatgtttctggaattgatattgaatgatgtgatacaaattgatagtcaatatcaagcagtgaaatatgataataaaggcatttcaaagtctcacttttattgataaaataaaaatcattctactgaacagtccatcttctttatacaatgaccacatcctgaaaagggtgttgctaagctgtaaccgatatgcacttgaaatgatggtaagttaattttgattcagaatgtgttatttgtcacaaataaacataataaaaggagttcagatgtttttcttcattaaccaaaagcatcttgggattgaatttatggaggcggaggagctgtaccagaagagagtgctgaccataaccggcatctgcatcgccctccttgtggtcggcatcatgtgtgtggtggcctactgcaaaaccaagaaacagcggaaaaagctgcatgaccgtcttcggcagagccttcggtctgaacgaaacaatatgatgaacattgccaatgggcctcaccatcctaacccaccccccgagaatgtccagctggtgaatcaatacgtatctaaaaacgtcatctccagtgagcatattgttgagagagaagcagagacatccttttccaccagtcactatacttccacagcccatcactccactactgtcacccagactcctagccacagctggagcaacggacacactgaaagcatcctttccgaaagccactctgtaatcgtgatgtcatccgtagaaaacagtaggcacagcagcccaactgggggcccaagaggacgtcttaatggcacaggaggccctcgtgaatgtaacagcttcctcaggcatgccagagaaacccctgattcctaccgagactctcctcatagtgaaagacataaccttatagctgagctaaggagaaacaaggcacacagatccaaatgcatgcagatccagctatcagcaactcatcttagatcttcttccattccccatttgggcttcattctctaagaccccttggcctttaggaaggtatgtgtcagccatgaccaccccggctcgtatgtcacctgtagatttccacacgccaagctcccccaaatcgcccccttcggaaatgtctccacccgtgtccagcatgacggtgtccatgccttccatggcggtcagccccttcatggaagaagagagacctctacttctcgtgacaccaccaaggctgcgggagaagaagtttgaccatcaccctcagcagttcagctccttccaccacaaccccgcgcatgacagtaacagcctccctgctagccccttgaggatagtggaggatgaggagtatgaaacgacccaagagtacgagccagcccaagagcctgttaagaaactcgccaatagccggcgggccaaaagaaccaagcccaatggccacattgctaacagattggaagtggacagcaacacaagctcccagagcagtaactcagagagtgaaacagaagatgaaagagtaggtgaagatacgcctttcctgggcatacagaaccccctggcagccagtcttgaggcaacacctgccttccgcctggctgacagcaggactaacccagcaggccgcttctcgacacaggaagaaatccaggccaggctgtctagtgtaattgctaaccaagaccctattgctgtataaaacctaaataaacacatagattcacctgtaaaactttattttatataataaagtattccaccttaaattaaacaatttattttattttagcagttctgcaaatagaaaacaggaaaaaaacttttataaattaaatatatgtatgtaaaaatg

SEQ ID NO: 2131 - DNA, 8558 bp, Homo sapiens; identical to SEQ ID NO: 1375

SEQ ID NO: 2132 - DNA, 3190 bp, Homo sapiens; identical to SEQ ID NO: 871

SEQ ID NO: 2133 - DNA, 3722 bp, Homo sapiens; identical to SEQ ID NO: 82

SEQ ID NO: 2134 - DNA, 159 bp, Homo sapiens; identical to SEQ ID NO: 370

SEQ ID NO: 2135 - DNA, 1206 bp, Homo sapiens
ccccaaacctgccaccgacggccacttccgtttccccgatagtatttggggatctcgaagcgatacttccggctccccccaggtccccaagctttacttttgtggggcacgacgagaaagtccgcagccccaaacaagagtggactgagcagccagtaggggagagagcagttaaggcacacagagcaccagctccctcctgcctgaagatgttccaccaaatttgggcagctctgctctacttctatggtattatccttaactccatctaccagtgccctgagcacagtcaactgacaactctgggcgtggatgggaaggagttcccagaggtccacttgggccagtggtactttatcgcaggggcagctcccaccaaggaggagttggcaacttttgaccctgtggacaacattgtcttcaatatggctgctggctctgccccgatgcagctccaccttcgtgctaccatccgcatgaaagatgggctctgtgtgccccggaaatggatctaccacctgactgaagggagcacagatctcagaactgaaggccgccctgacatgaagactgagctcttttccagctcatgcccaggtggaatcatgctgaatgagacaggccagggttaccagcgctttctcctctacaatcgctcaccacatcctcccgaaaagtgtgtggaggaattcaagtccctgacttcctgcctggactccaaagccttcttattgactcctaggaatcaaggtaaggggttaaaatctcataaaacaggattaggactcaccaagtcttctggtgttacagggtgaaagaggctcgtgtgatgtcaccagagggatgtggctaagagctgtgatgtcacctgagggaggcaggatgggttctgggctactcaaaagagaggtttctgagtttgcactggataaagggggcagagggtcatacgtggagggaaaagagccttagagactcccctttgacacagggaatgaaagaacacgttctcccccaccccattactatcaactttgcttttctccctggacttcccttaggcctgtgagctgtccaataactgacctgtaacttcatctaagtccccagatgggtacaatgggagctgagttgttggagggagaagctggagacttccagctccagctcccactcaagataataaagataatttttcaatcctca

SEQ ID NO: 2136 - DNA, 1713 bp, Homo sapiens; identical to SEQ ID NO: 58

SEQ ID NO: 2137 - DNA, 882 bp, Homo sapiens; identical to SEQ ID NO: 1045

SEQ ID NO: 2138 - DNA, 1164 bp, Homo sapiens
ttctctatattgtgcaggggagctccgagtgtccacaggaagggaactatcagctcctggcatctgtaaggatgctgtccatgctgaggacaatgaccagactctgcttcctgttattcttctctgtggccaccagtgggtgcagtgcagcagcagcctcttctcttgagatgctctcgagggaattcgaaacctgtgccttctccttttcttccctgcctagaagctgcaaagaaatcaaggaacgctgccatagtgcaggtgatggcctgtattttctccgcaccaagaatggtgttgtctaccagaccttctgtgacatgacttctgggggtggcggctggaccctggtggccagcgtgcacgagaatgacatgcgtgggaagtgcacggtgggtgatcgctggtccagtcagcagggcaacaaagcagactacccagagggggatggcaactgggccaactacaacacctttggatctgcagaggcggccacgagcgatgactacaagaaccctggctactacgacatccaggccaaggacctgggcatctggcatgtgcccaacaagtcccccatgcagcattggagaaacagcgccctgctgaggtaccgcaccaacactggcttcctccagagactgggacataatctgtttggcatctaccagaaatacccagtgaaatacagatcagggaaatgttggaatgacaatggcccagccatacctgtggtctatgactttggtgatgctaagaagactgcatcttattactcaccgtatggtcaacgggaatttgttgcaggattcgttcagttccgggtgtttaataacgagagagcagccaacgccctttgtgctgggataaaagttactggctgtaacactgagcatcactgcatcggtggaggagggttcttcccacagggcaaaccccgtcagtgtggggacttctccgcctttgactgggatggatatggaactcacgttaagagcagctgcagtcgggagataacggaggcggctgtactcttgttctatagatgagacagagctctgcggtgtcagggcgagaacccatcttccaaccccggctatttggagacggaaaaactggaattctaacaaggaggagaggagactaaatcacatcaatttgcaa

SEQ ID NO: 2139 - DNA, 5031 bp, Homo sapiens
ggacagtggagacgcgccttctcggctctggtccgcgccctggggccctggcctccctggaggggctggggaactggaagctgggccgagagagttcccgctgcagctatcgcgcagtccctcctgcgcccgggcgcccccagcgggttccgggaggcgcccggtgagcccacgtctgttgcggcggagcgagcgcgctccgggagggccgagagccggcggggctggcaggagctctcgggcgcccgcctccctccttcgcggacggtctcccgacacgccggctgagagcccttttcgactgtgagctgcggcagctgagcagaggcggcggcgcgggacctgcagtcgccagggattccctccaggtgacgatgctctggttctccggcgtcggggctctggctgagcgttactgccgccgctcgcctgggattacgtgctgcgtcttgctgctactcaattgctcgggggtccccatgtctctggcttcctccttcttgacaggttctgttgcaaaatgtgaaaatgaaggtgaagtcctccagattccatttatcacagacaacccttgcataatgtgtgtctgcttgaacaaggaagtgacatgtaagagagagaagtgccccgtgctgtcccgagactgtgccctggccatcaagcagaggggagcctgttgtgaacagtgcaaaggttgcacctatgaaggaaatacctataacagctccttcaaatggcagagcccggctgagccttgtgttctacgccagtgccaggagggcgttgtcacagagtctggggtgcgctgtgttgttcattgtaaaaaccctttggagcatctgggaatgtgctgccccacatgtccaggctgtgtgtttgagggtgtgcagtatcaagaaggggaggaatttcagccagaaggaagcaaatgtaccaagtgttcctgcactggaggcaggacacaatgtgtgagagaagtctgtcccattctctcctgtccccagcaccttagtcacatacccccaggacagtgctgccccaaatgtttgggtcagaggaaagtgtttgacctcccttttgggagctgcctctttcgaagtgatgtttatgacaatggatcctcatttctgtacgataactgcacagcttgtacctgcagggactctactgtggtttgcaagaggaagtgctcccaccctggtggctgtgaccaaggccaggagggctgttgtgaagagtgcctcctacgagtgcccccagaagacatcaaagtatgcaaatttggcaacaagattttccaggatggagagatgtggtcctctatcaattgtaccatctgtgcttgtgtgaaaggcaggacggagtgtcgcaataagcagtgcattcccatcagtagctgcccacagggcaaaattctcaacagaaaaggatgctgtcctatttgcactgaaaagcccggcgtttgcacggtgtttggagatccccactacaacacttttgacggtcggacatttaactttcaggggacgtgtcagtacgttttgacaaaagactgctcctcccctgcctcgcccttccaggtgctggtgaagaacgacgcccgccggacacgctccttctcgtggaccaagtcggtggagctggtgctgggcgagagcagggtcagcctgcagcagcacctcaccgtgcgctggaacggctcgcgcatcgcgctcccctgccgcgcgccacacttccacatcgacctggatggctacctcttgaaagtgaccaccaaagcaggtttggaaatatcttgggatggagacagttttgtagaagtcatggctgcgccgcatctcaagggcaagctctgtggtctttgtggcaactacaatggacataaacgtgatgacttaattggtggagatggaaacttcaagtttgatgtggatgactttgctgaatcttggagggtggagtccaatgagttctgcaacagacctcagagaaagccagtgcctgaactgtgtcaagggacagtcaaggtaaagctccgggcccatcgagaatgccaaaagctcaaatcctgggagtttcagacctgccactcgactgtggactacgccactttctaccggtcctgtgtgacagacatgtgtgaatgtccagtccataaaaactgttattgcgagtcatttttggcatatacccgggcctgccagagagagggcatcaaagtccactgggagcctcagcagaattgtgcagccacccagtgtaagcatggtgctgtgtacgatacctgtggtccgggatgtatcaagacgtgtgacaactggaatgaaattggtccatgcaacaagccgtgcgttgctgggtgccactgtccagcaaacttggtccttcacaagggaaggtgcatcaagccagtcctttgtccccagcggtgacctttgtttcgatccttaagactctgaaatctggtgactttgacactgaagcggaagagccaatgaaggactgcagtatttgtgtgcccgattctgtaaacacacacacacagagtatatatgtgtatatatatatagatatattcaaaaacattgcatcatttatatgaactatagggggattattatatgtatattttttgctataagacatgtattgtttctaggatcctaacctgtaagccattgaacatgttgtataaatacaccaggtgtttttaatttaataaggtggcatgcagatacattggatagtgttaacatcacatacatttgtcatttttaaggaagttttctaagagccctcaattgcctgcctgtattaattttagttttgagtcaggatttgtaatggagtgggaaatgtgtttctctggagaagggcacatttatctaggggcatttcaggtttccaaagaaaggaatgtatgcctgggaaagacagcaggagattggtgaccggccctaatggtgcatgaaaagcgagtgataggctgttagaatgtattaggtcatgggctaacattatttccaaaattgattggctggttgccaagaaatatatatttgtcactagggcataaccgaagaatcaagtgatttcttgccatccttgcgtagtcctcaagtcttctaatcatctatgtgtgtatgatggatgtgaccatttatatgtcatgtgttgaaattaaagggtgtctggatgccatgttaattttattgagcatgagaaagtatttgaagaaactgttgcacaacatatgatgaaattttgatttctctgaatctcagagtaatttaagatgggcaaatccaatgagttgatgtaacccatctacattttgtggctatttcatgtataaaatgaaaggctttagttatttctagaggagtcccatccaacactatttggcgactgttaatatgttataattattagacagtggaaaagcctttattgactaattgatttaacctcagtccaaagaacagtctctatacttgccctcatttactgataggctgctactagttaccatttgattgtcttgactttcgtcttcagttgaattggtgaaaacatcaacaaaaacaaaacccactgtgtcttaaaataaaatgttctgcattgtagtcaataaagggcttaagatgtaaaacaatgcattttctctctcaagatgtcctgtgttatactttacaattagttgtatcaacttcagattcattaaattttaacagctgtatttagttataatttttgtatcttacaacagtatatataaagactattattaatagacaaaagcaaacccacgtttttgacaagccagcatattgccaatgctcgtcaaagacatttatgtttcttttacattcatgacagctaaagtattaacttggaatttttttttttttttttgactggaaaatccctagttgtttgaattaactgaataaagtgcagggcgtaatagtgactggctgggggcactgggcctttgtgttttttttcattcctgtgtttggatactaatcaccctcgtatctgcagcctgaggtagtcaggtcattgtttcaatgctgcccttggaaagaagactttgacttaggtgctttgggatctaagtgtggtttgtgactatccccattatttaagcatttgggggtctcacttttgcttatctgtaacacaaagaggccatgtagtatagtgagcagggttgagaatcgggaaaactagacccctgccactaacaggctaggagactttgggcagtaatgggaggcactgagggtttgcaaatactttcctacttgtaatctcattgattccctgctctgccctgacaggaggggtagggaaaatcagttgacgttgcctggtggttcctaccttctgtaaaacgaacagattccttaagattagctttaaatcccttttcagttcactgttggttctcatctttgaaagagggcagcataagggaaatgatggagaagggagaattgtggatggttatttatagctcatgattcatccaaggactgagttattctccccatgaggctaaccggcctctttcccaacacttaatcatggcagccaggatgggtgaatgatgaaagctcttctgcatgagccggtttcatcatcttgggtgggttgattacaagtttgtgtggcattcctttagctggggattagcttaatctctgtacatttttctcatttctaattgaagaagaaagggagggcagagaggacagaaaattacttgggtttactaattcaaagagccatctctgatgggagagggtgaggaaatcagctgaatggttggcctgcatattcttttttaggccacaggctacagctgagcaatggcttagtctaatgattgggcacaatgaggatttaccaagtgcttcaatgagagcagtcctgtttcattcacatgggatgttttcaattggttcttcaactaagctcttgcagagtgagatgacttgaaataaaaatgttctatgaatattg

SEQ ID NO: 2140 - DNA, 918 bp, Homo sapiens; identical to SEQ ID NO: 52

SEQ ID NO: 2141 - DNA, 4123 bp, Homo sapiens; identical to SEQ ID NO: 286

SEQ ID NO: 2142 - DNA, 4120 bp, Homo sapiens; identical to SEQ ID NO: 68

SEQ ID NO: 2143 - DNA, 8159 bp, Homo sapiens; identical to SEQ ID NO: 176

SEQ ID NO: 2144 - DNA, 3268 bp, Homo sapiens
gggacagggctgaggatgaggagaaccctggggacccagaagaccgtgccttgcctggaagtcctgcctgtaggcctgaaggacttgccctaacagagcctcaacaactacctggtgattcctacttcagccccttggtgtgagcagcttctcaacatgaactacagcctccacttggccttcgtgtgtctgagtctcttcactgagaggatgtgcatccaggggagtcagttcaacgtcgaggtcggcagaagtgacaagctttccctgcctggctttgagaacctcacagcaggatataacaaatttctcaggcccaattttggtggagaacccgtacagatagcgctgactctggacattgcaagtatctctagcatttcagagagtaacatggactacacagccaccatatacctccgacagcgctggatggaccagcggctggtgtttgaaggcaacaagagcttcactctggatgcccgcctcgtggagttcctctgggtgccagatacttacattgtggagtccaagaagtccttcctccatgaagtcactgtgggaaacaggctcatccgcctcttctccaatggcacggtcctgtatgccctcagaatcacgacaactgttgcatgtaacatggatctgtctaaataccccatggacacacagacatgcaagttgcagctggaaagctggggctatgatggaaatgatgtggagttcacctggctgagagggaacgactctgtgcgtggactggaacacctgcggcttgctcagtacaccatagagcggtatttcaccttagtcaccagatcgcagcaggagacaggaaattacactagattggtcttacagtttgagcttcggaggaatgttctgtatttcattttggaaacctacgttccttccactttcctggtggtgttgtcctgggtttcattttggatctctctcgattcagtccctgcaagaacctgcattggagtgacgaccgtgttatcaatgaccacactgatgatcgggtcccgcacttctcttcccaacaccaactgcttcatcaaggccatcgatgtgtacctggggatctgctttagctttgtgtttggggccttgctagaatatgcagttgctcactacagttccttacagcagatggcagccaaagatagggggacaacaaaggaagtagaagaagtcagtattactaatatcatcaacagctccatctccagctttaaacggaagatcagctttgccagcattgaaatttccagcgacaacgttgactacagtgacttgacaatgaaaaccagcgacaagttcaagtttgtcttccgagaaaagatgggcaggattgttgattatttcacaattcaaaaccccagtaatgttgatcactattccaaactactgtttcctttgatttttatgctagccaatgtattttactgggcatactacatgtatttttgagtcaatgttaaatttcttgcatgccataggtcttcaacaggacaagataatgatgtaaatggtattttaggccaagtgtgcacccacatccaatggtgctacaagtgactgaaataatatttgagtctttctgctcaaagaatgaagctccaaccattgttctaagctgtgtagaagtcctagcattataggatcttgtaatagaaacatcagtccattcctctttcatcttaatcaaggacattcccatggagcccaagattacaaatgtactcagggctgtttattcggtggctccctggtttgcatttacctcatataaagaatgggaaggagaccattgggtaaccctcaagtgtcagaagttgtttctaaagtaactatacatgttttttactaaatctctgcagtgcttataaaatacattgttgcctatttagggagtaacattttctagtttttgtttctggttaaaatgaaatatgggcttatgtcaattcattggaagtcaatgcactaactcaataccaagatgagtttttaaataatgaatattatttaataccacaacagaattatccccaatttccaataagtcctatcattgaaaattcaaatataagtgaagaaaaaattagtagatcaacaatctaaacaaatccctcggttctaagatacaatggattccccatactggaaggactctgaggctttattcccccactatgcatatcttatcattttattattatacacacatccatcctaaactatactaaagcccttttcccatgcatggatggaaatggaagatttttttttaacttgttctagaagtcttaatatgggctgttgccatgaaggcttgcagaattgagtccattttctagctgcctttattcacatagtgatggggtactaaaagtactgggttgactcagagagtcgctgtcattctgtcattgctgctactctaacactgagcaacactctcccagtggcagatcccctgtatcattccaagaggagcattcatccctttgctctaatgatcaggaatgatgcttattagaaaacaaactgcttgacccaggaacaagtggcttagcttaagtaaacttggctttgctcagatccctgatccttccagctggtctgctatgagtggcttatcccgcatgagcaggagcgtgctggccctgagtactgaactttctgagtaacaatgagatacgttacagaacctatgttcaggttgcgggtgagctgccctctccaaatccagccagagatgcacattcctcggccagtctcagccaacagtaccaaaagtgatttttgagtgtgccagggtaaaggcttccagttcagcctcagttattttagacaatctcgccatctttaatttcttagcttcctgttctaataaatgcacggctttacctttcctgtcagaaataaaccaaggctctaaaagatgatttcccttctgtaactccctagagccacaggttctcattccttttcccattatacttctcacaattcagtttctatgagtttgatcacctgatttttttaacaaaatatttctaacgggaatgggtgggagtgctggtgaaaagaggtgaaatgtggttgtatgagccaatcatatttgtgattttttaaaaaaagtttaaaaggaaatatctgttctgaaaccccacttaagcattgtttttatataaaaacaatgataaagatgtgaaactgtgaaataaatataccatattagctacccaccaaa

SEQ ID NO: 2145 - DNA, 2208 bp, Homo sapiens; identical to SEQ ID NO: 872

SEQ ID NO: 2146 - DNA, 4949 bp, Homo sapiens; identical to SEQ ID NO: 1151

SEQ ID NO: 2147 - DNA, 3027 bp, Homo sapiens; identical to SEQ ID NO: 975

SEQ ID NO: 2148 - DNA, 288 bp, Homo sapiens
atggtggttatagatgtaaaaatgctatcaggatttactccaaccatgtcatccattgaagagcttgaaaacaagggccaagtgatgaagactgaagtcaagaatgaccatgttcttttctacttggaaaatggttttggtcgagcagacagtttccctttttctgttgagcagagcaaccttgtgttcaacattcagccagccccagccatggtctacgattattacgaaaaagaagaatatgccctagctttttacaacatcgacagtagttcagtttcccagtga

SEQ ID NO: 2149 - DNA, 5370 bp, Homo sapiens
gctgccccgcagatcattccacagaccccttgtcccatcccttctggacagacccaggactgatgagggttcgggttcgggaggtgtggtgtggtgggggcttgtgtggctgtagcggccggctttcctaaaccccagagcgggatactcgggatctgagcagaggggaaagtcatctaagaggctgctgctttacaaggtctgggcacagagctgcccctcccttcctccctgaagtttgcatgaagtgcacattaggctgtaattaggggatttgggaggagaactttcctggtgacgctttgcttttcttctgctcttggtgagaaagtgcctccttcttcccaggatcaggacctctgccatccagcgccacaaagagacattctgcacacacactcacacacgcacacacacacacactctcacactcgcccagagacaaacttaaggtgaggagaaagagcgctagcttcacttgatctccagcttccaacttaagcagaacttgagagcatccgaactcctggatttcaggacaaggggttccaaatctcacaagcctctttgtatgtgatgctctcgcagtgaagaagattctttgggctataaagatgaagagtctacttcttctggtgctgatttcaatctgctgggctgatcatctttcagacaactatactctggatcatgacagagctattcacatccaagcagaaaatggcccccatctacttgtggaagcagagcaagccaaggtgttttcacacagaggtggcaatgttacactgccatgtaaattttatcgagaccctacagcatttggctcaggaatccataaaatccgaattaagtggaccaagctaacttcggattacctcaaggaagtggatgtttttgtttccatgggataccacaaaaaaacctatggaggctaccagggtagagtgtttctgaagggaggcagtgatagtgatgcttctctggtcatcacagacctcactctggaagattatgggagatataagtgtgaggtgattgaaggattagaagatgatactgttgtggtagcactggacttacaaggtgtggtattcccttactttccacgactggggcgctacaatctcaattttcacgaggcgcagcaggcgtgtctggaccaggatgctgtgatcgcctccttcgaccagctgtacgacgcctggcggggcgggctggactggtgcaatgccggctggctcagtgatggctctgtgcaatatcccatcacaaagcccagagagccctgtggggggcagaacacagtgcccggagtcaggaactacggattttgggataaagataaaagcagatatgatgttttctgttttacatccaatttcaatggccgtttttactatctgatccaccccaccaaactgacctatgatgaagcggtgcaagcttgtctcaatgatggtgctcagattgcaaaagtgggccagatatttgctgcctggaaaattctcggatatgaccgctgtgatgcgggctggttggcggatggcagcgtccgctaccccatctctaggccaagaaggcgctgcagtcctactgaggctgcagtgcgcttcgtgggtttcccagataaaaagcataagctgtatggtgtctactgcttcagagcatacaactgaatgtgcccttagagcgcatcagttttaaagtcattaagaacatgtgaaaggtgttttttttttccaatatgaactcatgcaagttaccaaaactgtgataacccttttttacttactgtaaagagtcattttcataaagatcaattcattgatttgttttttgtaaagctatcattcaatatatattataaattaatataaatttaagggaagctctatgtaaggagacttagagccaaactgtttaagctgtatcatcccaacaaagtatcctttcatgaacggggcatgcaatagcttaagaattgctaggattaaattaaggaaagtaaagctactcagagcagcaggttccacaagcacaaactttacacatttgtacaattttgaaatgcactacaataaacaaattagagcaacacatttgaaatacaggcttctttacataaactgagaggttatacaaaactcagtttcacaagggaacaatctatacctttctaaaagttaatatttcaagtctctaataggcagaatattttactctttaaaatcctgcctttctgaccaaaaaaaaaaaaaaaaattcatatggattccaatccatagtaacaagcacagttaaaactcctcaataatcccatttatatgaagcatgacacataaataagcagataatatttaaccaatgaaaaagacttctaccttcttataattaaaattacacatgtctaagaggaattgttttatcttttgagtagctttaccgagttgtatttaaattctaagggccatttgctaagcagcatttagcatctactcagggcagttatatagataaactgctggacagaaaaattgtaaaatttagcagcttgattttctgttagcctatgaaatgttattgtcctataaaaataactttaaactgatttaatatttcatatttacattatatgaaaatcaattacattataaaaggaatccctaatgcagaaacaaagatgcaactttcaaaattcttattattcctatttgtatatacacgagagaacccaaccagtgcctgtgtttggggggaaaagtcaacagtgtagttctaaaccttatcccaaacagaaaatgtggttaatgatgtcactttccttgctggtcatcattaggcttaaattaaatgctgaagctgtcatcaaagagtttacactaaaatcttcagggctttaaataaaaggttaagtccagcttccaaacacaattttccacattagcagctccaatcttcttaaataaagctctgttttcctatatttttatgactgctgagaccccacagggaccaatatttgtattcaaattacatttcatggtttcccattgtttcacaatgagttctaataaatgggatttactataataatccaagtatgacatagccggtatgctttcatgaatgtttttatgtagattttcctcccatgaacatgagtaaataaatctgtttcctgaatggattgtggttgcatttaaagctctgtaataattctaataaatttactctatagagttctgtgtgtggaaggtatagaacaattggaagtccatgaaaccataactataatcatatattattcagacaaaatattgtaataaaagtaggtcctttctttcatcaaaaacatatctgaaaattttcagatgctttaatattaaaagatgacaatgttatgtatgcacatttttaagttaggttggatatgcaaactgtacaaaactataaatccaaagagtttgtaaagtttaaactcaaacactggtggtataaatagaacttgcacttctaaattaaggaagatacctaaatggtctaggatgagatgatatattatttaaagaggggactatctcccaaataacaactttaacacctcaaatatgggggctagctcattgaaagaagtccatacttgaactattattatgtatgttccgataattttgttgaaaatacaagtgggaacaaatttctattgaagcaaacatctaattttcagttatgtccagaactctactttataatgttaaatgtagtagtatttcttaacttttaaatacttactactataggaattggtgctgatcaaaatctctggagtgactgttagctgattaaaatctataccacttacacatcatttttccattcgtgtaaaaaacaaaaaatcttaacacagtgaatactgctgagcagaattttttcttctcattttgctcaaaggaccagaatttccatgccctttatactcatacttgaatgagtctttttaatgttctcattttgctgtttttccaccaaatgtctattttcctacttcattccccaagatgtctcactgagcaggtctgaaaaagaaaggttattctaatacaattcctaacagaaagttggtacaacactggctaattcagaaatcgctcctcagacttagattccaagagtatcaaagagattagatgggaggctgggccaggaacccttgttttaatgtatttgtccataattaacactggtgaccatataaggaacaaagtatatctgcacatttcactgagacatctacattggaaaacccaaacaaaaagaagcaattcaaataaaaagacaacataagaacgaaaataagttggtcacattaacactggaagccatctttaagtgagtgctgtcatattgtgtcacagtaatttttagccaaatatggcgtttgtaaatttaaactttctctcatggaaagggggctggtacctgtcaaagtgttattttatgcaacaatatagtcactttttattttggcaattagaagtagactcaaaggagattacaatttggttgctggcagccattctgggtttcttgattttagtactccaaagaatatggtggtctcatggagtagctgaccactaaggaggggaggattaaaagggaatcacttatcagtttttagcataggatgcattaagaaatatcaacggataactgacatcgttttgttaagaagttaactgtatcgtagctcactactgccagagcggcaatggatgtacaacgaaagagatgaaaaatacaaaagttattaagccacctgattaaaagaaaaccaatatttaaaggcatttaatagatatcaagtataactttgaggagaagaatcaatctgtattaccaaaaaaaaaatgttttgattttctgtaagatacaatgaactggtacattaaaagtcaattttgtgttactgcagtatcttttaattcttctgagttgtagaatcttagctatttttctttgtgtcaaactctgtcaatacattatttccaagaaaggcatttaattcattcttgttctgatacatttgacttcaaattgtaaatacgtacaattttcatttcctagtactcttgcaaagtcaaaaaaaaaaaaagagcatttatatggtgtcgctaaatcaactatagtattatcccaaaatatattgacttttttctctttgtatatgactcaaagcataattaattttgcccaccagttcagcaatcccagaaatctattgtgttgttgattagattaacacattttaaatgctttataacttaatcatgagtgctgaattaaaaaaaggtttttcttttcata

SEQ ID NO: 2150 - DNA, 7463 bp, Homo sapiens
gcagtcggagacttgcaggcagcaaacacggtgcgagcgaacaggagtgggggggaaattaaaaaaagctaaacgtggagcagccgatcggggaccgagaaggggaatcgatgcaaggagcacaataaaacaaaagctacttcggaacaaacagcatttaaaaatccacgactcaagataactgaaacctaaaataaaacctgctcatgcaccatggtttttcaaactcggtacccttcatggattattttatgctacatctggctgctccgctttgcacacacaggggaggcgcaggctgcgaaggaagtactactgctggattctaaagcacaacaaacagagttggagtggatttcctctccacccaatgggtgggaagaaattagtggtttggatgagaactataccccgatacgaacataccaggtgtgccaagtcatggagcccaaccaaaacaactggctgcggactaactggatttccaaaggcaatgcacaaaggatttttgtagaattgaaattcaccctgagggattgtaacagtcttcctggagtactgggaacttgcaaggaaacatttaatttgtactattatgaaacagactatgacactggcaggaatataagagaaaacctctatgtaaaaatagacaccattgctgcagatgaaagttttacccaaggtgaccttggtgaaagaaagatgaagcttaacactgaggtgagagagattggacctttgtccaaaaagggattctatcttgcctttcaggatgtaggggcttgcatagctttggtttctgtcaaagtgtactacaagaagtgctggtccattattgagaacttagctatctttccagatacagtgactggttcagaattttcctctttagtcgaggttcgagggacatgtgtcagcagtgcagaggaagaagcggaaaacgcccccaggatgcactgcagtgcagaaggagaatggttagtgcccattggaaaatgtatctgcaaagcaggctaccagcaaaaaggagacacttgtgaacgtaagtaatgtgtcctattaaaactccactttgcctttttaaatttcagtatcagacattttaaactttaatagttatttgaatacgtgaatctgctctgtaccagaagcgcaattcagtagatcttaaacaaagtcaccgttgaacttagtgattgccctacagtagcatctgcactaagtgtatgtaatcaatataggtgataatgaaatttgttactaaaatttaatgtgtcctatgcttaacatggaagtcaatagttgcacgttgggctatggagtttagagaggagtctgggtagttggacatatagcctggcaagactgaggtgacatttaacaggatttaatgagatgccattcctcctgtttttaaacccatattgtctgggcccttgagtagcagtaaataggaggttaagagggctgtgaataagagctctagtgacaggcagggcataaacgaatatatttacaaacttttagaattatcttatataaatactataactttaatacaaaattttcaaatttcacttacaaaatctctgtggttacttctgagaaaggtgtgtgttttttttttttttttttggactaagtaccaaaatgaccacatttttgtgaaagtgggccaaagtaaagttttaattattatagtacaccaattgcatgttttgaaacaatcatgtatgaattagtaaacttttttctttgttttataaaaccgttttttttctttcctagcattatgtggctaaatatttaaaactatgtcatatggaccttcaagattgatagatattctgtttctaggtttcatgaaaataaattataaagttatgttacctgtggccgtgggttctacaagtcttcctctcaagatcttcagtgctctcgttgtccaactcacagtttttctgataaagaaggctcctccagatgtgaatgtgaagatgggtattacagggctccatctgacccaccatacgttgcgtgcacaaggcctccatctgcaccacagaacctcattttcaacatcaaccaaaccacagtaagtttggaatggagtcctcctgcagacaatgggggaagaaacgatgtgacctacagaatattgtgtaagcggtgcagttgggagcagggcgaatgtgttccctgtgggagtaacattggatacatgccccagcagactggattagaggataactatgtcactgtcatggacctgctagcccacgctaattatacttttgaagttgaagctgtaaatggagtttctgacttaagccgatcccagaggctctttgctgctgtcagtatcaccactggtcaagcagctccctcgcaagtgagtggagtaatgaaggagagagtactgcagcggagtgtcgagctttcctggcaggaaccagagcatcccaatggagtcatcacagaatatgaaatcaagtattacgagaaagatcaaagggaacggacctactcaacagtaaaaaccaagtctacttcagcctccattaataatctgaaaccaggaacagtgtatgttttccagattcgggcttttactgctgctggttatggaaattacagtcccagacttgatgttgctacactagaggaagctacaggtaaaatgtttgaagctacagctgtctccagtgaacagaatcctgttattatcattgctgtggttgctgtagctgggaccatcattttggtgttcatggtctttggcttcatcattgggagaaggcactgtggttatagcaaagctgaccaagaaggcgatgaagagctttactttcattttaaatttccaggcaccaaaacctacattgaccctgaaacctatgaggacccaaatagagctgtccatcaattcgccaaggagctagatgcctcctgtattaaaattgagcgtgtgattggtgcaggagaattcggtgaagtctgcagtggccgtttgaaacttccagggaaaagagatgttgcagtagccataaaaaccctgaaagttggttacacagaaaaacaaaggagagactttttgtgtgaagcaagcatcatggggcagtttgaccacccgaatgttgtccatttggaaggggttgttacaagagggaaaccagtcatgatagtaatagagttcatggaaaatggagccctagatgcatttctcaggaaacatgatgggcaatttacagtcattcagttagtaggaatgctgagaggaattgctgctggaatgagatatttggctgatatgggatatgttcacagggaccttgcagctcgcaatattcttgtcaacagcaatctcgtttgtaaagtgtcagattttggcctgtcccgagttatagaggatgatccagaagctgtctatacaactactggtggaaaaattccagtaaggtggacagcacccgaagccatccagtaccggaaattcacatcagccagtgatgtatggagctatggaatagtcatgtgggaagttatgtcttatggagaaagaccttattgggacatgtcaaatcaagatgttataaaagcaatagaagaaggttatcgtttaccagcacccatggactgcccagctggccttcaccagctaatgttggattgttggcaaaaggagcgtgctgaaaggccaaaatttgaacagatagttggaattctagacaaaatgattcgaaacccaaatagtctgaaaactcccctgggaacttgtagtaggccaataagccctcttctggatcaaaacactcctgatttcactaccttttgttcagttggagaatggctacaagctattaagatggaaagatataaagataatttcacggcagctggctacaattcccttgaatcagtagccaggatgactattgaggatgtgatgagtttagggatcacactggttggtcatcaaaagaaaatcatgagcagcattcagactatgagagcacaaatgctacatttacatggaactggcattcaagtgtgatatgcatttctcccttttaagggagattacagactgcaagagaacagtactggccttcagtatatgcatagaatgctgctagaagacaagtgatgtcctgggtccttccaacagtgaagagaagatttaagaagcacctatagacttgaactcctaagtgccaccagaatatataaaaagggaatttaggatccaccatcggtggccaggaaaatagcagtgacaataaacaaagtactacctgaaaaacatccaaacaccttgagctctctaacctcctttttgtcttatagactttttaaaatgtacataaagaatttaagaaagaatatatttgtcaaataaaatcatgatcttattgttaaaattaatgaaatattttccttaaatatgtgatttcagactattcctttttaaaatcatttgtgtttattcttcataaggactttgttttagaaagctgtttatagctttggacctttttagtgttaaatctgtaacattactacactgggtacctttgaaagaatctcaaatttcaaaagaaatagcatgattgaagatacatctctgttagaacattggtatcctttttgtgccattttattctgtttaatcagtgctgttttgatattgtttgctaattggcaggtagtcaagaaaatgcaagttgccaagagctctgatattttttaaaaagaatttttttgtaaagatcagacaacacactatcttttcaatgaaaaaagcaataatgatccatacatactataaggcacttttaacagattgtttatagagtgattttactagaaagaatttaataaactcgaagtttaggtttatgagtatataaacaaatgaggcacttcatctgaagaatgttggtgaaggcaagtctctgaaagcagaactatccagtgttatctaaaaattaatctgagcacatcaagattttttcattctcgtgacattaggaaatttaggataaatagttgacatatattttatatcctcttctgttgaatgcagtccaaacatgaaaggaaataattgttttatattataactctgaagcatgataaaggggcagttcacaattttcaccatttaaacacaaatttgctgcacagaatatcaccattgcagttcaaaacaaaacaaaacaaaaagtcttttgtttgtgaacactgatgcaagaaacttgttaaatgaaaggactctttaccctagaaggaagaggtgaaggatctggcttgtttttaaagctttatttattaaaccatattatttgattactgtgttagaatttcataagcaataattaaatgtgtctttatagatattgcaggaatgtatacatattgtgattaatgctttcaaaacttatgaaaatcatgaactaccccagaattgaactgttgtacttccaaagagaattgggctgtttataatgattttaatagagaaagatcccagggatcggtcataattggtcttgtttgataatgtgggcatccacaaacaaacaaacaaataacagaaacaaaatctgtaaatgttcctttgtaaaacttgtaaattttatttatactgtcttgttttgtacacacatttctctgtagtgggctctgaatacattgaaaatgcactatatttttctattttacttgcagagcatcacaaaagaacaggtattttcagtgctacataatgtgttttcccacatttaggaccaaagacggctatagaaaaactcaaatggattgcttcccaaacccctccccaccctttttttttggttttaaatcactgtacagtgttatttgatattttaatttattttttgattgactagaaaaatcattttaatttcactaaaatgttttttgtccctaaggaaaagtaatctgtaaaaataattttaattagcataatacagtcacctagacacttccatttgtaatctttgtaatagactgtaaatatatttttggaactataacacaatgtgcttgagggttatttttcagtgtctgcagtgtgtacaagtgtttatactaagtccagcactttacaattctaatcagtagcattggcctttgtgagaatgagtgaaagagtttgagtgagtgttcttaattccttttggattctagactcactaataatgaagttcttttcttgttcatagcttaaggtgcttattttttctattaaaattaaattaacaaaagccattctagaaatagaagacatagtatggtacatgcaaacggtgtctttcctgcttttttctagcactagatttatagttgagtagtctttcttgagtagaagggcagaataaaagtttttttgagtttttttcaaaaataaatttttccttcagcaatatacctcatctgccttaaattttttacagctctttacagggaaaggggagaagggatgggaaagacacacagcacaataggaagtgtatgattacatcactatctcgtttgtaagtttcttttcctaatcaacattatgatttcgaaatacatgtatgtgaaacaaatattaagagaaaaagaattaacattgtaatgctgattgtaatactctcttccagaaagagatgagatggtataacgataagaatgtacaacttgcaccttgaaatctttttttttaaataaattagtgctcaggggaggaaaagtagagaaagtgaacgtcaaaaatagaattccaaaattataaaaatgcaaaaggaaatggcctccttgctttaatagagccaccttttttagaacactgtcctcacacttgacctgtgttttgcattcagtactgaaataaaagtaacttgttctacatttgaatctaacattttctcagcaattgatctggtccttgtttactagaactggtggtttatgcttgtcagagcactattagttgaatcatattgtatacttatgtaatctacattagctagtactgtttaggactatattttaattgctcttcttatccgtgtttttaagacaattaaaatggtgtgattcacctctcttttttatttaggtaatgctgatattctcccttttgtttcttgagtagcctagaactatgctactcactgatgtgcatgttcaaataaattactgatgtgtatttttttgctatatgtggagaaatcatggggaactcggggcgagatgtgcttttcgttggttgaatttgtccctccttgcctaagaaatactacaggggtcatccttttataaggacaaactgcttttgaacagtgtcttcaatgtatcaagcacaaataactctttcttcaacatgaatcataagtctctttttaccagcttaaaataataaacaagtctattagacaatgtaaagaaaa

SEQ ID NO: 2151 - DNA, 2424 bp, Homo sapiens; identical to SEQ ID NO: 852

SEQ ID NO: 2152 - DNA, 2913 bp, Homo sapiens; identical to SEQ ID NO: 171

SEQ ID NO: 2153 - DNA, 288 bp, Homo sapiens; identical to SEQ ID NO: 2148

SEQ ID NO: 2154 - DNA, 4703 bp, Homo sapiens
agtgtctttccacctcctcctgcagcagcggcagcggcagcagcagttagcagcggcaacttgaggctgcaccccgggcaagtccccagggtggtgctcagccgagaggggggcttggcgccccgaaggggtgtgtgtagggtgggggcgaccacgtgggaccagctggtggccctggaaaacctcccacacacccacacccacacaccccttttgtgttgcaggctgcccctccaagagcggaggcagcgagagtacgcgtgtgcctcgcgccggtccacgcggggagagcactggggaccgagacccggcaccacctcccggtccgccctccagggaaaacgggaaaactagcaagagctagcaagaactagcaagagcttgaacaaacgcctggactcagattggaagactgctcatttgtctactgcctcattcctggaaattgcactggaactgtctgattaagaaaaacagaataattctgaaagaaagaaaacaaagaaaaacatactccagaattcctaatagaacacttcacctgaacctaaaatggtgagcgagagtcaccatgaggccctggcagccccgcctgtcaccactgtcgcgactgttctgccaagcaacgccacagagccagccagtcctggagaaggaaaggaagatgcattttctaagctgaaggagaagtttatgaatgagttgcataaaattccattgccaccgtgggccttaattgcaatagccatagtcgcagtccttttagtcctgacctgctgcttttgtatctgtaagaaatgtttgttcaaaaagaaaaacaagaagaagggaaaggaaaaaggagggaagaatgccattaacatgaaagatgtaaaagacttagggaagacgatgaaagatcaggccctcaaggatgatgatgctgaaactggattgacagatggagaagaaaaagaagaacccaaagaagaggagaaactgggaaaacttcagtattcactggattatgatttccaaaataaccagctgctggtagggatcattcaggctgccgaactgcccgccttggacatggggggcacatctgatccttacgtgaaagtgtttctgctacctgataagaagaagaaatttgagacaaaagtccaccgaaaaacccttaatcctgtcttcaatgagcaatttactttcaaggtaccatactcggaattgggtggcaaaaccctagtgatggctgtatatgattttgatcgtttctctaagcatgacatcattggagaatttaaagtccctatgaacacagtggattttggccatgtaactgaggaatggcgtgacctgcaaagtgctgagaaggaagagcaagagaaattgggtgatatctgcttctcccttcgctacgtacctactgctggtaagctgactgttgtcattctggaggcaaagaacctgaagaagatggatgtgggtggcttatccgatccttatgtgaagattcatctgatgcagaatggtaagaggctgaagaagaaaaagacaacaattaaaaagaacacacttaacccctactacaatgagtcattcagctttgaagtaccttttgaacaaatccagaaagtgcaggtggtggtaactgttttggactatgacaagattggcaagaacgatgccatcggcaaagtctttgtgggctacaacagcaccggcgcggagctgcgacactggtcagacatgctggccaaccccaggcgacctattgcccagtggcacaccctgcaggtagaggaggaagttgatgccatgctggccgtcaagaagtaaaggaaagaagaagcctttctgcatttgcccatatagtgctctttagccagtatctgtaaatacctcagtaatatgggtcctttcatttttccagccatgcattcctaacacaattcagtggtacttggaatcctgttttaatttgcacaaatttaaatgtagagagcccctaagtccttcatcataccactgccctccaaatctactcttcttttaagcaatatgatgtgtagatagagcatgaatgaaattatttattgtatcacactgttgtatataccagtatgctaaagatttatttctagtttgtgtatttgtatgttgtaagcgtttcctaatctgtgtatatctagatgtttttaataagatgttctattttaaactatgtaaattgactgagatataggagagctgataatatattatacggtaaatatagtatcgtctgcattccagcaaaaatatcaactcgtaaggcactagtacagttaaactgacatcttaaaggacaacttaaacctgagctttctattgaatcatttgagtaccaagataaacttacaccacatacttggtgggtgaatccaattttgtagaattcctacacaggcaaaatagcatgatctgagcagcagcatccaggctgacctcaaggaagcatagccacaaaacagaatagcacctgtctgtacatatttacaaagctaaaataatggcttcactcttatatttgaggaagcaactgaacaggagtcaatgatttcatattactgcatatagaataacaacaaggtgttccgtgtgtgtgtgtgtgtgtgtgtgtgtgtgtgtgtgcacatttgtttggggatgggggagaagaagctaaggggagaagtcaacatttatgaaatattgcctgactatttaaaaagaaaaaagtagctctccattatcacctttatacaaaatgtacatcctgtgaattctgttccagatttcacacctacaataattccaaaaggtttgcacattagagtttgtaacaaaatattttattatataaaaccaggttagaaggaatgcaggatatttttaacacaacaatctgtgcttattacacaaaattactttgtggtaaacagacagtattgtaatcccatcaaaagatgaaagaaaaacaaaaacaaaaaccaacaacaattagccatagttctgaatgcacttcaattaagccaaaacagacagctagtgatctttttatatgctctttttacttaagttttaatttgtcctttaaaaaaaggtgaaacaaaccaagaacaagttctagaaaactgaagcaacctcttatgtatactagatgcttgatttaggaggagtttttaaacgttttcaatgttattatgtagtaaatgacactattatgaagctactagtcattccataagagtcttaaaggactgctctgtgtaacactgtgactgccgtgtgtgcttagacccgtagtttcctcagtggatagcactcaatttattccgtagtgatattgtaacaatactgccattcccttctactgcactgcccaaggtgtgtgtagcacaaacagttctcattacaaaggaccaattcagaactgaaaagctatgcataggacaaggaagatacatagaatggggtggaacacagcattttgtcaagcactgtgcaatattccatatttttccccactatggtagacaaccatttcgtggaagggcagcctattatcccacactgcatctagccttttgtcccattcacttctgtgatccattttaatttccaggccacaagacagtagtgatgctctgaaatgaaagtttgtcttcacaaatatcaaaacaaaatggaggaaaactaagcattggcctcatgttcagtcttcaggatatcacaccacgtcttttcaaaaactaaagagaattcaaaaagggctgatggtaggctttgaacatggggttggctgtttcccagtaaaactggaattcctgtcgttactgtttccttatcaaagaaggggcaagctcttttgccttttaggccagacatagcaaacgctttataattggcatagacataaaggataaaaggaaaataaccgtctgccgatggtccgtacttcttaaaaaacataggtaatagaaaatatacacaagtcagaatgtgaaattaaataatggtttgaacagaaaattcaaacaagactctttccaatttaaagggccaaaccctaccaaagagagggagttgactggcttttaaaaagtatttaaataccacaaatgacatttaatttcactgtattcagctttaagttgttcacaatgaaaccacactttcaaacaagcaggttcaagctgctgaatagacattatttcttgcattaaaataccactaatgcattctcttgcaacactgccagacatgggattgtcaccatagaattagttggtactatgccatctttcactctttcacaagtcagtgatggaacctgctttatgaccaagattcatcctcaaataagccacatgtacccttctgacaaagctgtgtaaagtattagaatctgatgctctagaaagatcctagttgcctttgtgtatatttactgcctgcttgagtgtttctatgtgtgggttttccctgtatcttgtagaaatgttggggtgttttcctctgccatatggctcgtggcctgcgagccaactatttcagctgtattttaccttcatttttgatgaggtgatttaaattttgtttcactttgtgtagtgaattccacagtagttttctgattgttgttaaaaatgacttaacatattacacagatattcaataaaaatgttttatttcctgtt

SEQ ID NO: 2155 - DNA, 7034 bp, Homo sapiens
gcaattaaagtcaagagctaaggagggagggagagggtttagaaataccagcataataagtagtatgactgggtgctctgtaaattaactcaattagacaaagcctgacttaacgggggaagatggtgagaagcgctaccctcattaaatttggttgttagaggcgcttctaaggaaattaagtctgttagttgtttgaatcacataaaattgtgtgtgcacgttcatgtacacatgtgcacacatgtaacctctgtgattcttgtgggtatttttttaagaagaaaggaatagaaagcaaagaaaaataaaaaatactgaaaagaaaagactgaaagagtagaagataaggagaaaagtacgacagagacaaggaaagtaagagagagagagagctctcccaattataaagccatgagccccctttggtgggggtttctgctcagttgcttgggctgcaaaatcctgccaggagcccagggtcagttcccccgagtctgcatgacggtggacagcctagtgaacaaggagtgctgcccacgcctgggtgcagagtcggccaatgtctgtggctctcagcaaggccgggggcagtgcacagaggtgcgagccgacacaaggccctggagtggtccctacatcctacgaaaccaggatgaccgtgagctgtggccaagaaaattcttccaccggacctgcaagtgcacaggaaactttgccggctataattgtggagactgcaagtttggctggaccggtcccaactgcgagcggaagaaaccaccagtgattcggcagaacatccattccttgagtcctcaggaaagagagcagttcttgggcgccttagatctcgcgaagaagagagtacaccccgactacgtgatcaccacacaacactggctgggcctgcttgggcccaatggaacccagccgcagtttgccaactgcagtgtttatgatttttttgtgtggctccattattattctgttagagatacattattaggtgggttttttccttggctgaaggtatattattacaggtttgtgattgggttgagggtatggcagtgggaagtaatttcatgcaagttaattaagagagcaaccacaaggcagccttaggtttatgaaagtcgtagaattatcaaataccgcctggagttagaaggaagcagtttcttcctgtgcattggatgcagacactttaaatgttctctcctctaccgtatgttcttggttcaaagtgtaaacttttctctgtgaagctgttaatcatcaaagatgtgagttggtgaggtggaggcgaattccttttgatttcagaagaaaatatttgcgaatctggccatggaagccctctctgaccttttctccaaattagaggaattaactgaacatgtgctaaggcacatgaagcttctttgtgcggaattagagtgctcatgttgggagtgggcatcttgttaaactcacaggatagatcaactttggatggattttagacagtctatcacatgatagactttcagataatcatttatggtactcctgcatggtccggaatccccaggtttcttggagctttattgtcaaggaaaagtacaagcttagccacagcaatgtagagtttctgctgcttagctctttgcaacacagtcatgttggatgcttgagaaattggtgacctgcccttccaagtcttaaaaattgggggctgggtaggacttggaatgagggggttgtctgttacaaacttcatgtatcaagtaggttcagctttgtccttatttttcagtcaaaggaaagccatagacaccaatgtattccaggagggcttgactccatcctagattcttcccatagcagttcttgaatgcatggctgcacgtgcacctctccccatttttggggtccttcattggggtcaggatgaatgaagacatcaagctcactttgaagagcaagattctgatttggacaggttcatccttctgctcatcacttgttccccttcaattgataccctctcgttgttgggttctgagaatttgaaaccttgctctgaattgaacatgaaaaagggccgtgtagccaacatcagggacagcagtgcttttctcagtgtgagtcttttaaaacttgccttacaggtaagcatctgtctgtctttatcgatagataaggaggctcttttggctataaacctttatagttttcctgttatcactctgaggaattattgctttatgagagagtactctctcaagaggaaaagaaagtcctagtttctggtcatagctacgaattaaatttatattcacgtctgttcagctctctgaagttgttataggtattttggacaagaactaaagttagctaaagtttccacataaccatcaaagctgttatgaaaaagggaagaaggatggaccaggcagtaaggaggtcattaaatcgtccagagcttttcactaaaattggcagttccagtgtccagcctaaatggcttgaatgtatttttctctcttctggtctcagcgaacatgcttgtcagctagtagttataacagattgatgggtgaggcaaaatacgcgaaagttctttttggttacataaatactgcattaggactaagtgcagttgaagttacaatattattaattaatccctcccttttaaatttatatctttgtgaagcataggttagcaaatgcctttaaaaaatatatttcctttaggtcttaatgatctattcttttggatagtctatttcacctgaatggattgttgcttacaaattaaatatgtatcaggggctcccaatcctgaaagtcacctgaatttcctggatctctgctagaaatcaaccttttaagagataaaggagggtttatcctaaaagtactagttacttctgaaattcatgtcattactattgcttttggagatataaataacaacaaaacttttttttcttactactataaaacatcatggacttattggctctatagatacagcccaggtaagatttaacattttaaaaaattctattctgtcatctctaatatgtttcccaattgtttcaggaccaggacgcccctacagggccatagatttctcacatcaaggacctgcatttgttacctggcaccggtaccatttgttgtgtctggaaagagatctccagcgactcattggcaatgagtcttttgctttgccctactggaactttgccactgggaggaacgagtgtgatgtgtgtacagaccagctgtttggggcagcgagaccagacgatccgactctgattagtcggaactcaagattctccagctgggaaactgtctgtgataggtaatggctcctgtacctgcaatggcatccagagattgtcttttctgatgtctgagacatggaggagaagtcactttatagtgctgtttcttatgcatgtggtgtcctatttacatgtttctaaaaacagttttcctctgggaggtgggatttcaaaaattcaaagctctttaattcttggatgactacaaccacctggtcaccttgtgcaatggaacctatgaaggtttgctgagaagaaatcaaatgggaagaaacagcatgaaattgccaaccttaaaagacatacgagattgcctgtctctccagaagtttgacaatcctcccttcttccagaactctaccttcagtttcaggaatgctttggaagggtttgataaagcagatgggactctggattctcaagtgatgagccttcataatttggttcattccttcctgaacgggacaaacgctttgccacattcagccgccaatgatcccatttttgtggtgatttctaatcgtttgctttacaatgctacaacaaacatccttgaacatgtaagaaaagagaaagcgaccaaggaactcccttccctgcatgtgctggtaaccatgagcctgggaggctctactcagactttcttttgctggcataacagcaagaattcaagtgagagtttatgaaatgagtagacagaagagtattcctggttcttcattcctttactgatgccatctttgatgagtggatgaaaagatttaatcctcctgcagatgcctggcctcaggagctggcccctattggtcacaatcggatgtacaacatggttcctttcttccctccagtgactaatgaagaactctttttaacctcagaccaacttggctacagctatgccatcgatctgccagtttcagttgaagaaactccaggttggcccacaactctcttagtagtcatgggaacactggtggctttggttggtctttttgtgctgttggcttttcttcaatatagaagacttcgaaaaggatatacacccctaatggagacacatttaagcagcaagagatacacagaagaagcctagggtgctcatgccttacctaagagaagaggctggccaagccacagttctgacgctgacaataaaggaactaatcctcactgttccttcttgagttgaagatctttgacataggttcttctatagtgatgatgatctcattcagaagatgcttagctgtagtttccgctttgcttgcttgtttaacaaacccaactaaagtgcttgaggctacctctaccttcaaataaagatagacctgacaatttgtgatatctaataataaccccccccccaatattgattaagcctcctccttttctgaaagcatttaaaaaaaaacaaaaaaaatcccaaaacattgatccaggggagtcatttaaatttgcaggtcagtgcaatgtgagacctggccaagaccatacatcaatctttcttagccccagtgtctttattggtaatgccatggaggtgggagttggtaggtgctagatgagtctccaagatcccttttagctataaacatctctgcttctaggcaccctcctgattatcttccttgggcttctttttcttcttttctctatatttttcctctccagcttagaagatgagaataagccttgttttctttacaggatggaaaatgactaaatgaaggatcaattccactctattgtgtaaactagattttacggattttacttaaaatctgcagttttaaacagtagacctatattacaggattcaatagctggatacacattgattctatagtgataaatagagaagataataaaattatagagtttcctggttagttgatatgctactgtaaacctattaacaaatacagaattactctttccaaggaaggctgactgaaggctggtgaggctgtaaacctgaacatgagacaatttgacttgagtcccattactctgaggtctctttggctgatcctctaccaatttctttactaggtagcctcagatgaaaaattattcccacataatgcactgggcttatttttaagcattgatgttagattgattaatgttgccgaatactcacagttacttatgaatgctgatcaattaagtcttatcatttgaaagcaaaccatctgtacaaaacatgacaattcagaattaagtggttatattctgctatgcaatcatcagatcatgaggaataagaatgagacaatctttactacgatgttcagacttatcatgatggaccccacttcagagaagttaatggctcttgagatttccaggcaaatttcatctgctcatatctggtttctgtgcatcaggagtgagactgaagttctagggcgtggcttgtctgtcgaggcccctctctactggaatgaatgaatgtaaagaatgggtgttaagaggtccctggagctgccttcaacataaggggtcctagagggtgcaagactcatcaagaaccagtttaccccatgcaaaaggactgctaaagccagagaaatggacaaagcccagttggaactgaatttgaatctcataaagctacaggtgcatctgagagcaggctcagtggtgaagatcaagatagcccggtaaagccctgcttgggctttttagcctcagccacatggatacctctcagttcctgccattaacaatattcatggaaaatacagcactgtgtctttcacatgctccactctggaaggtttatgctctgagctcaggatagttggggaacacatttttaaatcttggttttaaacaaaaagagaaatttattaaaatggagatataattgtgcatggtacatatatttctgaaaagttatgtataaatcaattatgttaaaagcgccagaagttactttttataagtgaactattacgaataatttcataaagcaaataaccacctctagcttatctgtcaggtatatcagaattctcatatatcatagtctcataagacttggttaaagcagatctatcttaggtaggaaaaaatagtaatcgattatacttagctgcttttatctgtagtgtgggtgactttttataactattatgttttataatgtcttcctgagagaatttcctaattttgtagttcatataagagaaatacaattttctagcattttctgaccttacaataaatcaattatgaatgcattttaacaaatattaaggtaggataaaccaacagaataaaaagttggtatttacttacattgaatatcatgcaaataaactcagaaaatgtcaccaaatactgtgggctatatttctcaatgatagggggaagaattcaaccttggagaaaatgaccagatcactttactgcttatatcttcagtattagaaaaactgcatgtatgattttaatagaaatgctttttataaagctaacattcagaaatgggataaaatgcaataacatctttcctttgtgcattaaattcccttctaattctaaaattgacatttgtatcttgcttaggatttaacattgttaattataatacttttaatgactagttttaatctcattattaagaagtagaaaacttactaaaaaggaaactaaaaataaatgttgttttgcagatta

SEQ ID NO: 2156 - DNA, 68 bp, Homo sapiens
aagatattagaaaaaccatttcataactttgtcaaagttaagttacaggttaaaccccgtatatctta

SEQ ID NO: 2157 - DNA, 4181 bp, Homo sapiens
agaaaaggaggaaggagaacattgctgtagcttggatctacaacctaagaaagcaagagtgatcaatctcagctctgttaaacatcttgtttacttactgcattcagcagcttgcaaatggttaactatatgcaaaaaagtcagcatagctgtgaagtatgccgtgaattttaattgagggaaaaagggacaattgcttcaggatgctctagtatgcactctgcttgaaatattttcaatgaaatgctcagtattctatctttgaccagaggttttaactttatgaagctatgggacttgacaaaaagtgatatttgagaagaaagtacgcagtggttggtgttttcttttttttaataaaggaattgaattactttgaacacctcttccagctgtgcattacagataacgtcaggaagagtctctgctttacagaatcggatttcatcacatgacaacatgaagctgtggattcatctcttttattcatctctccttgcctgtatatctttacactcccaaactccagtgctctcatccagaggctcttgtgattctctttgcaattgtgaggaaaaagatggcacaatgctaataaattgtgaagcaaaaggtatcaagatggtatctgaaataagtgtgccaccatcacgacctttccaactaagcttattaaataacggcttgacgatgcttcacacaaatgacttttctgggcttaccaatgctatttcaatacaccttggatttaacaatattgcagatattgagataggtgcatttaatggccttggcctcctgaaacaacttcatatcaatcacaattctttagaaattcttaaagaggatactttccatggactggaaaacctggaattcctgcaagcagataacaattttatcacagtgattgaaccaagtgcctttagcaagctcaacagactcaaagtgttaattttaaatgacaatgctattgagagtcttcctccaaacatcttccgatttgttcctttaacccatctagatcttcgtggaaatcaattacaaacattgccttatgttggttttctcgaacacattggccgaatattggatcttcagttggaggacaacaaatgggcctgcaattgtgacttattgcagttaaaaacttggttggagaacatgcctccacagtctataattggtgatgttgtctgcaacagccctccattttttaaaggaagtatactcagtagactaaagaaggaatctatttgccctactccaccagtgtatgaagaacatgaggatccttcaggatcattacatctggcagcaacatcttcaataaatgatagtcgcatgtcaactaagaccacgtccattctaaaactacccaccaaagcaccaggtttgataccttatattacaaagccatccactcaacttccaggaccttactgccctattccttgtaactgcaaagtcctatccccatcaggacttctaatacattgtcaggagcgcaacattgaaagcttatcagatctgagacctcctccgcaaaatcctagaaagctcattctagcgggaaatattattcacagtttaatgaagtctgatctagtggaatatttcactttggaaatgcttcacttgggaaacaatcgtattgaagttcttgaagaaggatcgtttatgaacctaacgagattacaaaaactctatctaaatggtaaccacctgaccaaattaagtaaaggcatgttccttggtctccataatcttgaatacttatatcttgaatacaatgccattaaggaaatactgccaggaacctttaatccaatgcctaaacttaaagtcctgtatttaaataacaacctcctccaagttttaccaccacatattttttcaggggttcctctaactaaggtaaatcttaaaacaaaccagtttacccatctacctgtaagtaatattttggatgatcttgatttgctaacccagattgaccttgaggataacccctgggactgctcctgtgacctggttggactgcagcaatggatacaaaagttaagcaagaacacagtgacagatgacatcctctgcacttcccccgggcatctcgacaaaaaggaattgaaagccctaaatagtgaaattctctgtccaggtttagtaaataacccatccatgccaacacagactagttaccttatggtcaccactcctgcaacaacaacaaatacggctgatactattttacgatctcttacggacgctgtgccactgtctgttctaatattgggacttctgattatgttcatcactattgttttctgtgctgcagggatagtggttcttgttcttcaccgcaggagaagatacaaaaagaaacaagtagatgagcaaatgagagacaacagtcctgtgcatcttcagtacagcatgtatggccataaaaccactcatcacactactgaaagaccctctgcctcactctatgaacagcacatggtgagccccatggttcatgtctatagaagtccatcctttggtccaaagcatctggaagaggaagaagagaggaatgagaaagaaggaagtgatgcaaaacatctccaaagaagtcttttggaacaggaaaatcattcaccactcacagggtcaaatatgaaatacaaaaccacgaaccaatcaacagaatttttatccttccaagatgccagctcattgtacagaaacattttagaaaaagaaagggaacttcagcaactgggaatcacagaatacctaaggaaaaacattgctcagctccagcctgatatggaggcacattatcctggagcccacgaagagctgaagttaatggaaacattaatgtactcacgtccaaggaaggtattagtggaacagacaaaaaatgagtattttgaacttaaagctaatttacatgctgaacctgactatttagaagtcctggagcagcaaacatagatggagagtttgagggctttcgcagaaatgctgtgattctgttttaagtccataccttgtaaataagtgccttacgtgagtgtgtcatcaatcagaacctaagcacagcagtaaactatggggaaaaaaaaagaagaagaaaaagaaactcagggatcactgggagaagccatggcattatcttcaggcaatttagtctgtcccaaataaaataaatccttgcatgtaaatcattcaaggattatagtaatatttcatatactgaaaagtgtctcataggagtcctcttgcacatctaaaaaggctgaacatttaagtatcccgaattttcttgaattgctttccctatagattaattacaattggatttcatcatttaaaaaccatacttgtatatgtagttataatatgtaaggaatacattgtttataaccagtatgtacttcaaaaatgtgtattgtcaaacatacctaactttcttgcaataaatgcaaaagaaactggaacttgacaattataaatagtaatagtgaagaaaaaatagaaaggttgcaattatataggccatgggtggctcaaaactttgaacatttgagcttaaacaaatgccactctcatgcattctaaattaaaaagttaaaatgattaatagttcaggtggaagaaataagcatactttttgggttttctacacattttgtgtagacaattttaatgtcagtgctgctgtgaactaaagtatgtcatttatgctcaaagtttaattcttcttcttgggatattttaaaaatgctactgagattctgctgtaaatatgactagagaatatattgggtttgctttatttcataggcttaattctttgtaaatctgaatgaccataatagaaatacatttcttgtggcaagtaattcacagttgtaaagtaaataggaaaaattattttatttttattgatgtacattgatagatgccataaatcagtagcaaaaggcacttctaaaggtaagtggtttaagttgcctcaagagagggacaatgtagctttattttacaagaaggcatagttagatttctatgaaatatttattctgtacagttttatatagttttggttcacaaaagtaattattcttgggtgcctttcaagaaaattaaaaatactactcactacaataaaactaaaatgaaaactc

SEQ ID NO: 2158 - DNA, 5690 bp, Homo sapiens
accgctggcggacaccccagtaacaagtgagagcgctccaccccgcagtcccccccgcctctcctccctgggtcccctcggctctcggaagaaaaaccaacagcatctccagctctcgcgcggaattgtctcttcaactttacccaaccgacgacaaggaaccagcctcaaccttttaatgcacagcccggccacaggattgccttccatctcctcttggtccctcctggatgtggtttattgatgacttgcgagcccctcagagagctgtcttccctcctctggctccctccgtttccttgagttagttttctaaggttttaccggggctcgggatctcttggaccgaatggaactttttgctgcctgcttttgctgctgattctgtcagtggacaaggaaaaaggcttcgaaggcagcagaggcgcaggggaggtggagaaagaggtggaggaagaggacgaggaggaggaggaagccgaaggggctcggcgcgtgtgtgtgcatgtgtgcatgcgtgtgtgagtgcatgtgtgtgagtgctgccgctgcccgcgacccctggccccgaaggtgttggctgaaatatggagaatagtcttagatgtgtttgggtacccaagctggcttttgtactcttcggagcttccttgttcagcgcgcatcttcaagtaaccggttttcaaattaaagctttcacagcactgcgcttcctctcagaaccttctgatgccgtcacaatgcggggaggaaatgtcctcctcgactgctccgcggagtccgaccgaggagttccagtgatcaagtggaagaaagatggcattcatctggccttgggaatggatgaaaggaagcagcaactttcaaatgggtctctgctgatacaaaacatacttcattccagacaccacaagccagatgagggactttaccaatgtgaggcatctttaggagattctggctcaattattagtcggacagcaaaagttgcagtagcaggaccactgaggttcctttcacagacagaatctgtcacagccttcatgggagacacagtgctactcaagtgtgaagtcattggggagcccatgccaacaatccactggcagaagaaccaacaagacctgactccaatcccaggtgactcccgagtggtggtcttgccctctggagcattgcagatcagccgactccaaccgggggacattggaatttaccgatgctcagctcgaaatccagccagctcaagaacaggaaatgaagcagaagtcagaattttatcagatccaggactgcatagacagctgtattttctgcaaagaccatccaatgtagtagccattgaaggaaaagatgctgtcctggaatgttgtgtttctggctatcctccaccaagttttacctggttacgaggcgaggaagtcatccaactcaggtctaaaaagtattctttattgggtggaagcaacttgcttatctccaatgtgacagatgatgacagtggaatgtatacctgtgttgtcacatataaaaatgagaatattagtgcctctgcagagctcacagtcttggttccgccatggtttttaaatcatccttccaacctgtatgcctatgaaagcatggatattgagtttgaatgtacagtctctggaaagcctgtgcccactgtgaattggatgaagaatggagatgtggtcattcctagtgattattttcagatagtgggaggaagcaacttacggatacttggggtggtgaagtcagatgaaggcttttatcaatgtgtggctgaaaatgaggctggaaatgcccagaccagtgcacagctcattgtccctaagcctgctatcccaagctccagtgtcctcccttcggctcccagagatgtggtccctgtcttggtttccagccgatttgtccgtctcagctggcgcccacctgcagaagcgaaagggaacattcaaactttcacggtctttttctccagagaaggtgacaacagggaacgagcattgaatacaacacagcctgggtcccttcagctcactgtgggaaacctgaagccagaagccatgtacacctttcgagttgtggcttacaatgaatggggaccgggagagagttctcaacccatcaaggtggccacacagcctgagttgcaagttccagggccagtagaaaacctgcaagctgtatctacctcacctacctcaattcttattacctgggaaccccctgcctatgcaaacggtccagtccaaggttacagattgttctgcactgaggtgtccacaggaaaagaacagaatatagaggttgatggactatcttataaactggaaggcctgaaaaaattcaccgaatatagtcttcgattcttagcttataatcgctatggtccgggcgtctctactgatgatataacagtggttacactttctgacgtgccaagtgccccgcctcagaacgtctccctggaagtggtcaattcaagaagtatcaaagttagctggctgcctcctccatcaggaacacaaaatggatttattaccggctataaaattcgacacagaaagacgacccgcaggggtgagatggaaacactggagccaaacaacctctggtacctattcacaggactggagaaaggaagtcagtacagtttccaggtgtcagccatgacagtcaatggtactggaccaccttccaactggtatactgcagagactccagagaatgatctagatgaatctcaagttcctgatcaaccaagctctcttcatgtgaggccccagactaactgcatcatcatgagttggactcctcccttgaacccaaacatcgtggtgcgaggttatattatcggttatggcgttgggagcccttacgctgagacagtgcgtgtggacagcaagcagcgatattattccattgagaggttagagtcaagttcccattatgtaatctccctaaaagcttttaacaatgccggagaaggagttcctctttatgaaagtgccaccaccaggtctataaccgatcccactgacccagttgattattatcctttgcttgatgatttccccacctcggtcccagatctctccacccccatgctcccaccagtaggtgtacaggctgtggctcttacccatgatgctgtgagggtcagctgggcagacaactctgtccctaagaaccaaaagacgtctgaggtgcgactttacaccgtccggtggagaaccagcttttctgcaagtgcaaaatacaagtcagaagacacaacatctctaagttacacagcaacaggcctcaaaccaaacacaatgtatgaattctcggtcatggtaacaaaaaacagaaggtccagtacttggagcatgactgcacatgccaccacgtatgaagcagcccccacctctgctcccaaggacttgacagtcattactagggaagggaagcctcgtgccgtcattgtgagttggcagcctcccttggaagccaatgggaaaattactgcttacatcttattttataccttggacaagaacatcccaattgatgactggattatggaaacaatcagtggtgataggcttactcatcaaatcatggatctcaaccttgatactatgtattactttcgaattcaagcacgaaattcaaaaggagtggggccactctctgatcctatcctcttcaggactctgaaagtggaacaccctgacaaaatggctaatgaccaaggtcgtcatggagatggaggttattggccagttgatactaatttgattgatagaagcaccctaaatgagccgccaattggacaaatgcaccccccgcatggcagtgtcactcctcagaagaacagcaacctgcttgtgatcattgtggtcaccgttggtgtcatcacagtgctggtagtggtcatcgtggctgtgatttgcacccgacgctcttcagcccagcagagaaagaaacgggccacccacagtgctggcaaaaggaagggcagccagaaggacctccgaccccctgatctttggatccatcatgaagaaatggagatgaaaaatattgaaaagccatctggcactgaccctgcaggaagggactctcccatccaaagttgccaagacctcacaccagtcagccacagccagtcagaaacccaactgggaagcaaaagcacctctcattcaggtcaagacactgaggaagcagggagctctatgtccactctggagaggtcgctggctgcacgccgagccccccgggccaagctcatgattcccatggatgcccagtccaacaatcctgctgtcgtgagcgccatcccggtgccaacgctagaaagtgcccagtacccaggaatcctcccgtctcccacctgtggatatccccacccgcagttcactctccggcctgtgccattcccaacactctcagtggaccgaggtttcggagcaggaagaagtcagtcagtgagtgaaggaccaactacccaacaaccacctatgctgcccccatctcagcctgagcattctagcagcgaggaggcaccaagcagaaccatccccacagcttgtgttcgaccaactcacccactccgcagctttgctaatcctttgctacctccaccaatgagtgcaatagaaccgaaagtcccttacacaccacttttgtctcagccagggcccactcttcctaagacccatgtgaaaacagcctcccttgggttggctggaaaagcaagatcccctttgcttcctgtgtctgtgccaacagcccctgaagtgtctgaggagagccacaaaccaacagaggattcagccaatgtgtatgaacaggatgatctgagtgaacaaatggcaagtttggaaggactcatgaagcagcttaatgccatcacaggctcagccttttaacatgtatttctgaatggatgaggtgaattttccgggaactttgcagcataccaattacccataaacagcacacctgtgtccaagaactctaaccagtgtacaggtcacccatcaggaccactcagttaaggaagatcctgaagcagttcagaaggaataagcattccttctttcacaggcatcaggaattgtcaaatgatgattatgagttccctaaacaaaagcaaagatgcattttcactgcaatgtcaaagtttaagctgctagaatagtcatgggcctttgtcactgcagtgaccacactgtcataactaatacctatgttttcctttgtcaaggcctgttgtttaatgtgtaggtctagtcttacaaaatgcaagtgcattatttaagcctgtaccatgccatggcaaaccagtgcaagctcactattttgttttcaacttaaacatacaaagcacccatgggaatctctcatgccatagcaccaaaggattggatgttttccttacagcacaaaaagtaaatagtaaacaaacaaaaggcagagaatgcttatgtttgtaactcagtcattcatcttgcacaagtggtggatattagtgagtggctaaaaattcacctattttggcaagtatttgtaaatccacccttggttaatatgtatgtctggagtccaggaatataaaaatctgcaactagtggcattctgccagcagcagtacatttctggaaagaggatataatatgcaatcttct

SEQ ID NO: 2159 - DNA, 9510 bp, Homo sapiens
atgcactcagccgggactcccgggttatcctcgcgccggacaggcaactccaccagctttcaaccaggaccgccaccgccgccccggctgctgctgctgctgctgcttctcctgtcactggtaagccgcgtcccggcacagcccgctgccttcggcagggcgttgctgtcccctggtctcgcgggggctgcaggggtccctgctgaggaggccatagtgctggcgaaccgcggactccgggtgcctttcggccgtgaagtctggctggatcccctgcatgacctggtgttgcaggtgcagcccggggaccgctgcgcggtttcggtactagacaacgacgcactggcccagcgaccgggccgcctgagtcccaagcgcttcccgtgcgactttggccctggcgaggtgcgctactctcacctgggcgcgcgcagcccgtctcgggaccgcgtccggctgcagctgcgctatgacgcgcccggaggggcagtagtgctaccactggtactggaggtggaggtggtcttcacccagctggaggttgtgactcggaacttgcctctggtcgtggaagagctgctggggaccagcaatgccctggacgcgcggagcctggagttcgccttccagcccgagacagaggagtgccgcgtgggcatcctgtccggcttgggcgcgctgcctcgctatggagaactcctccactacccgcaggtccctggaggagccagagagggaggcgccccggagactctcctgatggactgcaaagctttccaggaactaggcgtgcgctatcgccacacagccgccagtcgctcaccaaacagggactggatacccatggtggtggagctgcgttcacgaggggctcctgtgggcagccctgctttgaaacgcgagcacttccaggttctggtgaggatccgaggaggggccgagaacactgcacccaagcccagtttcgtggccatgatgatgatggaggtggaccagtttgtactgacggccctgaccccagacatgctggcagccgaggatgctgagtctccctctgacctgttgatcttcaaccttacttctccattccagcctggccagggctacttggtgagcaccgatgatcgcagcctgcccctttcctccttcactcagagggatctgcggctcctgaagattgcctaccagcccccttctgaagactctgaccaggagcgcctctttgaactggaattggaggtagtggatctagaaggagcagcttcagacccttttgccttcatggtagtggtgaagcccatgaacacaatggctccggtggtcacccggaataccggtcttattctctatgagggtcagtctcggcccctcacaggccctgcaggcagtggtccgcaaaacttggtcatcagcgatgaggatgacctagaagcagtgcggctagaggtggtggctgggctccggcatggtcaccttgtcattctgggtgcttccagtggcagctctgctcccaagagctttacagtggctgagctggcagccggccaggtggtctaccagcatgatgacagagacggctcgctgagcgacaacctggtgcttcgcatggtggatggaggaggcaggcaccaggtacagtttctgttccccatcaccttagtgcctgtggatgaccagccacctgttctcaatgccaacacggggctgacactggcagagggtgaaacagtgcccatcctgcccctttccctgagtgcaactgacatggattcagatgattctctgctgctttttgtgctggagtcacccttcttaactacggggcatctgcttctccgccaaactcaccctccccatgagaagcaggaacttctcagaggcctttggaggaaggagggggcattttatgagcgaacagtgacagagtggcagcagcaggacataacagagggcaggctgttctatagacactctgggccccatagtcctgggccagtcacagaccagttcacatttagagtccaggataaccatgaccctcctaatcagtccgggctacagcggtttgtgattcgtatccatcctgtggatcgcctccctccggagctgggcagtggctgtccccttcgtatggtggtacaggaatcccagctcacaccactgaggaagaagtggctgcgctacactgacctggacacagatgaccgagaactacgttacacagtgactcagtcccccacagacacagacgaaaatcacctgccagccccactgggtaccttggtcttgactgacaacccctcagtcgtggtgacccattttacccaagcccagatcaaccatcataaaattgcttacagacccccgggtcaagaactgggcgtggctactcgagtggcccagttccagttccaggtggaagaccgagctgggaatgtggctccaggtacctttaccctttacttgcatcccgtggacaaccagccacctgagatcctcaacaccggcttcactattcaggagaagggtcaccacatcctgagtgagacagagttgcacgtgaatgatgtagacactgatgttgcccatatctctttcactctcactcaggcacccaaacatggccacatgagagtgtctggacagatcctgcatgtagggggtctcttccacttggaggacataaaacagggccgagtttcctatgcccataatggggacaagtccctgactgatagctgctccttggaagtcagtgacagacatcatgtggtgcccatcactctcagagtaaatgtccggccagtggatgatgaagtgcccatactgagccatcctactggcactctggagtcctatctagatgtcttagaaaatggggctactgaaatcactgccaatgttattaaggggaccaatgaggaaactgatgacttgatgttgactttcctcttggaagatccacctttgtatggggaaatcttggtcaatggcattccagcagagcagtttactcaaagggacatcttggagggctctgttgtatatacccacaccagtggtgagataggcctattgcctaaagcggattcttttaacctgagtctgtcagatatgtctcaagaatggagaattggtggcaatactatccaaggagttactatatgggtgaccatcctgcctgttgatagccaggccccagaaatctttgtaggtgaacagttgatagtaatggaaggtgataaaagtgttataacatcagtgcatataagtgctgaagatgtcgactccctgaatgatgacatcttgtgcactatagttattcagcctacttcaggttatgttgaaaacatttctccagcaccaggctctgagaaatcaagagcagggattgccataagtgctttcaacttgaaagatctcaggcagggccacataaactatgtccagagtgtccataaaggggtggaacctgtggaggaccgatttgtatttcgttgttctgatggcattaacttttcagagagacagttcttccccattgtaatcattcccaccaatgatgaacagccagagatgtttatgagagaatttatggtgatggaaggcatgagtctggtaattgatacacccattctcaatgctgctgatgctgatgttcccctggatgatttaactttcactattacccaattccccactcatggtcacatcatgaatcagctgataaatggcacggttttggtcgaaagcttcaccttggatcagatcatagagagttccagcattatttatgagcatgatgactccgagacccaggaagacagttttgtgattaaactaacagatgggaagcactctgtggaaaagacggtcctcattatagttatccctgttgatgatgagacgcccagaatgactatcaataatggactagaaatagaaattggggataccaagattatcaacaacaaaatattaatggcaacagatttagattcagaagacaaatctttggtttatattattcgttatgggccaggacatggcttattacagagacgaaaacctactggtgcctttgaaaatatcacactgggcatgaattttacccaggatgaagtagacagaaacttaattcagtatgtccatttggggcaagagggcattcgggacctaattaaatttgatgtgactgatggaataaatcccctcatagatcgttacttttatgtgtccatcgggagcattgacattgtcttccctgatgtgataagtaagggagtgtccttgaaagaaggtggcaaagtcactcttacaacagacctactaagcactagtgacttgaacagtcctgatgaaaacttggtttttaccatcaccagggctcccatgcgaggtcacctggaatgcacggatcagcctggtgtgtccatcacgtctttcactcagctgcaactggctggaaacaaaatctactacatccacacagctgatgatgaagtgaaaatggacagttttgagtttcaagtcaccgatggacgtaaccctgtctttcggacattccgtatctccattagcgatgtggacaataaaaagccagtggtcaccatccacaagctggttgtcagtgaaagtgaaaacaagctgattactccttttgagctcactgtcgaagacagagatactcctgacaagctcctgaaattcactatcacccaggtgcctattcatggccatctcctattcaacaataccagacctgtcatggtttttaccaagcaagacttgaatgaaaacttaatcagctacaaacatgatggcactgagtcaagtgaagatagcttctccttcacagtgactgatggcacccatacagacttctatgtttttcctgatacggtgtttgaaacaaggagaccccaagtgatgaagatccaggtcttggctgttgacaacagtgtcccccaaatcgcagtgaataagggggcctctacacttcgcactctagccactggccacttggggttcatgatcacaagcaaaatattgaaagtggaggacagagacagcttacacatttctcttagatttatcgtgacagaggcccctcaacatggatatcttctcaacctggacaaaggcaaccacagcatcactcagttcacacaagctgacattgatgacatgaaaatatgctatgtcttaagagaaggggctaatgccacaagtgatatgttctattttgcagttgaagatggtggtggaaacaagttaacgtaccagaattttcgtctgaattgggcatggatctcctttgaaaaggaatattacctggtcaatgaggactccaaatttctagatgttgttcttaaacgtagaggttacttgggagaaacttcttttataagtattggcacaagagacagaactgcagaaaaagacaaagacttcaagggcaaagcacagaaacaagtgcagttcaacccaggccagaccagggccacatggcgagtgcggatcctgagtgatggggagcatgagcagtctgaaacctttcaggtggtactctcagagcccgtgctggctgccttggaattccccacagtcgccactgttgagatcgttgatccaggagatgagccaactgtgtttattccccagtccaaatactccgttgaagaagatgttggtgagctgttcattcccatcaggaggagcggagatgtgagccaggagttgatggtggtctgttatacccaacaaggaacagcaactggaactgtgccgacttccgtgttgtcttactctgattacatatccaggcctgaggaccacaccagtgttgtccgctttgacaaagatgaacgggagaaactgtgtcggatagtcataattgatgactctttgtacgaggaggaggaaaccttccatgtccttctgagcatgcccatggggggaagaatcggatcagagttcccaggggctcaagttacaatcgttcctgacaaagatgatgaacccatcttttacttcggtgatgtggaatactctgtggatgagagtgctggctatgtggaagtgcaggtgtggagaacgggcactgacctgtccaagtcttctagtgtcacagtgaggtctcggaaaacagatcctccctctgcagatgctggaacagactatgtgggcatcagccgtaatttagattttgcacctggagtcaacatgcagcctgttcgtgttgtcattctggatgaccttggacaaccagcgctggagggaattgagaaatttgaactggtgcttcgcatgcctatgaacgcagcccttggcgagcccagcaaagccacagtgtccataaatgactctgtctccgatttgcctaagatgcaattcaaagaacgaatatatactggcagcgaaagtgatgggcagatagttacaatgatccataggactggggatgtccagtacagatcttcagtgagatgctacacccggcaggggtctgcacaggtgatgatggactttgaagaacgcccaaacactgatacctccatcatcacattcctccctggtgagacagaaaagccctgcattcttgagctgatggacgatgtgctctatgaggaggtagaggagctccgcctggtactcggcactccacaaagcaactctccctttggggctgcagttggtgaacaaaatgaaactctcataaggatccgagatgatgctgataagactgttattaaatttggagaaaccaaatttagtgtcactgaacccaaagaacctggagagtcggtggttataagaattccagtgattcgccaaggagacacttcaaaggtttccattgtgagagtccacaccaaggatggctcggccacctctggagaagactaccaccctgtgtcagaagaaattgagtttaaggaaggggaaacccagcacgtggttgaaatcgaagttacctttgacggggtgagagagatgagagaggccttcactgttcacctaaaacctgatgaaaatatgatagcagagatgcagttgacgaaagccattgtgtacatagaagaaatgagcagcatggcagatgtcacttttccttctgtccctcaaattgtatccctgttgatgtatgacgacacttccaaagctaaggagagtgctgaacccatgtctggctatcctgtcatctgtatcacagcttgcaaccccaaatattcagactacgataaaacaggctctatctgtgcaagtgagaacatcaatgacactttgacgcggtaccggtggctgattagtgcacctgcgggccctgacggtgtgaccagccctatgagagaagtggacttcgacaccttttttacgtcatccaagatggtcacactggactccatatactttcagcctggctcccgggtacagtgcgcagctcgtgctgtgaacaccaatggggatgaaggcctggagctcatgagccctattgtaaccatcagcagagaagaaggtctttgtcagccccgtgtacctggggttgttggagcagagccgttctcagctaaattgcgctacacaggccctgaggatgcagactacacaaaccttatcaagctcactgtcacaatgccacacatagatggcatgctccccgtgatctccactagagagctttccaactttgagctcaccctcagccctgatggcacaagagttggaaaccacaagtgctccaacctcctggattatactgaagtgaagactcattatggtttcttgactgatgctaccaaaaatccagaaataattggagagacatatccttaccagtacagcttgtccatcagaggttccactaccttgcgcttctaccggaacctgaacctagaggcctgtttatgggagttcgttagctactatgacatgtcagaactccttgctgactgtggtggcaccattggaacagatggacaggtcctaaacctagtgcagtcctatgtgacccttcgagtccctctgtatgtttcctacgtgttccattcccccgtgggggtaggaggctggcagcattttgacttgaagtcagagcttcgtctaacttttgtgtacgacaccgccatcttgtggaatgatggaattggcagccccccagaggctgaacttcaaggttctctctatccaaccagcatgcgcatcggtgatgaggggcgcttggccgtgcacttcaagacagaggctcagttccatggcttatttgtgctgtcacatcccgcatcctttacaagctcagtgatcatgtcagctgatcatccaggcctgacattttccctccgcctcataaggagtgaaccaacctataaccagccagtacagcagtggagctttgtctctgactttgccgtacgtgactactcagggacctatactgtgaagctggtgccatgcactgccccatcacatcaggaataccgcctgccagtcacctgcaaccccagagaacctgtcacctttgaccttgacatccgattccaacaggtcagtgatccagtggctgctgagtttagcttgaacacccaaatgtacctgctctctaagaagagtctctggttgtctgatggatccatgggattcgggcaagagagtgatgttgcttttgcagaaggtgatataatttatggtcgtgtcatggtggatcctgtccagaatctgggtgactccttttactgcagcattgagaaggtgtttctatgcactggagctgatggctatgttcccaagtatagtccaatgaatgcagaatatggctgcttagccgactctccttcactcttatatagatttaaaattgtggacaaagctcagccagagacacaagcgaccagttttggaaatgtcctatttaatgccaaactagcagtggatgaccctgaagccattctcttagtgaatcagcctggatctgatggatttaaagtcgactcaacaccactctttcaggtcgctctaggccgagaatggtatatacatacgatctatacagtgagatcgaaagacaatgccaatcgaggtattggcaaaagaagtgtggagtaccattctctggtgagtcaaggaaagccccaatccaccaccaagagccggaagaagagagagatcaggagcacaccctcactggcatgggagattggtgctgaaaacagtcgaggaacaaacatccagcacattgccctggaccgcaccaagaggcagatcccccatgggagagcacctccagatggcatcctcccctgggagctcaacagccccagctctgcagtcagcctggtcactgtggtgggaggcaccacggtagggttactcaccatctgcctcactgtcattgcagtgctgatgtgcaggggcaaggaaagtttcagggggaaggatgccccgaaaggctccagcagcagtgagcccatggtgcccccacagagccatcacaatgacagctcagaagtttga

SEQ ID NO: 2160 - DNA, 6628 bp, Homo sapiens; identical to SEQ ID NO: 522

SEQ ID NO: 2161 - DNA, 736 bp, Homo sapiens
aaaagcaggtgaggacttcattaactgcagttactgagaactcataagacgaagctaaaatccctcttcggatccacagtcaaccgccctgaacacatcctgcaaaaagcccagagaaaggagcgccatggattactacagaaaatatgcagctatctttctggtcacattgtcggtgtttctgcatgttctccattccgctcctgatgtgcaggattgcccagaatgcacgctacaggaaaacccattcttctcccagccgggtgccccaatacttcagtgcatgggctgctgcttctctagagcatatcccactccactaaggtccaagaagacgatgttggtccaaaagaacgtcacctcagagtccacttgctgtgtagctaaatcatataacagggtcacagtaatggggggtttcaaagtggagaaccacacggcgtgccactgcagtacttgttattatcacaaatcttaaatgttttaccaagtgctgtcttgatgactgctgattttctggaatggaaaattaagttgtttagtgtttatggctttgtgagataaaactctccttttccttaccataccactttgacacgcttcaaggatatactgcagctttactgccttcctccttatcctacagtacaatcagcagtctagttcttttcatttggaatgaatacagcatttagcttgttccactgcaaataaagccttttaaatcatcattcaa

SEQ ID NO: 2162 - DNA, 3332 bp, Homo sapiens; identical to SEQ ID NO: 984

SEQ ID NO: 2163 - DNA, 6434 bp, Homo sapiens
gttggttctcctggatcttcaccttaccaactgcagatcttgggactcatcagcctcaataattatattaaattaacaccatttgaaagagaacattgttttcatcatgaatgctaataaagatgaaagacttaaagccagaagccaagattttcacctttttcctgctttgatgatgctaagcatgaccatgttgtttcttccagtcactggcactttgaagcaaaatattccaagactcaagctaacctacaaagacttgctgctttcaaatagctgtattccctttttgggttcatcagaaggactggattttcaaactcttctcttagatgaggaaagaggcaggctgctcttgggagccaaagaccacatctttctactcagtctggttgacttaaacaaaaattttaagaagatttattggcctgctgcaaaggaacgggtggaattatgtaaattagctgggaaagatgccaatacagaatgtgcaaatttcatcagagtacttcagccctataacaaaactcacatatatgtgtgtggaactggagcatttcatccaatatgtgggtatattgatcttggagtctacaaggaggatattatattcaaactagacacacataatttggagtctggcagactgaaatgtcctttcgatcctcagcagccttttgcttcagtaatgacagatgagtacctctactctggaacagcttctgatttccttggcaaagatactgcattcactcgatcccttgggcctactcatgaccaccactacatcagaactgacatttcagagcactactggctcaatggagcaaaatttattggaactttcttcataccagacacctacaatccagatgatgataaaatatatttcttctttcgtgaatcatctcaagaaggcagtacctccgataaaaccatcctttctcgagttggaagagtttgtaagccaaaaatgatgtaggaggacaacgcagcctgataaacaagtggacgacttttcttaaggccagactgatttgctcaattcctggaagtgatggggcagatacttactttgatgagcttcaacaaaactacagcaagacacagaaaggtgtgagctctggaactacacagttcatccattctccatgcagtctttcattttgaaaggagccaccttctatagaagatatttatttactccccacaagagatgaaagaaatcctgtagtatatggagtctttactacaaccagctccatcttcaaaggctctgctgtttgtgtgtatagcatggctgacatcagagcagtttttaatggtccatatgctcataaggaaagtgcagaccatcgttgggtgcagtatgatgggagaattccttatccacggcctggtacatgtccaagcaaaacctatgacccactgattaagtccacccgagattttccagatgatgtcatcagtttcataaagcggcactctgtgatgtataagtccgtatacccagttgcaggaggaccaacgttcaagagaatcaatgtggattacagactgacacagatagtggtggatcatgtcattgcagaagatggccagtacgatgtaatgtttcttggaacagacattggaactgtcctcaaagttgtcagcatttcaaaggaaaagtggaatatggaagaggtagtgctggaggagttgcagatattcaagcactcatcaatcatcttgaacatggaattgtctctgaagcagcaacaattgtacattggttcccgagatggattggttcagctctccttgcacagatgcgacacttatgggaaagcttgcgcagactgttgtcttgccagagacccctactgtgcctgggatggaaatgcatgctctcgatatgctcctacttctaaaaggagagctagacgccaagatgtaaaatatggcgacccaatcacccagtgctgggacatcgaagacagcattagtcatgaaactgctgatgaaaaggtgatttttggcattgaatttaactcaacctttctggaatgtatacctaaatcccaacaagcaactattaaatggtatatccagaggtcaggggatgagcatcgagaggagttgaagcccgatgaaagaatcatcaaaacggaatatgggctactgattcgaagtttgcagaagaaggattctgggatgtattactgcaaagcccaggagcacactttcatccacaccatagtgaagctgactttgaatgtcattgagaatgaacagatggaaaatacccagagggcagagcatgaggaggggaaggtcaaggatctattggctgagtcacggttgagatacaaagactacatccaaatccttagcagcccaaacttcagcctcgaccagtactgcgaacagatgtggcacagggagaagcggagacagagaaacaaggggggcccaaagtggaagcacatgcaggaaatgaagaagaaacgaaatcgaagacatcacagagacctggatgagctccctagagctgtagccacgtagttttctacttaatttaaagaaaagaattccttacctataaaaacattgccttctgttttgtatatcccttatagtaattcataaatgcttcccatggagttttgctaaggcacaagacaataatctgaataagacaatatgtgatgaatataagaaagggcaaaaaattcatttgaaccagttttccaagaacaaatcttgcacaagcaaagtataagaattatcctaaaaatagggggtttacagttgtaaatgttttatgttttgagttttggaatttattgtcatgtaaatagttgagctaagcaagccccgaatttgatagtgtataaggtgctttattccctcgaatgtccattaagcatggaatttaccatgcagttgtgctatgttcttatgaacagatatatcattcctattgagaaccagctaccttgtggtagggaataagaggtcagacacaaattaagacaactcccattatcaacaggaactttctcagtgagccattcactcctggagaatggtataggaatttggagaggtgcattatttctttctggccactggggttaaatttagtgtactacaacattgatttactgaagggcactaatgtttcccccaggatttctattgactagtcaggagtaacaggttcacagagagaagttggtgcttagttatgtgttttttagagtatatactaagctctacagggacagaatgcttaataaatactttaataagatatgggaaaatattttaataaaacaaggaaaacataatgatgtataatgcatcctgatgggaaggcatgcagatgggatttgttagaagacagaaggaaagacagccataaattctggctttggggaaaactcatatccccatgaaaaggaagaacaatcacaaataaagtgagagtaatgtaatggagctcttttcactagggtataagtagctgccaatttgtaattcatctgttaaaaaaaatctagattataacaaactgctagcaaaatctgaggaaacataaattcttctgaagaatcataggaagagtagacattttatttataaccaatgatatttcagtatatattttctctcttttaaaaaatatttatcatactctgtatattatttctttttactgcctttattctctcctgtatattggattttgtgattatatttgagtgaataggagaaaacaatatataacacacagagaattaagaaaatgacatttctggggagtggggatatatatttgttgaataacagaacgagtgtaaaattttaacaacggaaagggttaaattaactctttgacatcttcactcaaccttttctcattgctgagttaatctgttgtaattgtagtattgtttttgtaatttaacaataaataagcctgctacatgtaaaaagaaccaaactcacaatattaacataaacatctttcatattttgttagtactttcaaatgttttcaatttgactttccctctgaatatgcatggtgtgtttcctgtctgtttaagcagaactcacctttccttcttgtaacacagaacccttagccttcttctgttttgccttttcacgccctttatagtgtgaaatgaaaaattagtcacttcctcacatggaaggcagcttttcagaaaataacagacattgctcgtttctcatgcattctacatatcttgaaagaaaagtctgtgagaaaaccctgtgattagagggcaacttaatgcaagatctgtggctctatgttgagagcattctctctctgttatttttattttatttgcattgcttacctatctcaaagtagtcaaactgatatatgagattgagtactcccttttgatattatactgatgaatatttgtaggtgtttcactataaggaacagctaaggaataattttaataaaagtgaaccagaacaaatcactcatttaaaaagtaattcagaagaacagtgtggcatgatcagacttctaattgaatagcgtaacaacagtgtttgtaattatagatttgcttggacaaaatattccaggaactcatagcgagctcaaagcaattaagtgggaacatttttaatttaaaaaaaatttccaaatatttgtgggtccgacagtaatgatcaaaatatgaatgactttggaaaatttacatgaagctcaagtgttaggattgacttatgaaaataaattttatttctatccaaatttgaatgtccaaaccattttttagttacttctttctaatcctagttattcagacaaaatttggaaacttattttatgaccacatctaatattctggctgctttggatacaatactcttgatttatgataattagttaaaatatattaaaaatattattagtaaaataaaatttcacacaataaaaaacaacatagagtacacatatttatatgtatttttaaagataaagaatatctaaaatgtgtttttttcttagctttttagttgtctagaacatttagagaaagagtatgaatatattaaatccacaaacacactatatacttcctcaccactgactattttatcaaatttgccttaaaataatgaaaaagaaaagtatagttaatggtttcaaatatgctaagaaattgactctgcggaggggatcttaaaatgcctgtttactcatgttttcgtatttttcttgtctctaatacttttgtctttgtctgccttgtgtgttcttttctgaatttcatttcagcaatttatgctgctaaatagaatcccgcatgtctgcattcatttacattcaacttattgtaaattttgagattttatttagaaatgaattgtctaattaatttatgtagagtccttttttccaaagagctcaaaacactacatccacattattgacttttggaaaccaaccaaattacttaagaaatggaaaagtagtcacagagaaatttagtaatttgcaaaagccacaacagtagtggaagaattaaaattcataaagtctcatcattctgttggctaaaataatgctctttacaatatgctggctacaaaatggtcttactcttgaattttgcttttggttcatattttggttcttcatattctagtatgttttgttcctgctgaattttacagactcagctaaacaataagttattagtagtcacttgttttcattatcataattgaatttccaagaacaacttgatatcattcagctgtccaaaaaataataagagcattcattaaatactgattttcttaaacttaaatgttgtatttcatatttatttatataatacaaatggaaatcaaaactgaaatagcctccctttagaatgtcacatttttcttagaaaacattttggaattggttaaccttattgggaatggataatttagaaacaaaccaaaaaaaaaaaaagatatttgaagtgtttttataggagatgtatttttatcatagtaaatgatcacaattttaaataattcatcttacaagtcaggtaaaataaaatcgattcccagattccatacattaggagtgcaaagacaggatcatacacatgacttatacctctcatttaaatattttatagtataaagtatttatggaaagggtttgagatagatgatttttgggaaagggcaaaatgtgtcagatgccctagttaatcatgtaatttaattctggtattgtgagtggttagcaatcaattttgaatttataattctgctattttaaaagaaatgtagtcttgtagtatgaaataattaaaaattgttaaatgtatattttggttgtattataataaaatgcaaacatgactgttctatgattataaaaa

SEQ ID NO: 2164 - DNA, 2822 bp, Homo sapiens
gaggaaagcctgttagcagagcacggaccagtgtctccggagaatgctattctcctacatttccgaacaggttatcaacgcacagatcgatcactgcctctgtcccatcgctccctgaagtagctctgactccggttccttgaaaggggcgtgtacagaagtaaagatggagcctgcaggggagcgctttcccgaacaaaggcaagtcctgattctccttcttttactggaagtgactctggcaggctgggaaccccgtcgctattctgtgatggaggaaacagagagaggttcttttgtagccaacctggccaatgacctagggctgggagtgggggagctagccgagcggggagcccgggtagtttctgaggataacgaacaaggcttgcagcttgatctgcagaccgggcagttgatattaaatgagaagctggaccgggagaagctgtgtggccctactgagccctgtataatgcatttccaagtgttactgaaaaaacctttggaagtatttcgagctgaactactagtgacagacataaacgatcattctcctgagtttcctgaaagagaaatgaccctgaaaatcccagaaactagctcccttgggactgtgtttcctctgaaaaaagctcgggacttggacgtgggcagcaataatgttcaaaactacaatatttctcccaattctcatttccatgtttccactcgcacccgaggggatggcaggaaatacccagagctggtgctggacacagaactggatcgcgaggagcaggccgagctcagattaaccttgacagcggtggacggtggctctccaccccgatctggcaccgtccagatcctcatcttggtcttggacgccaatgacaatgccccggagtttgtgcaggcgctctacgaggtgcaggtcccagagaacagcccagtaggctccctagttgtcaaggtctctgctagggatttagacactgggacaaatggagagatatcatactccctttattacagctctcaggagatagacaaaccttttgagctaagcagcctttcaggagaaattcgactaattaaaaaactagattttgagacaatgtcttcgtatgatctagatatagaggcatctgatggcgggggactttctggaaaatgctctgtctctgttaaggtgctggatgttaacgataacttcccggaactaagtatttcatcacttaccagccctattcccgagaattctccagagacagaagtggccctgtttaggattagagaccgagactctggggaaaatggaaaaatgatttgctcaattcaggatgatgttccttttaagctaaaaccttctgttgagaatttctacaggctggtaacagaaggggcgctggacagagagaccagagccgagtacaacatcaccatcaccatcacagacttggggactccaaggctgaaaaccgagcagagcataaccgtgctggtgtcggacgtcaatgacaacgcccccgccttcacccaaacctcctacaccctgttcgtccgcgagaacaacagccccgccctgcacatcggcagtgtcagcgccacagacagagactcgggcaccaacgcccaggtcacctactcgctgctgccgccccgggacccgcacctgcccctcacctccctggtctccattaacacggacaacggccacctgttcgctctccagtcgctggactacgaggccctgcaggctttcgagttccgcgtgggcgccacagaccgcggcttcccggcgctgagcagcgaggcgctggtgcgagtgctggtgctggacgccaacgacaactcgcccttcgtgctgtacccgctgcagaacggctccgcgccctgcaccgagctggtgccccgggcggccgagccgggctacctggtgaccaaggtggtggcggtggacggcgactcgggccagaacgcctggctgtcgtaccagctgctcaaggccacggagcccgggctgttcggcgtgtgggcgcacaatggcgaggtgcgcaccgccaggctgctgagcgagcgcgacgtggccaagcacaggctagtggtgctggtcaaggacaatggcgagcctccgcgctcggccaccgccacgctgcaagtgctcctggtggacggcttctctcagccctacctgccgctcccagaggcggccccggcccaagcccaggccgactcgcttaccgtctacctggtggtggcattggcctcggtgtcttcgctcttcctcttctcggtgttcctgttcgtggcagtgcggctgtgcaggaggagcagggcggcctcagtgggtcgctgctcggtgcccgagggcccctttccagggcatctggtggacgtgagcggcaccgggaccctttcccagagctaccagtacgaggtgtgtctgacgggaggctctgaaagtaatgatttcaagttcttgaagcctatattcccaaatattgtaagccaggactctaggaggaaatcagaatttctagaataatgtaggtatctgtagctttccgaccgtctgttaattttgtcttcctcacttttcaccttagttttttttaaccctttagtaatcttgaattctacttttttttaaatttctactgttgtctttagtaatgttactcatttcctttgtctgattgttagttttcaaattattgtattattataaatattttatatcaggaaagttcatatttctgaataaattaatagtattcattcctgaagggtgatatgaaagttaaccccacctaataaacataactctaattctgaaa

SEQ ID NO: 2165 - DNA, 4884 bp, Homo sapiens; identical to SEQ ID NO: 184

SEQ ID NO: 2166 - DNA, 2112 bp, Homo sapiens
cgcttacacaccaaggaagttgggctttgagaattccatcccactggcactgaggagaatatttctccgtcttgcttacccatctcccagttttttggaattttctctagctgttactccagaggattatgtttctttcaaagccttctgtgtacatctgtcttttcacctgtgtcctccaactcagccacagctggtcggtgaacaatttcctgatgactggtccaaaggcttacctgatttactccagcagtgtggcagctggtgcccagagtggtattgaagaatgcaagtatcagtttgcctgggaccgctggaactgccctgagagagccctgcagctgtccagccatggtgggcttcgcagtgccaatcgggagacagcatttgtgcatgccatcagttctgctggagtcatgtacaccctgactagaaactgcagccttggagattttgataactgtggctgtgatgactcccgcaacgggcaactggggggacaaggctggctgtggggaggctgcagtgacaatgtgggcttcggagaggcgatttccaagcagtttgtcgatgccctggaaacaggacaggatgcacgggcagccatgaacctgcacaacaacgaggctggccgcaaggcggtgaagggcaccatgaaacgcacgtgcaagtgccacggcgtgtctggcagctgcaccacgcagacctgttggctgcagctgcccgagttccgcgaggtgggcgcgcacctgaaggagaagtaccacgcagcactcaaggtggacctgctgcagggtgctggcaacagcgcggccggccgcggcgccatcgccgacacctttcgctccatctctacccgggagctggtgcacctggaggactccccggactactgcctggagaacaaaacgctagggctgctgggcaccgaaggccgagagtgcctaaggcgcgggcgggccctgggtcgctgggaacgccgcagctgccgccggctctgcggggactgcgggctggcggtggaggagcgccgggccgagaccgtgtccagctgcaactgcaagttccactggtgctgcgcagtccgctgcgagcagtgccgccggagggtcaccaagtacttctgtagccgcgcagagcggccgcgggggggcgctgcgcacaaacccgggagaaaaccctaagggtttcctctgccccctccttttcccactggttcttggcttcctttagagaccccggtaattgtggaacctagggaatggggaacccgctctcccagacctagggatcctgagagggagagactgcaatttctccaaagcttgccactttccagcctgtttccccaattcctctgtgctctcctagagctctgtctgaatcctcgcagccacacctaggtctgagaactcaggctttgagttactgatcttccttggattaggagaacaggtgttcctcctcccctctcctagcagccctaatgtctgacctagcctatcaagccttaggcgctggaagaacccttctcagacacgcaggacccaggtaaagtcaaagctttgcccttttgcccactgtctgctaccagggctcacccactgctgcacctctcttctgcacagctcctcccctgctacctgctgagccagattccccaggaatcttgaatgctttctctcctcttctccctttcctttcccagaaaaactgaggaaactggccccggaaaagcatgtctttggggttggttcctagaggcagaggttgaagatggaagagggagctctggagtgctaacttgaacaccaagggtgctactcatccctatggtatcatatcatgaatggactttactagtggggcaatgactttcctagacaataacccgagggactccagatacataccccgaaggtctaggaaatacgttaagggcagattacagtcatttcctaccctttaaaggtaacttctcccttctcctgacctacttcctcctagcaaccaactttacctcttcttctccaaaggatctttgttcctctgagccaagactgaggtaaataaagccactttcctcttcagatcctggtctgcacctctaga

SEQ ID NO: 2167 - DNA, 2394 bp, Homo sapiens
cttccaatctgggtggacagaatatcttattacacagaaatcatggatggaaggcaaatttgattatttgttccatcttgtctctcataggaggaaaatatttcctaccggtccatagtgtcagagtggtgaacccctgcagccagcaggcctcctgaaaaaaaagtccatgggtgacagaagattcattgacttccaattccaagattcaaattcaagcctcagacccaggttgggcaatgctactgccaataatacttgcattgttgatgattccttcaagtataatctcaatggtgctgtctacagtgttgtattcatcttgggtctgataaccaacagtgtctctctgtttgtcttctgtttccgcatgaaaatgagaagtgagactgctatttttatcaccaatctagctgtctctgatttgctttttgtctgtacactaccttttaaaatattttacaacttcaaccgccactggccttttggtgacaccctctgcaagatctctggaactgcattccttaccaacatctatgggagcatgctctttctcacctgtattagtgtggatcgtttcctggccattgtctatccttttcgatctcgtactattaggactaggaggaattctgccattgtgtgtgctggtgtctggatcctagtcctcagtggcggtatttcagcctctttgttttccaccactaatgtcaacaatgcaaccaccacctgctttgaaggcttctccaaacgtgtctggaagacttatttatccaagatcacaatatttattgaagttgttgggtttatcattcctctaatattgaatgtctcttgctcttctgtggtgctgagaactcttcgcaagcctgctactctgtctcaaattgggaccaataagaaaaaagtactgaaaatgatcacagtacatatggcagtctttgtggtatgctttgtaccctacaactctgtcctcttcttgtatgccctggtgcgctcccaagctattactaattgctttttggaaagatttgcaaagatcatgtacccaatcaccttgtgccttgcaactctgaactgttgttttgaccctttcatctattacttcacccttgaatcctttcagaagtccttctacatcaatgcccacatcagaatggagtccctgtttaagactgaaacacctttgaccacaaagccttcccttccagctattcaagaggaagtgagtgatcaaacaacaaataatggtggtgaattaatgctagaatccaccttttaggtatgagaaatgtgttcaggtccagatatggtttctcctataatttttcctatgctataaactaaagatttgaagctaatgatactgagaataatgcaccaaatccagtcagatacatttgtttgaaggtatactgtagagtttttattgctgttttgttcagtaattataggtcaaatctaattacaacaaccaagatggattgccaaactcttctgcttggttggaatttcattgtatcgcattatccaggtggctagtggcatttgataatatagagatgactttgaaactttcaaaaaggtatttctattccaatgatatttggtaattaggttgggcctataaatatagaacaaattcagggatttttaaaaaattgtgttactactgatatatgctagttttattttatttttttgaactgtcattgagtttattttagcacaagaatatttttagcctaacattattaataagaaatgtgtcaaatttttaacattggtaaaatatgttatgtgcattttgaaaacagaaaacaaattgcgttggcatgtacgtgggtgggaagaaaaagaaaattaacaggatttacacaattataatcaccagcagtgtgagtttaaaaaacttcgttgtttttacaccaaattaaaattttcatgtcaaacttcaaagccagaaagctgctaaatacgtgtctggcaggtaaaagctggaaaattacttaaaacaggaaagtgtcaataaaaaaacttgagcaacaccaacatattttttcttaaaatgtcacgttatcttcattttgggaaactaggttctataaaatatttatcctccctgttatactttggagcacagcacagccagaaaggggctgcatttgtgcccaggtcaggagcaaattgaaaaaaaaaataaagtaatacaaaaaaatcaaactataaagcaaaaacatttattaaaacctgaattaatcctttttggagggaggagtagagatatataacctgaaaatacttattctttcttatcgaattttggagcctaatatagccaggagctgctgaatttgtgcccctggattggaagcaaataaaaaaaaaaaacaa

SEQ ID NO: 2168 - DNA, 3739 bp, Homo sapiens
gaaactattgttcctgtttcacacagaagaaaactgagaggttggcactcatcatgagcccctgttctcattctgcaaatggtgaagctctctattgtcctgaccccacagttcctgtcccatgaccagggccagctcaccaaggagctgcagcagcatgtaaagtcagtgacatgcccatgcgagtacctgaggaagcggatggctacatggatgtgatggagatggtttactatcgggaccttccgcaccctgctgatgttttgttgcttaggatatgaatggctgagcggaggctgtaaaacctggcactctgcttgggttatcaatactctggctgaccatcatcatcgtgggactgactttggtggaagtccttggttacatgtcattattgcgtttccgacaagttataaagttgtcattaccctctggatagtttacctttgggtgtctctcctgaagactatcttctggtctcgaaatggacatgatggatccacggatgtacagcagagagcctggaggtccaaccgccgtagacaggaagggctgaggtccatttgtatgcacacaaagaaaagagtttcttcctttcgaggaaataaaattggcctgaaagacgtcattactctacggagacatgtggaaacaaaagttagagctaaaatccgtaagaggaaggtgacaacgaaaatcaaccatcatgacaaaatcaatggaaagaggaagaccgccagaaaacagaaaatgtttcaacgtgcgcaagagttgcggcggcgagcagaggactaccacaaatgcaaaatccccccttctgcaagaaaggctctttgcaactgggtcagaatggcggcagcggagcatcgtcattcttcaggattgccctactggccctacctcacagctgaaactttaaaaaacaggatgggccaccagccacctcctccaactcaacaacattctataactgataactccctgagcctcaagacacctcccgagtgtctgctcactccccttccaccctcagcggatgataatctcaagacacctcccgagtgtgtgctcactccccttccaccctcagcggatgataatctcaagacacctcccgagtgtgtgctcactccccttccaccctcagcggatgataatctcaagacacctcctgagtgtctgctcactccccttccaccctcagcggatgataatctcaagacacctcccgagtgtctgctcactccccttccaccctcagctctaccctcagctccaccctcagcggatgataatctcaagacacgtgccgagtgtctgctccatccccttccaccctcagcggatgataatctcaagacaccttccgagcgtcagctcactccccttccaccctcagctccaccctcagcagatgataatatcaagacacctgccgagcgtctgcgggggccgcttccaccctcagcggatgataatctcaagacaccttccgagcgtcagctcactccccttccaccctcagctccaccctcagcagatgataatatcaagacacctgctgagcgtctgcgggggccgcttccaccctcagcggatgataatctcaagacaccttccgagcgtcagctcactccccttccaccctcagctccaccctcagcagatgataatatcaagacacctgccgagcgtctgcgggggccgcttccaccctcagcggatgataatctcaagacaccttccgagcgtcagctcactgcccttccaccctcagcagatgataatatcaagacacctgccgagcgtctgcgggggccgcttccaccctcagcggatgataatctcaagacaccttccgagcgtcagctcactccccttccaccctcagctccaccctcagcagatgataatatcaagacacctgccttccaccctcagcggatgatctcaagacaccttccgagcgtcagctcactccccttccaccctcagctccaccctcagcagatgataatatcaagatacctgctgagcgtctgcggattccgcttccaccatcagccgatgataatctcaagacaccttccgagcgtcagctcactccccttccaccctcagctccaccctcagcagatgataatatcaagacacctgccgagcgtctgcgggggccgcttccaccctgagcggatgataatctcaagacaccttccgagcgtcagctcactccccttccaccctcagctccaccctcagcagatgataatatcaagacacctgccgagcgtctgcgggggccgcttccaccctcagcagatgataatctcaagacaccttccgagcgtcagctcactccccttccaccctcagctccaccctcagcagatgataatatcaagacacctgccgagcgtctgcgggggccgcttccaccctcagcggatgataatctcaagacaccttccgagcgtcagctcactccccttccaccctcagctccaccctcagcagatgataatatcaagacacctgccgagcgtctgcgggggccgcttccaccctcagcagatgataatctcaagacaccttccgagcgtcagctcactccccttccaccctcagctccaccctcagcagatgataatatcaagacacctgccgagcgtctgcgggggccgcttccaccctcagcggatgataatctcaagacaccttccgagcgtcagctcactccctttccaccctcagctccaccctcagcagatgataatatcaagacacctgccgagcgtctgcggggagcgtctgcgggggccgcttccaccctcagcggatgataatctcaagacaccttccgagcgtcagctcactccccttccaccctcagctccaccctcagcagatgataatatcaagacacctgccgagcgtctgcgggggccgcttccaccctcagcggatgataatctcaagacaccttccgagcgtcagctcactccccttccaccctcagctccaccctcagcagatgataatatcaagacacctgccgagcgtctgcgggggccgcttccaccctcagcggatgataatctcaagacaccttccgagcgtcagctcactccccttccaccctcagctccaccctcagcagatgataatatcaagacacctgccgagcgtctgcgggggccgcttccaccctcagccgatgataatctcaagacacctcccttagctactcaggaggctgaggcagaaaaaccacgcaaacccaagaggcagagggcggctgagatggaaccacctcccgaacccaagaggcggagggtcggtgacgtggaaccgtcacgcaaacccaagaggcggagggccgctgacgtggaaccatcatcacccgaacccaagaggcggagggtcggtgatgtggaaccgtcacgcaaacccaagaggcggagggccgctgacgtggaaccatcatcacccgaacccaagaggcggagggtcggtgacgtggaaccgtcacgcaaacccaagaggcggagggccgctgacgtggaaccatcattacccgaacccaagaggcggaggttgagctgagaagaggccagtgcactcaagcctgagcaataagaataaaaccgagtagaacaaaataaaaaattcaaaaaacaaaacaaaacccacactccaaaaactaacaaagaataaataaataatataaaaataaaataaa

SEQ ID NO: 2169 - DNA, 3557 bp, Homo sapiens
agattgcgcgagggggagcgagcgagcgggcgctgccaggagcccgcagccctggcgcccgccgccgcccggagccccgcaatatgccgccgcggccctctggctctaggccatggcgaggctctgccggcgtgtcccctgcaccctgcttctcggcctggccgtggtgctgctgaaagcgcggctggtccccgcggccgccagagcggaactcagccgctccgacctcagcctcatccaacagcagcagcagcagcagcaacaacaacaacaacagcaaaagcagctggaggaggctgaggaggagaggacagaggtgcctggggcaacctccaccttgacggttccagtgtctgtatttatgttgaaagtccaggtgaatgacatcatcagtcgtcagtacctgagccaagcagttgtagaagtgtttgtaaactacacgaagacaaattccacagtaactaaaagcaatggagcagtgctgataaaagtaccctacaaattaggacttagtttaactattattgcttacaaagatggctacgtgttgacccctctgccttggaaaaccagaagaatgccaatatattcatcagttacactttcactgttcccgcaaagccaagcaaatatatggctatttgaagacactgttttaattactggaaaattagctgatgccaagtctcaaccaagtgttcagttttcaaaagccttaattaaacttcctgacaaccatcatattagcaacgttactggctatcttacagttctacaacagtttttgaaagtggacaattttctgcatacaactggaattactctcaataaaccaggttttgaaaacattgaattgactcctcttgctgcaatatgtgtgaaaatatattctggaggaaaagaactaaaggtcaatggctctattcaagtttctcttcctcttctacgtctgaatgatataagtgcaggggatcgcatacctgcttggacatttgatatgaacacaggtgcttgggtaaatcatggtcggggaatggtcaaggaacataacaatcatttaatctggacatatgatgcaccacatttggggtactggatagcagctccacttccaggaactagaggttcaggtataaatgaagattccaaggacataactgcctaccacacagtgtttcttacagccatattaggaggaacaatagtcattgtcattggattttttgctgtactactttgttattgcagggacaagtgtggtactccacagaaaagagaaagaaatatcactaaacttgaggtcctcaagagagaccagacaacttcaacaacacacataaatcatatcagtacagttaaagttgcattaaaagctgaggacaagtcgcagttattcaatgccaaaaactcctcatatagtcctcagaaaaaggaaccatcaaaggcagaaacagaagaaagagtttccatggtaaaaactcgggacgattttaaaatctacaatgaagatgtttcatttctatcagtcaatcaaaataattactcaagaaacccaacacagtctttggagcccaatgtagggtccaaacaacctaaacatattaacaacaatctatcttcatctctaggtgatgctcaagatgaaaagaggtatctcacaggtaatgaggaggcgtatgggcgttcccatattcctgaacagcttatgcatatttacagccaacccattgccatccttcaaacatctgaccttttctccacaccggaacaattacatactgctaagtcagctactttgccaagaaagggacagttagtctatggccaattgatggaaccagtaaatcgagagaactttacgcagaccttgcccaaaatgccaattcattctcatgcacagcccccagatgccagggaagaggatatcatacttgaaggtcaacagagcctgccatcccaggcttcagattggagccgatactcaagcagcttactggaatccgtctctgttcctggaacactaaatgaggctgttgtaatgactccattttcatcggaacttcaaggaatttcagaacagaccctcctggagctgtccaaaggaaagccctccccgcatcccagagcctggtttgtgtctcttgatggaaagccagttgcacaagtgaggcactcctttatagacctgaaaaagggcaagagaacccagagcaatgacaccagtctggactctggggtggacatgaatgagcttcactcaagtagaaagctcgagagggagaaaacattcatcaaaagcatgcatcagcccaagatcctttacttagaagatttagacctaagcagcagtgagagtggaaccaccgtctgttcccctgaggacccagctttaaggcacatcctagatggagggagtggagtgatcatggagcaccctggagaagagtcgccaggaaggaaaagcactgttgaagattttgaagctaatacatcccccactaaaagaaggggcagaccaccactagccaaaagagatagcaagactaacatctggaagaagcgagaggaacgcccactgattcccataaattaactccaatggggattgtgtgtctgctgtctcgtgctgtttattcttgcttcttgttgtaaattgcagtacgaacttaagaaaatgagactgagcaatctcatggttcttggacatgtctcaagcagagtaaatggtaattcagtaatcagagagaaagataccaaggaatgctttttctggcctattcatttatttttgggtgatgaatttacagtatctaagttttcaaaatgtaaaatagcttcaagatgttagttatctgaaaatgttgctcagccagccagtttggccttgactctcttaagaataacagtgaaatatatactcctcaagttgcctccaaaaatgttgcctctaccatggtgactaccccatggaacatttagaaacaaaactgacttcaggcatcatattattttaaatgttactattacgtcttcttctgcctatacttaaaaataacttgataaatgacttggactgatgttactctggagttatcacaaagaaaatgttgtttggtctttaaagagcatgtgtattgtatcatcccaaacgtaaatcctacatttatataagatgggcaagaagctacttggtcattagagagggagacaccagctctttggttgtttttggatataactttacaaaataagtaagatgttaatttagaaatttgagaaattaatgctctaatactgagtttttatttaaaaattattttttcttcccctcaacaatgaagcaagcttagctgtcaagggaaactttttacaaatctgaaaaaaacaatctatgactttggtttaaggctcactgatacttttaggctaaattggttttaatatatttcttctattctaaaaacctgaactcagtcacttaaaggctatgaaatttaaaaaaaaagtcgatgtgaaagtttcttttgaacactaaaataaaatatgtgcagataaaa

SEQ ID NO: 2170 - DNA, 1581 bp, Homo sapiens
tctgcttttaataagcttcccaatcagctctcgagtgcaaagcgctctccctccctcgcccagccttcgtcctcctggcccgctcctctcatccctcccattctccatttcccttccgttccctccctgtcagggcgtaattgagtcaaaggcaggatcaggttccccgccttccagtccaaaaatcccgccaagagagccccagagcagaggaaaatccaaagtggagagaggggaagaaagagaccagtgagtcatccgtccagaaggcggggagagcagcagcggcccaagcaggagctgcagcgagccgggtacctggactcagcggtagcaacctcgccccttgcaacaaaggcagactgagcgccagagaggacgtttccaactcaaaaatgcaggctcaacagtaccagcagcagcgtcgaaaatttgcagctgccttcttggcattcattttcatactggcagctgtggatactgctgaagcagggaagaaagagaaaccagaaaaaaaagtgaagaagtctgactgtggagaatggcagtggagtgtgtgtgtgcccaccagtggagactgtgggctgggcacacgggagggcactcggactggagctgagtgcaagcaaaccatgaagacccagagatgtaagatcccctgcaactggaagaagcaatttggcgcggagtgcaaataccagttccaggcctggggagaatgtgacctgaacacagccctgaagaccagaactggaagtctgaagcgagccctgcacaatgccgaatgccagaagactgtcaccatctccaagccctgtggcaaactgaccaagcccaaacctcaagcagaatctaagaagaagaaaaaggaaggcaagaaacaggagaagatgctggattaaaagatgtcacctgtggaacataaaaaggacatcagcaaacaggatcagttaactattgcatttatatgtaccgtaggctttgtattcaaaaattatctatagctaagtacacaataagcaaaaacaaaaagaaaagaaaatttttgtagtagcgttttttaaatgtatactatagtaccagtaggggcttataataaaggactgtaatcttatttaggaagttgacttatagtacatgataaatgatagacaattgaggtaagttttttgaaattatgtgacattttacattaaattttttttacattttttgggcagcaatttaaatgttatgactatgtaaactacttctcttgttaggtaatttttttcacctagatttttttcccaattgagaaaaatatatactaaacaaaatagcaataaaacataatcactctatttgaagaaaatatcttgttttctgccaatagattttttaaaatgtagtcagcaaaatgggggtggggaagcagagcatgtcctagttcaatgttgactttttttttttttaaagaaaagcattaagacataaaattctttcactttggcagaagcatttgttttcttgatgaaattatttttccatctgaggaaaaaaatactaggaaaataaatcaaggtgatgctgaaaaaaaaa

SEQ ID NO: 2171 - DNA, 6077 bp, Homo sapiens
acatcagaatggtagataattcctgttccactttctttgatgaaacaagtaaagaagaaacaacacaatcatattaatagaagagtcttcgttccagacgcagtccaggaatcatgctggagaagttctgcaactctactttttggaattcctcattcctggacagtccggaggcagacctgccactttgttttgagcaaactgttctggtgtggattcccttgggctacctatggctcctggccccctggcagcttctccacgtgtataaatccaggaccaagagatcctctaccaccaaactctatcttgctaagcaggtattcgttggttttcttcttattctagcagccatagagctggcccttgtactcacagaagactctggacaagccacagtccctgctgttcgatataccaatccaagcctctacctaggcacatggctcctggttttgctgatccaatacagcagacaatggtgtgtacagaaaaactcctggttcctgtccctattctggattctctcgatactctgtggcactttccaatttcagactctgatccggacactcttacagggtgacaattctaatctagcctactcctgcctgttcttcatctcctacggattccagatcctgatcctgatcttttcagcattttcagaaaataatgagtcatcaaataatccatcatccatagcttcattcctgagtagcattacctacagctggtatgacagcatcattctgaaaggctacaagcgtcctctgacactcgaggatgtctgggaagttgatgaagagatgaaaaccaagacattagtgagcaagtttgaaacgcacatgaagagagagctgcagaaagccaggcgggcactccagagacggcaggagaagagctcccagcagaactctggagccaggctgcctggcttgaacaagaatcagagtcaaagccaagatgcccttgtcctggtaactttcccttgagtgtctgtgtgagcgcgctgcatgtttcaggcaagggtacatcagcatcatggcgattctgtccttacatttttatagcacttcatacttctcagtgcacttcatattattaatggtattcacaatactgatactaccttagtgatggatacatggcgtgtaatgtactgttctctttcctttggggtacttttgaaattttccagaatgaaacgtggttttgaaaaaaataataccttagcatttctagattttgcaccttggtacaaattagcataagcaggcaatttgttgattcattcacttgaaaatatttattgagcacaactgtgtgtcagtgaccattctgggcactaaaagattgctcatcttttgtgagctagaaaatatgtagtaagcccatacataggttactctttgaaagtaataatagctattaagaaaataaaacaatagtgtatttggagtgaagtgcgacttgagacagggtaacaggggaagcttctcagaggagatgacatctgaacagacactcaaatgatgagatcaggccctctgagggacagtcagagggaagtgtgttccagtcagaaggagcaggcatgcgaggctgagaggggaacacatttggcttgctcagggaatggcaagaagatccaggacagggtgcgcatggggtgagatgggctcaaggaagtggacagggattaagctatgtggacccctgtgggccacaataaggaatctggagaagatgttgaaaagaaaaaaaagaagtctgggaccaaaaaagatgttccaaaatcctggttgatgaaggctctgttcaaaactttctacatggtgctcctgaaatcattcctactgaagctagtgaatgacatcttcacgtttgtgagtcctcagctgctgaaattgctgatctcctttgcaagtgaccgtgacacatatttgtggattggatatctctgtgcaatcctcttattcactgcggctctcattcagtctttctgccttcagtgttatttccaactgtgcttcaagctgggtgtaaaagtacggacagctatcatggcttctgtatataagaaggcattgaccctatccaacttggccaggaaggagtacaccgttggagaaacagtgaacctgatgtctgtggatgcccagaagctcatggatgtgaccaacttcatgcacatgctgtggtcaagtgttctacagattgtcttatctatcttcttcctatggagagagttgggaccctcagtcttagcaggtgttggggtgatggtgcttgtaatcccaattaatgcgatactgtccaccaagagtaagaccattcaggtcaaaaatatgaagaataaagacaaacgtttaaagatcatgaatgagattcttagtggaatcaagatcctgaaatattttgcctgggaaccttcattcagagaccaagtacaaaacctccggaagaaagagctcaagaacctgctggcctttagtcaactacagtgtgtagtaatattcgtcttccagttaactccagtcctggtatctgtggtcacattttctgtttatgtcctggtggatagcaacaatattttggatgcacaaaaggccttcacctccattaccctcttcaatatcctgcgctttcccctgagcatgcttcccatgatgatctcctccatgctccaggccagtgtttccacagagcggctagagaagtacttgggaggggatgacttggacacatctgccattcgacatgactgcaattttgacaaagccatgcagttttctgaggcctcctttacctgggaacatgattcggaagccacagtccgagatgtgaacctggacattatggcaggccaacttgtggctgtgataggccctgtcggctctgggaaatcctccttgatatcagccatgctgggagaaatggaaaatgtccacgggcacatcaccatcaagggcaccactgcctatgtcccacagcagtcctggattcagaatggcaccataaaggacaacatcctttttggaacagagtttaatgaaaagaggtaccagcaagtactggaggcctgtgctctcctcccagacttggaaatgctgcctggaggagatttggctgagattggagagaagggtataaatcttagtgggggtcagaagcagcggatcagcctggccagagctacctaccaaaatttagacatctatcttctagatgaccccctgtctgcagtggatgctcatgtaggaaaacatatttttaataaggtcttgggccccaatggcctgttgaaaggcaagactcgactcttggttacacatagcatgcactttcttcctcaagtggatgagattgtagttctggggaatggaacaattgtagagaaaggatcctacagtgctctcctggccaaaaaaggagagtttgctaagaatctgaagacatttctaagacatacaggccctgaagaggaagccacagtccatgatggcagtgaagaagaagacgatgactatgggctgatatccagtgtggaagagatccccgaagatgcagcctccataaccatgagaagagagaacagctttcgtcgaacacttagccgcagttctaggtccaatggcaggcatctgaagtccctgagaaactccttgaaaactcggaatgtgaatagcctgaaggaagacgaagaactagtgaaaggacaaaaactaattaagaaggaattcatagaaactggaaaggtgaagttctccatctacctggagtacctacaagcaataggattgttttcgatattcttcatcatccttgcgtttgtgatgaattctgtggcttttattggatccaacctctggctcagtgcttggaccagtgactctaaaatcttcaatagcaccgactatccagcatctcagagggacatgagagttggagtctacggagctctgggattagcccaaggtatatttgtgttcatagcacatttctggagtgcctttggtttcgtccatgcatcaaatatcttgcacaagcaactgctgaacaatatccttcgagcacctatgagattttttgacacaacacccacaggccggattgtgaacaggtttgccggcgatatttccacagtggatgacaccctgcctcagtccttgcgcagctggattacatgcttcctggggataatcagcacccttgtcatgatctgcatggccactcctgtcttcaccatcatcgtcattcctcttggcattatttatgtatctgttcagatgttttatgtgtctacctcccgccagctgaggcgtctggactctgtcaccaggtccccaatctactctcacttcagcgagaccgtatcaggtttgccagttatccgtgcctttgagcaccagcagcgatttctgaaacacaatgaggtgaggattgacaccaaccagaaatgtgtcttttcctggatcacctccaacaggtggcttgcaattcgcctggagctggttgggaacctgactgtcttcttttcagccttgatgatggttatttatagagataccctaagtggggacactgttggctttgttctgtccaatgcactcaatatcacacaaaccctgaactggctggtgaggatgacatcagaaatagagaccaacattgtggctgttgagcgaataactgagtacacaaaagtggaaaatgaggcaccctgggtgactgataagaggcctccgccagattggcccagcaaaggcaagatccagtttaacaactaccaagtgcggtaccgacctgagctggatctggtcctcagagggatcacttgtgacatcggtagcatggagaagattggtgtggtgggcaggacaggagctggaaagtcatccctcacaaactgcctcttcagaatcttagaggctgccggtggtcagattatcattgatggagtagatattgcttccattgggctccacgacctccgagagaagctgaccatcatcccccaggaccccatcctgttctctggaagcctgaggatgaatctcgaccctttcaacaactactcagatgaggagatttggaaggccttggagctggctcacctcaagtcttttgtggccagcctgcaacttgggttatcccacgaagtgacagaggctggtggcaacctgagcataggccagaggcagctgctgtgcctgggcagggctctgcttcggaaatccaagatcctggtcctggatgaggccactgctgcggtggatctagagacagacaacctcattcagacgaccatccaaaacgagttcgcccactgcacagtgatcaccatcgcccacaggctgcacaccatcatggacagtgacaaggtaatggtcctagacaacgggaagattatagagtgcggcagccctgaagaactgctacaaatccctggacccttttactttatggctaaggaagctggcattgagaatgtgaacagcacaaaattctagcagaaggccccatgggttagaaaaggactataagaataatttcttatttaattttattttttataaaatacagaatacatacaaaagtgtgtataaaatgtacgttttaaaaaaggataagtgaacacccatgaacctactacccaggttaagaaaataaatgtcaccaggtacttgagaaacccctcgattgtctacctcgatcgtacttccttgctacccacccctcccagggacaaccactgtcctgaatttcacgataattattcctttgcctttcatttctgttttatcacctttgtatgtatctttaaacaacatatacccttttttacttatgtaaatggactgactcatactgcatacatcttctatgacttgattcttttgttcaatattatatctgagattcatccatggtgatgcaaataggtgcattattttttttcactgctctgtagtctggcattgtatgaatacagcacaatgtatcagttttaatattggggatcattagcattattctcaggtttttaaaaattataagcagtactactatgg

SEQ ID NO: 2172 - DNA, 5821 bp, Homo sapiens
gctttgcccagtagttggaaagtgaactcgactcgtgatggttctcctgtcactttggttgatagcagccgctctggtagaggttaggacttcagctgatggacaagctggtaatgaagaaatggtgcaaatagatttaccaataaagagatatagagagtatgagctggtgactccagtcagcacaaatctagaaggacgctatctctcccatactctttctgcgagtcacaaaaagaggtcagcgagggacgtgtcttccaaccctgagcagttgttctttaacatcacggcatttggaaaagattttcatctgcgactaaagcccaacactcaactagtagctcctggggctgttgtggagtggcatgagacatctctggtgcctgggaatataaccgatcccattaacaaccatcaaccaggaagtgctacgtatagaatccggagaacagagcctttgcagactaactgtgcttatgttggtgacatcgtggacattccaggaacctctgttgccatcagcaactgtgatggtctggctggaatgataaaaagtgataatgaagagtatttcattgaacccttggaaagaggtaaacagatggaggaagaaaaaggaaggattcatgttgtctacaagagatcagctgtagaacaggctcccatagacatgtccaaagacttccactacagagagtcggacctggaaggccttgatgatctaggtactgtttatggcaacatccaccagcagctgaatgaaacaatgagacgccgcagacacgcgggagaaaacgattacaatatcgaggtactgctgggagtggatgactctgtggtccgtttccatggcaaagagcacgtccaaaactacctcctgaccctaatgaacattgtgaatgaaatttaccatgatgagtccctcggagtgcatataaatgtggtcctggtgcgcatgataatgctgggatatgcaaagtccatcagcctcatagaaaggggaaacccatccagaagcttggagaatgtgtgtcgctgggcgtcccaacagcaaagatctgatctcaaccactctgaacaccatgaccatgcaatttttttaaccaggcaagactttggacctgctggaatgcaaggatatgctccagtcaccggcatgtgtcatccagtgagaagttgtaccctgaatcatgaggatggtttttcatctgcttttgtagtagcccatgaaacgggccatgtgttgggaatggagcatgatggacaaggcaacaggtgtggtgatgagactgctatgggaagtgtcatggctcccttggtacaagcagcattccatcgttaccactggtcccgatgcagtggtcaagaactgaaaagatatatccattcctatgactgtctccttgatgacccttttgatcatgattggcctaaactcccagaacttcctggaatcaattattctatggatgagcaatgtcgttttgattttggtgttggctataaaatgtgcaccgcgttccgaacctttgacccatgtaaacagctgtggtgtagccatcctgataatccctacttttgtaagactaaaaagggacctccacttgatgggactgaatgtgctgctggaaaatggtgctataagggtcattgcatgtggaagaatgctaatcagcaaaaacaagatggcaattgggggtcatggactaaatttggctcctgttctcggacatgtggaactggtgttcgtttcagaacacgccagtgcaataatcccatgcccatcaatggtggtcaggattgtcctggtgttaattttgagtaccagctttgtaacacagaagaatgccaaaaacactttgaggacttcagagcacagcagtgtcagcagcgaaactcccactttgaataccagaataccaaacaccactggttgccatatgaacatcctgaccccaagaaaagatgccacctttactgtcagtccaaggagactggagatgttgcttacatgaaacaactggtgcatgatggaacgcactgttcttacaaagatccatatagcatatgtgtgcgaggagagtgtgtgaaagtgggctgtgataaagaaattggttctaataaggttgaggataagtgtggtgtctgtggaggagataattcccactgccgaaccgtgaaggggacatttaccagaactcccaggaagcttgggtaccttaagatgtttgatataccccctggggctagacatgtgttaatccaagaagacgaggcttctcctcatattcttgctattaagaaccaggctacaggccattatattttaaatggcaaaggggaggaagccaagtcgcggaccttcatagatcttggtgtggagtgggattataacattgaagatgacattgaaagtcttcacaccgatggacctttacatgatcctgttattgttttgattatacctcaagaaaatgatacccgctctagcctgacatataagtacatcatccatgaagactctgtacctacaatcaacagcaacaatgtcatccaggaagaattagatacttttgagtgggctttgaagagctggtctcagtgttccaaaccctgtggtggaggtttccagtacactaaatatggatgccgtaggaaaagtgataataaaatggtccatcgcagcttctgtgaggccaacaaaaagccgaaacctattagacgaatgtgcaatattcaagagtgtacacatccactctgggtagcagaagaatgggaacactgcaccaaaacctgtggaagttctggctatcagcttcgcactgtacgctgccttcagccactccttgatggcaccaaccgctctgtgcacagcaaatactgcatgggtgaccgtcccgagagccgccggccctgtaacagagtgccctgccctgcacagtggaaaacaggaccctggagtgagtgttcagtgacctgcggtgaaggaacggaggtgaggcaggtcctctgcagggctggggaccactgtgatggtgaaaagcctgagtcggtcagagcctgtcaactgcctccttgtaatgatgaaccatgtttgggagacaagtccatattctgtcaaatggaagtgttggcacgatactgctccataccaggttataacaagttatgttgtgagtcctgcagcaagcgcagtagcaccctgccaccaccataccttctagaagctgctgaaactcatgatgatgtcatctctaaccctagtgacctccctagatctctagtgatgcctacatctttggttccttatcattcagagacccctgcaaagaagatgtctttgagtagcatctcttcagtgggaggtccaaatgcatatgctgctttcaggccaaacagtaaacctgatggtgctaatttacgccagaggagtgctcagcaagcaggaagtaagactgtgagactggtcaccgtaccatcctccccacccaccaagagggtccacctcagttcagcttcacaaatggctgctgcttccttctttgcagccagtgattcaataggtgcttcttctcaggcaagaacctcaaagaaagatggaaagatcattgacaacagacgtccgacaagatcatccaccttagaaagatgagaaagtgaaccaaaaaggctagaaaccagaggaaaacctggacaacctctctcttcccatggtgcatatgcttgtttaaagtggaaatctctatagatcgtcagctcattttatctgtaattggaagaacagaaagtgctggctcactttctagttgctttcatcctccttttgttctgcattgactcatttaccagaattcattggaagaaatcaccaaagattattacaaaagaaaaatatgttgctaagattgtgttggtcgctctctgaagcagaaaagggactggaaccaattgtgcatatcagctgactttttgtttgttttagaaaagttacagtaaaaattaaaaagagataccaatggtttacactttaacaagaaattttggatatggaacaaagaattcttagacttgtattcctatttatctatattagaaatattgtatgagcaaatttgcagctgttgtgtaaatactgtatattgcaaaaatcagtattattttaagagatgtgttctcaaatgattgtttactatattacatttctggatgttctaggtgcctgtcgttgagtattgccttgtttgacattctataggttaattttcaaagcagagtattacaaaagagaagttagaattacagctactgacaatataaagggttttgttgaatcaacaatgtgatacgtaaattatagaaaaagaaaagaaacacaaaagctatagatatacagatatcagcttacctattgccttctatacttataatttaaaggattggtgtcttagtacacttgtggtcacagggatcaacgaatagtaaataatgaactcgtgcaagacaaaactgaaaccctctttccaggacctcagtaggcaccgttgaggtgtcctttgtttttgtgtgtgtgtgttcttttttaattttcgcattgttgacagatacaaacagttatactcaatgtactgtaataatcgcaaaggaaaaagttttgggataacttatttgtatgttggtagctgagaaaaatatcatcagtctagaattgatatttgagtatagtagagctttggggctttgaaggcaggttcaagaaagcatatgtcgatggttgagatatttattttccatatggttcatgttcaaatgttcacaaccacaatgcatctgactgcaataatgtgctaataatttatgtcagtagtcaccttgctcacagcaaagccagaaatgctctctccagggagtagatgtaaagtacttgtacatagaattcagaactgaagatatttattaaaagttgattttttttcttgatagtatttttatgtactaaatatttacactaatatcaattacatattttggtaaactagagagacataattagagatgcatgctttgttctgtgcatagagacctttaagcaaactactacagccaactcaaaagctaaaactgaacaaatttgatgttatgcaaacatcttgcatttttagtagttgatattaagttgatgacttgtttcccttcaaggaaacattaaattgtatggactcagctagctgttcaatgaaattgtgaattagaaacatttttaaaagtttttgaaagagataagtgcatcatgaattacatgtacatgagaggagatagtgatatcagcataatgattttgaggtcagtacctgagctgtctaaaaatatattatacaaactaaaatgtagatgaattaacctctcaaagcacagaatgtgcaagaacttttgcattttaatcgttgtaaactaacagcttaaactattgactctatacctctaaagaattgctgctactttgtgcaagaactttgaaggtcaaattaggcaaattccagatagtaaaacaatccctaagccttaagtcttttttttttcctaaaaattcccatagaataaaattctctctagtttacttgtgtgtgcatacatctcatccacaggggaagataaagatggtcacacaaacagtttccataaagatgtacatattcattatacttctgacctttgggctttcttttctactaagctaaaaattcctttttatcaaagtgtacactactgatgctgtttgttgtactgagagcacgtaccaataaaaatgttaacaaaatat

SEQ ID NO: 2173 - DNA, 483 bp, Homo sapiens
atgagacaagaggtagaggggagaggtagaggtagccacgagctgataattacagacaagagatgcggagtatgtgggggctcattatcctgcatagtctatctttgtatatctttgaacttttcaagaataaaaaagcttaaaaagtatacatggcctggtcctaccagagactcacccaatgccagcctccagccagggagagccaagtttgcattttcacacgcatctcacactcctctgcactctcaacttggagcgctccaaacagggaaaccccaagccttgctggcttctgccaaccccctgagcagaagcatgggtccccctgatcaccacctcaccaccctcatcctgatctcactggagactccctttcccggtctgctaagtagcgggtgtttttccttgacactaacgctaccgctagaccacggtgggcttggcaacaggtgtcttcccagatgctggcgttaccgctag

SEQ ID NO: 2174 - DNA, 2818 bp, Homo sapiens; identical to SEQ ID NO: 868

SEQ ID NO: 2175 - DNA, 6886 bp, Homo sapiens
gagagctgcctgctcagacaacagacacgcgaggtcaggaagaagccgcttataaattaccgcttccttcgcgccgccgccaacgccgagccccgaggaccgcaagcccagaggacaagctgcgccaagagggagtgctggagctgttcacccagcgggtcagagagcgagccgggcaggccagcccccggccggcggaaccctggcacagcctgagcagatgctgcgggcggcgccgcagccaccccagatccagaaccagaaccacagcccttctgaggagctcccaaacaaagcaaggagatggccaccaaggagaagctgcagtgtctgaaagatttccacaaggacatcctgaagccctcaccagggaagagcccaggcacgcggcctgaggacgaggctgagggaaaacctccgcagagggagaagtggtctagcaagatcgactttgtgctctctgtggctggcggcttcgtgggcttgggcaacgtctggcgcttcccgtacctctgctacaagaatggtggaggtgcgtttctcataccgtattttattttcctgtttgggagcggcctgcctgtgtttttcttggagatcatcataggccagtacacctctgaagggggcatcacctgctgggaaaagatctgccccttgttctctggtatcggctatgcctccgttgtaattgtgtccctcctgaatgtctactacatcgtcatcctggcctgggccacatactacctgttccagtccttccagaaggagctgccctgggcacactgcaaccacagctggaacacacctcactgcatggaggacaccatgcgcaagaacaagagtgtctggatcaccatcagctccaccaacttcacctcccctgtcatcgagttctgggagtaaggccacctcattgaagcaaggaggaggacatgggtggggcagagaggatggcccacttccttatctcctcccctgggatacaggagccactgtcttcgggggagtgggaggagggtgcagatctggagataaatttatgcctttggccatagacaggactggaatcccagttctgccacttactggctgtttgaccttaggcaagccactcctcctttctgagcctcagtttctttacctgtaagataaaaagaatgaatcattactaccctgtgaggcaggtatgcatacttatgttgtctaaaaatgatacagttttcttaatgtattttaggaaaaaatatattctgttattgcacagagaaaaagcgcaacgtgctgagcttgtcccctggaatcgaccacccaggctctctgaaatgggacctcgctctctgccttcttttagtctggctagtgtgtttcttctgcatctggaagggcgtcaggtccactgggaaggtcgtctacttcacagccacttttccattcgccatgctcctggtgctgctggtccgagggctgacgctgccgggcgcgggcgcaggcatcaagttctatctgtatcctgacatcacccgccttgaggacccacaggtgtggattgacgctgggactcagatattcttctcttatgccatctgcctgggggctatgacctcgctggggagctacaacaagtacaagtataactcgtacaggcaagtggactgtatgctgctgggatgcctgaacagtggtaccagttttgtgtctggcttcgcaattttttccatcctgggcttcatggcacaagagcaaggggtggacattgctgatgtggctgagtcaggtcctggcctggccttcattgcctacccaaaagctgtgacaatgatgccgctgcccacattttggtccattcttttttttattatgcttctcttgcttggactggatagccagtttgttgaagttgaaggacagatcacatccttggttgatctttacccatccttcctaaggaagggttatcgtcgggaaatcttcatcgccttcgtgtgtagcatcagctacctgctggggctgacgatggtgacggagggtggcatgtatgtgtttcagctctttgactactatgcagctagcggtgtatgccttttgtgggttgcattctttgaatgttttgttattgcctggatatatggaggtgataacctttatgatggtattgaggacatgattggctatcggcccgggccctggatgaagtacagctgggctgtgatcactccagttctctgtgttggatgtttcatcttctcgctcgtcaagtacgtacccctgacctacaacaaaacatacgtgtaccccaactgggccattgggctgggctggagcctggccctttcctccatgctctgcgttcccttggtcatcgtcatccgcctctgccagactgaggggccgttccttgtgagagtcaagtacctgctgaccccaagggaacccaaccgctgggctgtggagcgcgagggagccacaccttacaactctcgcaccgtcatgaacggcgctctcgtgaaaccgacccacatcattgtggagaccatgatgtgagctctctcgggtcgacggggccggcggctttcctgctgtttactaacattagattctcataggaccaggtttacagagctttatatttgcactaggatttttttttttttgtaattgtcacagaaaatgtaattgtgggtatgtgtgcgtgcgtgtgtgtgtgtgtgtgtatcgtgtgtgtgtgttttgttttgatttgggggatattttgtacaaaaagaaaacccacgggaagatgtccgtggagaggcagagctttcatactgaattagatgtattttatgggaatttggtaaatttttctttgtatttttttttttacatataagtatatatacacttagagattgtcatatacttttaccacttgaattgatcttcttgccagcaatagatctcattttcaaaagcaattcttcggtgctgtgtagctggcagaaagttctgtccagtaaacgcaggatggaattttcctgggactctacacccatcttaaggtggtataccttccaaatcctggttcagatggaagaaatagcaggagagaggacccattagctggcagacccagggggaagaaaggagggctgtgaggagatacctcattaaacttggcttagtgaagaagagagatgccaaaggaatgaaccaacccttcacataaaggagactggctgaagctgaatgaggaggccctatagcagaagtctgattctaagagcagtagaaacttgtaccagaagcaaaatcccacttttaattttgagatggtgagtggatagtcagtagaccgtcagaaccactggccagagagggagctgctagagatccaagaaggctggcaggagtgaggctcacaactcagcctcgcaagaggtggcagaggcacaggaggccacagtccttcctggggcattccaggcagagaaggagcagaggctctcccggcaggagctggggtctcagggctcagatgagtctgttgcatttgaatggggtcatagcaggttctggtcattccccaagcaacatctcagcatctcttaaagttgcctgcaggaatgaagcatgacatacctgttgagggactaggggagtggtggggaggtgagtggaccaaaggatataggccccaggcatgcagatgggcccggtgtcggggaggggtgctttctttcctcatctccccactccccactctcagcctgggagactcctgccaagccctcattaaagatgccaccctgggctgccctggcacctagcaaggcacaccaagaacagcttttgagtctgtatcctccactgggggaagtgctcccagttcagaacaagggcagcccgtggtgctgacctaggatataacaaagctcttcacttcaaaacccctgcaatagctgggtttacagacatttaccacctgcggacccaaaagagaaggcctaggagagttttctagaaggttgggattgtcagggtcctggcccctcagaactggcttgatcaagggccttatgtggagcagaggttgtctctgaaccaggagagaaggtactatacctttcaaatccccagggcagacacacccccacccagcccctatttggacctaaactgtgccatttgaacagtcacttccaagctcagtctaaatgaaaccgaaacgtgaccacgcacaaaggcagtcactgcctcgaggggtgcagaccgcagaattttcacagcaggggctcttggaaccctggaaacccccttcttaaatttgggaggaggagtatgcctttggtgtccccctcccaaggggcaattctgaaccccatctttggcaggcatacatatttcactgtttccaaagctatctactctgccaaacaacacccagtcctattccaaactctcaacgattctatcttgttcctgtttttctatgtatttatggttgccgtttgtgtctgatttgattttactgttttttccctgattttatggagtagcattgtgacctgttttcctttgtcttatataactttagtaaactaaccactgtcaatgattgagggcaggtggcacgtggggaagaggggacttggcacgcagtggctacctgggcatttgtggtcatttcagtttccatctccccagcgggggctccctgggtgaaaggccacagtattttgggttggtaggcaaattgcaacattctggacatggcctgaggaaggcctcttcttataagattctcagaccaaattctagaccaaagacacaggcagaccaagtccccaggccccgcctggaaggaagtcgttcctcaactctccccaaggcacctgtctccaatcagagccctctcgcccagccagccctggctctgtgtgcagagcatagctctgcgagtacctgtgtaataatgctcaaccttcatgtctccgtataaacgaaactttccatgagagctcatgactctggtccacctgtctatagagaatgggcaaagtccttcacctgctttctgcttgggatgggtcagaaatgctgatgcccgcacatagcccagccagccagatctggaaaggaagcgagggggttgtttaaatcaattttttaagatgaagaagtgggagacactgcgttgagatgggccatgctagggccacagagatttcctgacggtcagggagagaagggcctccagggtcccctaacccaacgcccttgttgtaaatgaggtaactgaggctcagggaggcactgtgagccaggaatggattttcttgaaacagctctagctgcaggttctccgaggtaggtgcagggaatggtgagtgtctaaccagggctacatccagcaacatcctcaaggtcttcctgacaaccaaagacaagcctttatggaaaaggaaatgcgctcccctccatgttcagggatgaggggagcagcagcagccacactcccaccatcctcacagaattcctggacccatgcggtggctccgtgagctgggtgactccagcctcacctgcacaccccagccctgcacggggccctccttcctcccagcagcccttggtgagctaggaattgagatccctgtttgtgaaagagggaactgaggtgcagagaagccagaggtgtgccagatccttaggcaggatttagatgaagtcgccctggctccagactgaccccgaggctctgcggggagtttccaggcagcaggaagtggccttggatgctctccttccaggacagcataacccctgggccatgtgcagctccttcactgccccctggatccccagcatacccccaaagacagtggggaaacacaaggggagagcacagcatggcccctccagcccacttcagggcactcttgtatcacccgggtaccgccacactggtcccccacccagccagcatctcccagcacagcccctctccctggggaaatgctctgggtagccagtctaaaggcagaggcacctaactgctccccgcagcccaccccacccaagattcagacacaagccaggaaaggacccaagagaaaatccttcaaggtggcctgaggtcccatccctccctcagacccatgtggtcccaggccaggctgcctgggacacggtaaataccactgtgtgcaaaaatcgaagtacaaaaccacaagactaaacaaaacaaacccagagagccaaacttgtagaggtgggcagtccagaaagcagggggcagccctccccctttccttctctccctgatcctcagaatatatattgttgtaataggaagcatttttgcattgttctcttgtgggtgtcactacagacatgttctggcgtgttctccgagggatggagcatcctgttatatatttgacttcaaattgagatgttggcttcattttttttttttacccaattaatctcccaatccctagcaactgtgactctgtatttagcacaagagaaagctgagaatgtgggtcttgcctccttccagaaatatgtctggctcatcaggacatttttttaaaacttcaaaatatttttaagatattttaaacttttataaaaaaaaaatcaaccaacaagagacttttctgaggaggaacatttgtatttgaacaagatccttggtgtgtagttcagtcttgcagtatacaagcttttgtgtataaatgttttatgatatgattccctgtattttgcaggggtttttttctcttttgctttttagataaatatgtatatcaatattttaaattcatctttgctttttttagaggagtttgtaatcaccttataacatgaaaataaacatttcctttttaacatccaa

SEQ ID NO: 2176 - DNA, 3200 bp, Homo sapiens
ccctggaagagcgtgacggaaagtgcaatggaggcgggaggagagcgatttcttagacaaaggcaagtcttgcttctctttgtttttctgggagggtctctggctgggtccgagtcaagacgctattctgtggctgaggaaaaagagaagggctttttaatagccaacctagcaaaggatctgggactaagggtagaggaactggccgcgaggggggcccaagttgtgtccaaagggaacaaacagcattttcagctcagtcatcagacaggtgatttgctcctgaatgagaaattggaccgggaggagctatgcggccccacagaaccatgcatactacattttcagatattactgcaaaaccctttgcaattcgttacaaacgagctccgtatcatagatgtaaatgaccattctccggtattctttgaaaatgaaatgcatctgaaaatcctagaaagcactctgccaggaacagtaattcctttgggaaatgctgaggacttggatgtgggaagaaacagcctccaaaactacactatcactccgaattcccacttccacgtactcactcgcagtcgtagggacggaaggaagtacccggaactagtactggataaagcgctcgatcgggaggagcagccggaactcagcttaacgctcaccgcgctggacggcggctctccccctcggtctgggacagcccagataaacatccaggtcttagatataaacgacaatgcaccagaatttgcacagccgctctatgaggttgcagttctagagaatacccccgttaactctgtcattgtcactgtctcggcttctgacttagatacaggaagttttgggacaatatcatatgcattttttcatgcttctgaagaaattcgcaaaacttttcagctaaatccaattactggtgatatgcaactggtcaaatatttgaattttgaagcgattaatagttatgaagtcgacatcgaggccaaggatggcggaggcctatccggaaagtctacagtcatagtccaggtggttgatgtcaacgacaacccaccggaactgaccttgtcttcagtaaacagccctattcctgagaactcgggagagactgtactggctgttttcagtgtttctgatctagactctggagacaacggaagagtgatgtgttccattgagaacaatctccccttcttcctgaaaccatctgtagagaatttttacaccctagtgtcagaaggcgcgctggacagagagaccagatccgagtacaacattaccatcactatcactgacctggggacacccaggctgaaaaccaagtacaacataaccgtgctggtctccgacgtcaatgacaacgcccccgccttcacccaaatctcctacaccctgttcgtccgcgagaacaacagccccgccctgcacatcggcagtgtcagcgccacagacagagactcaggcaccaacgcccaggtaacctactcgctgctgccgccccaggacccgcacctgcccctctcttccctggtctccatcaacgcggacaacggccacctgtttgccctcaggtcgctggactacgaggccctgcaggcgttcgagttccgcgtgggcgccacagaccgtggctccccggctttgagcagcgaggcgctggtgcgcgtgctggtgctggacgccaacgacaactcgcccttcgtgctgtacccgctgcagaacggctccgcgccctgcaccgagctggtgccccgggcggctgagccgggctacctggtgaccaaggtggtggcggtggacggcgactcgggccagaacgcctggctgtcgtaccagctgctcaaggccacggagcccgggctgttcggcgtgtgggcgcacaatggcgaagtgcgcaccgccaggctgctgagcgagcgcgacgcggccaagcacaggctggtggtgctggtcaaggacaatggcgagcctccgcgctcggccaccgccacgctgcatgtgctcctggtggacggcttctcccagccctacctgcctctcccggaggcggcaccggcccaggcccaggccgacttgctcaccgtctacctggtggtggcattggcctcggtgtcttcgctcttcctcttttcggtgctcctgttcgtggcggtgcggctgtgcaggaggagcagggcggcctcggtgggtcgctgctcggtgcccgagggcccctttccagggcagatggtggacgtgagcggcaccgggaccctgtcccagagctaccagtacgaggtgtgtctgactggaggctccgggacaaatgagttcaagttcctgaagccaattatccccaacttcgttgctcagggtgcagagagggttagcgaggcaaatcccagtttcaggaagagctttgaattcagttaagtgttaataaggatctactgagcctcgtcttagttaatctgtggaaagtccttttttactgctttgtccattggagaggtcttttttggtctggttcaaggcaagtagcaagaatagagcaaaatatcaaatccagggatggcttaggtttcattaacagtactggaaagtagttgtgtggctctgaatgttttgtatttcaatcgagaatccttagtcgatagaacattttgtttatatattgattctactttttctgtagttaatccttgcatattctcctttcatcctggcttgccaacgcagtcttaattccgccttttttttttctaatggggagcaaaaagaaattcactgtcttttaatagtgatttcaaatagcttattaaaataactccattcaaattttacattataaagcaatgtagagagagttccaaaccaccaattttataatttcccttgttgaatatattcatataatgtgttctataatatgcccaaagcagctttgtctatagttaacaaagttttaaggatagacaagaatgtgttttctttaataaatagtaatatatcatctttttagggatatagtactcaaatgaaagtaatttagttcattttctgtgttgacatttgcaattaatatttcaatattttatgtgcttatattggccaaaatatggacacaaatatagactaatatgggtaattaccctttggtttatctaaagtgtgttcatgatgactgaggaaaaaaattaaacctatgccattta

SEQ ID NO: 2177 - DNA, 3114 bp, Homo sapiens
gaacagatctggacccaagcctaataaaggtgacataaataaagtcagggctgccagaatggcttttgctgagtgcatagcaccagcgtgtgtcatgtcttggctgcgtttctggggcccatggcccctccttacgtggcaactattgtctttactagtcaaggaggctcagcctctggtgtgggtcaaggacccgctccagctgacctctaaccccctggggccacctgagccctggtcttcccgctcctcccatctcccatgggaatctccccatgcacctgctcccccagcagccccgggggactttgattacctggggccctctgcttcttcgcagatgtcagccctgcctcaggaaccaactgaaaatttggctccattcctgaaggaattggattcagctggagagctgcccctggggccagagccgttcttggctgcacatcaggacttaaatgacaagcggactccagaagaaaggctcccagaggtggttccgcttctcaaccgggatcagaaccaggccctagttcagcttcctcgcctcaagtgggttcaaactacagatctagatcgggctgcaggtcatcaggcagatgaaatacttgttccactagacagtaaggtttcaagaccaaccaaatttgttgtttcgcccaagaacctgaagaaagatctagctgaacgttggagccttcctgagattgttgggattccacaccaattatccaaacctcagcgtcagaaacagactttgccagatgattatttgagtatggacacactgtatcccggcagcctacctccagaactccgggtgaacgcagatgagcctccagggcctcctgagcaagttggactttctcaattccatctagagcccaaaagtcaaaatccagagacccttgaagacatccagtcctcttcactccaggaagaagccccagcgcagcttctacagctccctcaggaggtagaaccttcaacccagcaggaggccccagctctgcctccagagtcctctatggagagtctagctcaaactccactgaatcatgaagtgacagttcaacctccaggtgaggatcaagctcattataatttgcccaagtttacagtcaaacctgcagatgtggaggttaccatgacttcagagcctaaaaatgagacagaatctacccaagcccagcaggaggccccaattcagcctcccgaggaggcggaaccttcttctacagccctgaggactacagatcctcctccagaacaccctgaggtgacacttccaccttcagacaagggtcaggctcagcattcacacctgactgaagccacagttcaacctctggacctggagcttagcataactacagagcctactacagaggttaaaccgtctccaaccacggaggaaacctcagctcagcctccagacccggggcttgccataactccagaacccactacagagattggacattccacagccctggagaagactagagctcctcatccagaccaggttcagactctgcatcgaagcctgactgaagtcacaggtccacctacaaagttagaatcttcgcaggattcattggtgcagtctgaaactgcaccagaggaacagaaggcctccacaagcaccaacatatgtgagctctgcacctgcggagatgagactctgtcatgtgttggtctcagcccaaagcagaggctccgccaagtgcctgtgccagagcccgacacctacaatggcatcttcaccaccttaaatttccaaggaaactatatttcataccttgatggaaatgtatggaaagcatacagttggaccgagaaactaattctcagtgaaaattatttgactgaattacctaaggattcatttgaaggcctgctatacctccagtatttagatttatcctgcaataaaatacgatatattgaaagacaaacatttgaatcactaccatttttgcagtatataaatctgggctgcaatttaattacaaaactgagccttggaacatttcaggcctggcacggaatgcagtttttacacaacttaattctcaatcgcaatcctctgactactgtcgaagatccatatctctttgaactgccggcattaaaatatctagacatgggaacaacacacatcacacttacaacacttaagaacattctcacgatgactgttgaactggaaaaactgatcttacctagccatatggcctgctgcctctgccaatttaaaaatagcattgaggctgtctgcaagacagtcaagctgcattgcaacactgcatgtctgactaacagcatacattgtcctgaagaagcatctgtagggaatccagaaggagcgttcatgaagatgttacaagcccggaagcagcacatgagcactcagctgactattgagtcggaggcgccctcagacagcagtggcatcaacttgtcaggctttgggggtgatcagcttgaaattcagctaaccgagcagctacggtccctcatccccaacgaggatgtgagaaagttcatgtctcatgttatccggaccttgaaaatggaatgttcagaaacacatgtgcaagggagctgtgccaagctcatgttgcgaacaggcctcctgatgaagcttctcagcgagcagcaggaagcaaaggcattgaatgtagaatgggatacggaccaacaaaaaacaaattatattaatgagaacatggaacagaatgaacagaaagagcagaagtcaagtgagctcatgaaagaagttccaggagatgactataagaacaaactcatcttcgcaatatctgtgactgtaatactaataattttgattataattttttgtcttatagaggtgaattcacataaaagggcatcagaaaaatacaaagacaacccatcaatatcaggagcctgagcatgagttaaagcatgtggatggcctggagctatgtttttaaaattgttattaaatattggttttttacttaaatcaatgaaaactttctttactttgtggttgtgttcctcaaaatgagaatttttaacaataataaaaataaagcttgttagatcatttttaatggtaataaa

SEQ ID NO: 2178 - DNA, 2754 bp, Homo sapiens
gggtgattggcttggctggacctgaatgatgcggctgtgattgctgaattgtctgggcaggtttggagtctctggcaagctcccctgactgtgcatccctctggagacgaagaggagggggaggcctgtcctctctgggatccattggtcacatccccctgaggattcccgaatgcctacctccagtgtcgtcaacatggagttctgaagtccatgtggctcttcacagtgaatcaggtgttaaggaagatgcagagacgccacagcagcaacacggataacattccacctgaaagctgtgaccaaggctggcccctctggggaactgggggccattgaacttgaagactgcagagccagcggtccttgggatcccgagaaaccgcagccaggcgctcagctccgaggcgagtgtggatgaaggtggcgtctttgagagtctgaaggcagaggcagcctccccaccagcgctcttctcgggcttatcaggcagcctccccaccagctcgttcccctccagcctggtgctgggctcctcggctggcggcggggacgtgttcatccagatgcccgcgtccagggaggaaggagggggccggggcgaggggggcgcctaccaccaccgccagccccaccaccatttccaccatggcggccaccgcgggggctccctgctgcagcacgtgggtggggaccaccgggggcactcggaggagggaggcgacgagcagcctgggacgcccgcccccgccctgtccgagctgaaggctgtgatctgctggctccagaaaggactccccttcatcctgatcctcctggccaaactgtgctttcagcataagctcggcattgctgtgtgcatcgggatggccagcaccttcgcctatgccaactccacgcttcgagaacaggtctcactgaaggagaagaggtcagtgctggtcatcttgtggatcctggcctttctggcggggaacaccctctatgtgctttatacattcagctcccagcagctgtacaacagcctcatattcctgaagcccaacctggagatgctggacttctttgacctgctatggattgtggggatcgcagactttgttctgaagtacatcaccatcgccctcaagtgcctcatcgtggccctgcccaagatcatcctggctgtcaagtccaagggaaagttctatctggtcatcgaggagctgagccagctgttccgatcccttgtccccatccagctgtggtacaaatacatcatgggtgacgactcctccaacagctacttcctgggcggggtcctgatcgttctctacagcctctgcaagtccttcgacatctgtggacgtgtgggcggagttaggaaagccctgaagcttctctgtacctctcagaactatggagtccgagccaccgggcagcagtgcacagaagctggtgacatctgcgccatctgtcaggccgagttccgagagcctctgattctcctgtgccagaccgagattgcaccacagcactccaacctgggtgacagagtgagtgagactctgtctaaaaaaaaaaagaaagaaagaagggagggagggaggaaggaaggaaggaaggaaagaaagaaaggtcagctttggcccagatgtggttaccccttggtctcctgtctttatgtctttctcctcttcctattctgtcatctccctcacttaagtctcaggcctgtcagcagctcctgtggacattgccatcccctctggtagccttcagagcaaacaggacaacctatgttatggatgtttccaccaaccagggtagtggcatggagcaccgtaaccatctgtgcttctgtgatctctatgacagagccacttctccacctctgaaatgttccctgctctgaaatctggcatgagatggcacaggtgaccacgcagaagccaccagaatcttgcctgccctattcctcctcccaagtctgttctcttattgtcaacctcagcacaacaggctggcgccaatggcattacagagaaagcaatctgtgtggctagtgggcagattaccatgcaagccccaggagaaatggaggagctttgtagccacctcgctgtcagccagtattaacatgtccccttccccctgccccgccgtagattcaggacatttgcccctgtgtgccaccaaaccaggactttccccttggcttggcatccctggctctctcctggtacccagcaagacgtctgttccagggcagtgtagcatctttcaagctccgttactatggcgatggccatgatgttacaatcccacttgcctgaataatcaagtgggaaggggaagcagagggaaatggggccatgtgaatgcagctgctctgttctccctaccctgaggaaaaaccaaagggaagcaacaggaacttctgcaactggtttttatcggaaagatcatcctgcctgcagatgctgttgaaggggcacaagaaattggagctggagaagattgatgaaagtgcaggtgtgtaaggaaatagaacagtctgctgggagtcagacctggaattctgattccaaactctttattactttgggaagtcactcagcctccctgtagccatctccagggtgacggaacccagtgtattacctgctggaaccaaggaaactaacaatgtaggttactagtgaataccccaatggtttctccaattatgcccatgccaccaaaacaataaaacaaaattctctaacactgcaa

SEQ ID NO: 2179 - DNA, 3824 bp, Homo sapiens; identical to SEQ ID NO: 196

SEQ ID NO: 2180 - DNA, 4524 bp, Homo sapiens
gtcgcgaacatctcctcggagcgcagctgggccagcggttcccacagccctggagcccaacgtgcgcagaagcgcctcttggagctcctctcccacagatctctcgtcctcttcctgggctaggccgccccaggcgcggcccctgcgactcctggcacggccccgtgctcggctgccgccctggcgcgcgccacactgtcgtccccggacgggcgcggaccggctcggccggggcgccggcggctggggaggggtcgctggccccggggccgcgcatgcgccgccaccaacttggggctgtcagtggagggcgagtgctggttctcaggggaggcgacgcccttcggggccaacgggcctcgagccgaggcagcagtgggaacgactcatcctttttccagccctggggcgtggctggggtcggggtcggggtcggggccggtgggggccccgcccccgtctcctggcctgcccccttcatgggccgcgatgatggcggccctgtacccgagcacggacctctcgggcgcctcctcctcctccctgccttcctctccatcctcttcctcgccgaacgaggtgatggcgctgaaggatgtgcgggaggtgaaggaggagaatacgctgaatgagaagcttttcttgctggcgtgcgacaagggtgactattatatggttaaaaagattttggaggaaaacagttcaggtgacttgaacataaattgcgtagatgtgcttgggagaaatgctgttaccataactattgaaaacgaaaacttggatatactgcagcttcttttggactacggttgtcagtctgcagatgcacttttggtggcaatcgactctgaagtagtgggagctgttgatatactacttaatcatcgaccaaaacgatcatcaagaccaactatagtaaaactaatggaacgaattcagaatcctgagtattcaacaactatggatgttgcacctgtcattttagctgctcatcgtaacaactatgaaattcttacaatgctcttaaaacaggatgtatctctacccaagccccatgcagttggctgtgaatgcacattgtgttctgcaaaaaacaaaaaggatagcctccggcattccaggtttcgtcttgatatatatcgatgtttggccagtccagctctaataatgttaacagaggaggatccaattctgagagcatttgaacttagtgctgatttaaaagaactaagtcttgtggaggtggaattcaggaatgattatgaggaactagcccggcaatgtaaaatgtttgctaaggatttacttgcacaagcccggaattctcgtgaattggaagttattctaaaccatacgtctagtgacgagcctcttgacaaacggggattattagaagaaagaatgaatttaagtcgtctaaaacttgctatcaaatataaccagaaagagtttgtctcccagtctaactgccagcagttcctgaacactgtttggtttggacagatgtcgggttaccgacgcaagcccacctgtaagaagataatgactgttttgacagtaggcatcttttggccagttttgtcactttgttatttgatagctcccaaatctcagtttggcagaatcattcacacaccttttatgaaatttatcattcatggagcatcatatttcacatttctgctgttgcttaatctatactctcttgtctacaatgaggataagaaaaacacaatggggccagcccttgaaagaatagactatcttcttattctgtggattattgggatgatttggtcagacattaaaagactctggtatgaagggttggaagactttttagaagaatctcgtaatcaactcagttttgtcatgaattctctttatttggcaacctttgccctcaaagtggttgctcacaacaagtttcatgattttgctgatcggaaggattgggatgcattccatcctacactggtggcagaagggctttttgcatttgcaaatgttctaagttatcttcgtctcttttttatgtatacaaccagctctatcttgggtccattacagatttcaatgggacagatgttacaagattttggaaaatttcttgggatgtttcttcttgttttgttttctttcacaattggactgacacaactgtatgataaaggatatacttcaaaggagcagaaggactgtgtaggcatcttctgtgaacagcaaagcaatgataccttccattcgttcattggcacctgctttgctttgttctggtatattttctccttagcgcatgtggcaatctttgtcacaagatttagctatggagaagaactgcagtcctttgtgggagctgtcattgttggtacatacaatgtcgtggttgtgattgtgcttaccaaactgctggtggcaatgcttcataaaagctttcagttgatagcaaatcatgaagacaaagaatggaagtttgctcgagcaaaattatggcttagctactttgatgacaaatgtacgttacctccacctttcaacatcattccctcaccaaagactatctgctatatgattagtagcctcagtaagtggatttgctctcatacatcaaaaggcaaggtcaaacggcaaaacagtttaaaggaatggaggaatttgaaacagaagagagatgaaaactatcaaaaagtgatgtgctgcctagtgcatcgttacttgacttccatgagacagaagatgcaaagtacagatcaggcaactgtggaaaatctaaacgaactgcgccaagatctgtcaaaattccgaaatgaaataagggatttacttggctttcggacttctaaatatgctatgttttatccaagaaattaaccattttctaaatcatggagcgaataattttcaataacagatccaaaagactatattgcataacttgcaatgaaattaatgagatatatattgaaataaagaattatgtaaaagccattctttaaaatatttatagcataaatatatgttatgtaaagtgtgtatatagaattagttttttaaaccttctgttagtggctttttgcagaagcaaaacagattaagtagatagattttgttagcatgctgcttggttttcttacttagtgctttaaaatgtttttttttatgtttaagaggggcagttataaatggacacattgcccagaatgttttgtaaaatgaagaccagcaaatgtaggctgatctccttcacaggatacacttgaaatatagaagttatgttttaaatatctctgttttaggagttcacatatagttcagcatttattgtttaggagtataattttattttatctaaaataatagtctattttttcttttgtattttgttataatcttaagcaacaaagaaaaaaccctaatatttgaatctatttatgtctttcaatttaaattcacttcagtttttgttattgtaatatatttacttttacatggttataatcactttatatttttaatgtttttttcacttaatattttatatatacatttccatgtattgatgtagttagtccacatttaaatttttatagaattatatagtttttgaaaaatacagtcagtagatgttttattttttagctattcagttatgtttataagtttgcatagctacttctcgacatttggtttgttttaatttttttgtatcataatagtcctatttttttttcaagttggagtgaatgtttttagttttaagatagataggagacacttttttatcacatgtagtcacaacctgttttgtttttgtaaaacataggaagtctctttaatgcaatgatttgttttatatttggactaaggttcttgagcttatctcccaaggtactttccataatttaacacagcttctataaaagtgacttcatgcttacttgtggatcattcttgctgcttaagatgaaaagcattggttttttaaaattagagaataaaatatgtatttaaatttttggtgtgttcacataaagggatgtagctaaaatgttttcataggctattatatattctcgcagcatttccagttaagaggatattaggtatataattctcttcttaaccgaatgtcagatggtcttacgccacagggtgcaggtaacccttggtctgtaagcaccaccgatccagggatcattgtctaaataggttactattgtttgtttcatcttgcttttgcatttttattttttaatttccaaattttaagtgttccctctttggggcaaattcttataaaaatgtttattgtaaagttatatattttgtctacgatgggattatgcacttcccaattgggattttacatctggatttttagtcattctaaaaaacacctaattattaaaacatttatagagtgcctactgtatgcatgagttgagttgcttctgaggtacattttgaatgacagcatattgtaagaaaaaaaaaggtgaataaaatttgacattagattataaa

SEQ ID NO: 2181 - DNA, 2491 bp, Homo sapiens; identical to SEQ ID NO: 835

SEQ ID NO: 2182 - DNA, 939 bp, Homo sapiens
atggatggagagaatcactcagtggtatctgagtttttgtttctgggactcactcattcatgggagatccagctcctcctcctagtgttttcctctgtgctctatgtggcaagcattactggaaacatcttcattgtgttttctgtgaccactgaccctcacttacactcccccatgtactttctactggccagtctctccttcattgacttaggagcctgctctgtcacttctcccaagatgatttatgacctgttcagaaagcgcaaagtcatctcctttggaggctgcatcgctcaaatcttcttcatccacgtcattggtggtgtggagatggtgctgctcatagccatggcctttgacagatatgtggccctatgtaagcccctccactatctgaccattatgagcccaagaatgtgcctttcatttctggctgttgcctggacccttggtgtcagtcactccctgttccaactggcatttcttgttaatttagccttctgtggccctaatgtgttggacagcttctactgtgaccttcctcggcttctcagactagcctgtaccgacacctacagattgcagttcatggtcactgttaacagtgggtttatctgtgtgggtactttcttcatacttctaatctcctacgtcttcatcctgtttactgtttggaaacattcctcaggtggttcatccaaggccctttccactctttcagctcacagcacagtggtccttttgttctttggtccacccatgtttgtgtatacacggccacaccctaattcacagatggacaagtttctggctatttttgatgcagttctcactccttttctgaatccagttgtctatacattcaggaataaggagatgaaggcagcaataaagagagtatgcaaacagctagtgatttacaagaagatctcataa

SEQ ID NO: 2183 - DNA, 749 bp, Homo sapiens
gaggaaccgagaggctgagactaacccagaaacatccaattctcaaactgaagctcgcactctcgcctccagcatgaaagtctctgccgcccttctgtgcctgctgctcatagcagccaccttcattccccaagggctcgctcagccagatgcaatcaatgccccagtcacctgctgttataacttcaccaataggaagatctcagtgcagaggctcgcgagctatagaagaatcaccagcagcaagtgtcccaaagaagctgtgatcttcaagaccattgtggccaaggagatctgtgctgaccccaagcagaagtgggttcaggattccatggaccacctggacaagcaaacccaaactccgaagacttgaacactcactccacaacccaagaatctgcagctaacttattttcccctagctttccccagacaccctgttttattttattataatgaattttgtttgttgatgtgaaacattatgccttaagtaatgttaattcttatttaagttattgatgttttaagtttatctttcatggtactagtgttttttagatacagagacttggggaaattgcttttcctcttgaaccacagttctacccctgggatgttttgagggtctttgcaagaatcattaatacaaagaattttttttaacattccaatgcattgctaaaatattattgtggaaatgaatattttgtaactattacaccaaataaatatatttttgtacaaaa

SEQ ID NO: 2184 - DNA, 1009 bp, Homo sapiens; identical to SEQ ID NO: 1199

SEQ ID NO: 2185 - DNA, 2019 bp, Homo sapiens
cgcaacaaagactcggagcgagcgagggggcgggggtggggcggaatcccggccgccggcgaggcgggggaggcggcggcgcagggtcgccccggccgggcgggcggggtcgcgcctggtggcggtccccgcgccgaggcgccgctagggcgggcgggggtcgggacgccgggctaggggcgcgtcatgtggccgctcacggtcccgccgccgctgctgctgctgctgtgctcaggcctggccggacagactctcttccagaacccagaagagggctggcagctgtacacctcagcccaggcccctgacgggaaatgcatctgcacggccgtgatcccagcgcagagtacctgctctcgagatggcaggagtcgggagctgcggcaactgatggagaaggtccagaacgtctcccagtccatggaggtccttgagttgcggacgtatcgcgacctccagtatgtacgcggcatggagaccctcatgcggagcctggatgcgcggctccgggcagctgatgggtccctctcggccaagagcttccaggagctgaaggacaggatgacggaactgttgcccctgagctcggtcctggagcagtacaaggcagacacgcggaccattgtacgcttgcgggaggaggtgaggaatctctccggcagtctggcggccattcaggaggagatgggtgcctacgggtatgaggacctgcagcaacgggtgatggccctggaggcccggctccacgcctgcgcccagaagctgggctgtgggaagctgaccggggtcagtaaccccatcaccgttcgggccatggggtcccgcttcggctcctggatgactgacacgatggcccccagtgcggatagccgggtctggtacatggatggctattacaaaggccgccgggtcctggagttccgtaccctgggagacttcatcaaaggccagaactttatccagcacctgctgccccagccgtgggcgggcacgggccacgtggtgtacaacggctccctgttctataacaagtaccagagcaacgtggtggtcaaataccacttccgctcgcgctctgtgctggtgcagaggagcctcccgggcgccggttacaacaacaccttcccctactcctggggcggcttctccgacatggacttcatggtggacgagagcgggctctgggctgtgtacaccaccaaccagaacgcgggcaacatcgtggtcagccggctggacccgcacaccctcgaggtcatgcggtcctgggacaccggctaccccaagcgcagcgctggcgaggccttcatgatctgcggtgtgctctacgtgaccaactcccacctggctggggccaaggtctacttcgcctattttaccaacacgtccagttacgagtacacggacgtgcccttccacaaccagtattcccacatctcgatgctggattacaacccccgggagcgcgccctctatacctggaacaacggccaccaggtgctctacaatgtcaccctgtttcacgtcatcagcacctctggggacccctgagccaatgctgtggctcgggctgctgcctggggggcctctgggggctgggggcccttttcattctgcctgtgtccctcaagggtgatctctctgtctctgtcacgccctttctccccgcctttttgctgggcttttgttctctgcctatgtatttctgtctattttttcaatttcccctcttctcctttattgatctctgcttttaatacaccacttctttctttctgcctttttatggatgtctttttctttttatggctctggttctccagttctttccgtctctgcctctctctgtctctctctctctgtccttccacccctccctccttgcttcccacccattcctcatccctcactcccacccccacccccacccccaggagttgagtgcatggatctgtttctttttttatttacactttttctttccggtttgccggaataaacaggacctttgacatttga

SEQ ID NO: 2186 - DNA, 1690 bp, Homo sapiens; identical to SEQ ID NO: 513

SEQ ID NO: 2187 - DNA, 4448 bp, Homo sapiens
gcatgaccctgacatcggcagcgggagcggcggccagactctcttggaagtttaggatatttcacagttctgaatgttagccactgaaaatgccagtagatgatgaagcctctgaagatgacacggattcatttttctcaaacagcccaagaacctttattttccaataagagaatataacaatttctgtacactatggaagagtttgacttggtgaaaaccttacacaaaacttcatcttctgtaggatctgatgaaaattctcttcattctcttggactgaacttaaatactgatagaagtagtccccaccttagtacaaatggggtatcctctttctcagggaagaccagaccatctgtaattcaaggtacagttgaagtcctaacttctttaatgcaagagctacaaaacagtggaaagactgattcggaactttggaaaaactgtgagaatgtagagtaagcgaaatgaaagattacctggtttaagaattcgatagcagcaactgctaagtaccaggtggttacagctattcaatttggtggaaaaacaatgccaagaacagatagttgcccagcaggagcagttccacaaccaaattcaacatatacaggaggagataaaaaatttagtcaaattacagactagtagtgcttccttagcttcctgtgaaggaaattcttcaaacaaacaagtatcttcggaaagtcaaatgggttttttttctctaagcagtgagagaaatgaatctgttatccattatcctgaatccacagaacctgaaatacagcaagaaatgtccacgtcacaaccagactgcaatgtggatagttgctcagtaagcagtggatatggcaccttttgtatctcagaattaaatctgtacaaatctaaagaccctaaggagttcatggagcacatagatgttcccaaaggacagtatgtagcacctgcggtgccggctgagtcacttgtagatggtgtgaaaaatgagaatttttatatacagactcctgaagagtgtcatgtgtctttaaaggaagatgtatccatttctcctggtgaatttgaacataattttcttggtgaaaataaggtttctgaagtatacagtgggaaaacaaatagtaatgctataacatcatgggcacaaaaactgaagcagaaccaaccaaagagagcacatgtagaagatggaggttcaagatctaaacaaggaaatgagcaaagtaagaagacaccaattgagaaatctgattttgctgctgctacacatcctcgtgctttttacctcagtaaaccagatgaaactccaaatgcttggatgtctgattcaggaacaggattgacttactggaaactagaggaaaaggatatgcaccactctttgcctgaaactttagagaagacgttcatatcattgtcttccacagatgtgtcaccaaaccagtctaatactagtaatgagatgaagctaccgtcactgaaggatatttattataaaaaacaaagggaaaacaagcagttacctgagaggaatctcacttctgcttccaacccaaatcatccaccagaggtaaagttgtccacattctgccgagtgaacgtgaacaatgcttcctgactctaacttttacctcaagcttcattttccctaggagatctaaagcctactcacttcaaaacaagcaaaacaaagccgagttctgagggtcctgactctagatcctacgttacacatgaagccaaagcagcagatttcagggattcaacctcacggccttccgaatgcccttgatgacagaatatccttttccccggactctgttctagagcctagtatgtctagtccctctgacatagactcattttcacaagcaagtaatgtcacttctcagttacctggatttccaaaatatccctcacacacaaaagcttctccggtggactcttggaaaaatcagacattccaaaacgaaagtaggaccagttccacgtttccgtcagtatataccattactagtaatgatatctcggtcaacactgtagatgaagaaaacactgtcatggttgcttcggcctcagtcagtcagtcccagcttccaggtacagccaacagtgtcccagaatgcatttcattgacttccttggaagatcctgtgatattgtctaagattaggcagaatctgaaggaaaagcatgctcgacacatagcagatcttcgagcttattatgaatcagaaataaatagtttgaaacagaagctggaggcaaaagaaatctctggagttgaagattggaagataaccaatcaaattcttgtagacagatgtggccaattagatagtgctttgcatgaagctactagtcgcgtgagaacacttgaaaataagaataacttactggaaattgaagtgaatgatttgagagaacgcttcagtgcagccagcagtgcttccaaaattttgcaggaacgaattgaagaaatgagaacaagcagtaaagaaaaagacaataccatcattcgactaaaatctagactgcaagatttagaagaagcatttgagaatgcttacaaactctcagatgataaagaagctcaactaaaacaagagaacaaaatgtttcaagatcttttaggagagtatgagtcccttggaaaagaacacaggagagtaaaggatgcattaaatacaactgagaacaaattgcttgatgcatatactcagatttctgatttgaaaagaatgatttcaaaacttgaagctcaggtcaagcaagtagaacatgaaaatatgttaagccttcgtcataattctagaattcacgtgagaccctcgcgtgccaacacactagcaacttcagacgtcagcaggcggaaatggctgattccaggtgcagagtattccatctttactggccagcctctggacacccaggacagtaacgtggataaccagctggaggaaacctgtagcctagggcaccgttcacctctggaaaaggattcttcacctggaagttcatcaacaagcttgttgataaaaaagcaaagagagacttcagacacgccgatcatgagagctttaaaagaacttgatgagggaaaaatatttaaaaattgggggacacagacagagaaagaggacacctcaaatataaatcctcggcaaactgaaacttcagttaatgcaagtcgttctccagaaaagtgtgcccaacagagacaaaagagacttaattcggcctcacagagatcatcatctttaccaccttcaaatcgtaaatcaagtactccaacaaaaagagagattatgctaacaccagtgactgtggcttatagtccaaagcgatcccctaaagaaaacttgtccccaggatttagtcatctgcttagcaaaaatgagagcagtccaattcgatttgatatacttttggatgatttagatactgttcctgtgtctacattacaacgtaccaatccaagaaagcaactccagtttcttcctctagatgactcggaagaaaaaacttattctgagaaagccaccgataaccatgttaatcatagctcttgccctgaaccggtgccaaatggagtgaagaaagtatctgtgagaacagcctgggagaagaataaatcagttagctacgaacagtgtaagccggtttcagtcactccacaggggaatgattttgaatatacagcaaaaattcggaccctagctgaaacagaacgattttttgatgaacttacaaaagaaaaggaccagattgaggcagcactaagcaggatgccttctcctggaggacgaatcactttacagacaagattaaatcaggaagccttggaagatcgtttggaaaggattaatcgagaactgggttcagttcgcatgacgctaaagaaattccatgttttgcgcacctctgcaaatctttgagatttgtagccattaaattttgagacatttttgtttgcactaatgtataattatgcagtcagaaaaggcaaactattttgtactgtttataagccttcaaacagtagttttacaatcatgctattcttacacttgctattttatacttcaaatggccacatattttcaagatatttttgttatgctcaggaatctcttgtatattttactatttaaaaagcattatttttaaatagtatctgtctccaatttatatcaagaataaggaaatataaacagaggaagcagcttgtttctaaacaaatagtgttatccttttacaattaactgcacatcaattttatagacttgttctacattgtaaatacaattcagtttttaaaaaataaagcttaatagcttccataaacccctcagatatgtgaggaatcaagccataaatgtgcatttgctggacattatgtaccatgtcatctctatgactacagatttcaaggataa

SEQ ID NO: 2188 - DNA, 2918 bp, Homo sapiens
cttggggacttttcttttctgctttgcaggcccaggctcaaggcaaattataagtagggaaccaatttgagggaaagacatgtgaacagagttaaggtaccacgtcctgggagcgaccagcagccccacctgaagtccgcatgcaactctgacaagctcaggtgcttgttttaaggaaaggggctactagagtcttaccaacagcgagcccaggtgggagatgaaacaggtactccccaaaataggtcatccgagggaggaaaactgatggagagcacaatgtgctctgagcgtttttaatgtttttaagcttttaaatgatttcttcaaggccgagcagcagcagcaaaggtgtggcttaaaggattaagggggtttctgctgacacctagaatgaagttactctattactaatcaagccgagaggaggcccactatgcccccgtttatcatcctttcccagttcctttttgctggtcacaaaacgatgctcatcaatcccacctaaagcaggaggccaggagcccagcctcttgtagaaacagcgagggtataactgccctcccgttctgcccccaagacgaaggaggactctcggaagccaagaaaggtttaagaagtctttctggatagagagcagtgcccaggcaggaagcctttcgccggcagagcggggtccaaggacgagctggagaggacagaggcgcgatgggcctgctgcagggcctgctccgagtccggaagctgctgctggtcgtctgcgtcccgctcctgctgctgcctctgcccgtcctccaccccagcagcgaggcctcgtgtgcttacgtgctgatcgtgactgctgtgtactgggtgtcggaggcagtgcctctgggagctgcagccctggtgccggccttcctttacccgttcttcggagtcctccggtccaatgaggtggcggcggagtacttcaagaacaccacgctgctgctggtgggggtcatctgcgtggcggctgccgtggagaagtggaacctgcataagcgcattgctctgcgcatggtcttgatggccggagccaagccgggcatgctgctgctctgcttcatgtgctgtaccacgttgctgtccatgtggctgtccaacacctccaccaccgccatggtgatgcccatcgtggaggccgtgctgcaggagctggtcagtgctgaggacgagcagctcgtggcgggcaactccaacaccgaagaggccgaacccatcagtctggatgtaaagaacagccaaccttctctggaactcatctttgtcaatgaagacaggtccaacgcagacctcaccactctgatgcacaacgagaacctgaatggtgtgccctcgatcaccaaccccatcaaaactgcaaaccaacaccagggcaagaagcaacacccatcccaggaaaagccacaagtcctgacccccagccccaggaagcagaagctgaacagaaagtacaggtcccaccatgaccagatgatctgcaagtgcctctccctgagcatatcctactccgctaccattggcggcctgaccaccatcatcggcacctccaccagcctcatcttcctggaacacttcaacaaccagtatccagccgcagaggtggtgaactttggcacctggttcctcttcagcttccccatatccctcatcatgctggtggtcagctggttctggatgcactggctgttcctgggctgcaattttaaagagacctgctctctgagcaagaagaagaagaccaaaagggaacagttgtcagagaagaggatccaagaagaatatgaaaaactgggagacattagctacccagaaatggtgactggatttttcttcatcctgatgaccgtactgtggtttacccgggagcctggctttgtccctggctgggattctttctttgaaaagaaaggctaccgtactgatgccacagtctctgtcttccttggcttcctcctcttcctcattccagcgaagaagccctgctttgggaaaaagaatgatggagagaaccaggagcactcactggggaccgagcccatcatcacgtggaaggacttccagaagaccatgccctgggagattgtcattctggttgggggaggctatgctctggcttctggtagcaagagctctggcctctctacatggattgggaaccagatgttgtccctgagcagcctcccaccgtgggctgtcaccctgctggcatgcatcctcgtgtccattgtcactgagtttgtgagcaacccagcaaccatcaccatcttcctgcccatcctgtgcagcctgtctgaaacgctgcacattaaccccctctacaccctgatcccagtcaccatgtgcatctcctttgcagtgatgctgcctgtgggcaatccccctaatgccatcgtcttcagctatgggcactgccagatcaaagatatggtgaaagctggcctgggagtcaacgttattggactggtgatagtaatggtggccatcaacacctggggagttagcctcttccacctggacacttacccagcatgggcgagggtcagcaacatcactgatcaagcctaacgccaagtgtacaaactggcccaaccacaggagctgccagtatccagcagtatctggaccacaggcaaagaaaaccactaggaccaccaggagcacacaaccccagacccacgccggagggcatccctccaccagaagattccgccacctcaagtgaactgcaggaatcctccaacaaccacaaacacatgcttcgctgttagtgtcttcttcctgccctcagcaccacagctcaagaaaacctaaagtttcaatacaagccataggctcacagaaaaagaaaaagaaaataaaaattaaattaaaaaaaaagaagacaaagaaaa

SEQ ID NO: 2189 - DNA, 3347 bp, Homo sapiens
gcgcggccggcccgaggggcggtccctgggctcccgctcgccgccgctgccgctcctcgttctgctcctcactccccagcggctggaggccggtaccggcgggcaggaggcgcccgaggatgtgctgctggccgctgctcctgctgtgggggctgctccccgggacggcggcggggggctcgggccgaacctatccgcaccggaccctcctggactcggagggcaagtactggctgggctggagccagcggggcagccagatcgccttccgcctccaggtgcgcactgcaggctacgtgggcttcggcttctcgcccaccggggccatggcgtccgccgacatcgtcgtgggcggggtggcccacgggcggccctacctccagtttccaaggaaggaaaggcacacaatggtatcaaatgttcattcattccatctcttgatgctctacgatattatcagtctacactatgctttcctgaaaggccagaagttcaaagatggactagtttcccagggacctgattccccagttggaatactccagccccttggaaattcccgggatttataaaataactctagacaacaagactttgtctttaaaggtcctatgaattcttttctctctgtatttaggtatcctgatttttcttttccatattttccacaggattattttacaaatgcaaatagagagttgaaaaaagatgctcagcaagattaccatctagaatatgccatggaaaatagcacacacacaataattgaatttaccagagagctgcatacatgtgacataaatgacaagagtataacggatagcactgtgagagtgatctgggcctaccaccatgaagatgcaggagaagctggtcccaagtaccatgactccaataggggcaccaagagtttgcggttattgaatcctgagaaaactagtgtgctatctacagccttaccatactttgatctggtaaatcaggacgtccccatcccaaacaaagatacaacatattggtgccaaatgtttaagattcctgtgttccaagaaaagcatcatgtaataaaggttgagccagtgatacagagaggccatgagagtctggtgcaccacatcctgctctatcagtgcagcaacaactttaacgacagcgttctggagtccggccacgagtgctatcaccccaacatgcccgatgcattcctcacctgtgaaactgtgatttttgcctgggctattggtggagagggcttttcttatccacctcatgttggattatcccttggcactccattagatccgcattatgtgctcctagaagtccattatgataatcccacttatgaggaaggcttaatagataattctggactgaggttattttacacaatggatataaggaaatatgatgctggggtgattgaggctggcctctgggtgagcctcttccataccatccctccagggatgcctgagttccagtctgagggtcactgcactttggagtgcctggaagaggctctggaagccgaaaagccaagtggaattcatgtgtttgctgttcttctccatgctcacctggctggcagaggcatcaggctgcgtcattttcgaaaagggaaggaaatgaaattacttgcctatgatgatgattttgacttcaatttccaggagtttcagtatctaaaggaagaacaaacaatcttaccaggagataacctaattactgagtgtcgctacaacacgaaagatagagctgagatgacttggggaggactaagcaccaggagtgaaatgtgtctctcataccttctttattacccaagaattaatcttactcgatgtgcaagtattccagacattatggaacaacttcagttcattggggttaaggagatctacagaccagtcacgacctggcctttcattatcaaaagtcccaagcaatataaaaacctttctttcatggatgctatgaataagtttaaatggactaaaaaggaaggtctctccttcaacaagctggtcctcagcctgccagtgaatgtgagatgttccaagacagacaatgctgagtggtcgattcaaggaatgacagcattacctccagatatagaaagaccctataaagcagaacctttggtgtgtggcacgtcttcttcctcttccctgcacagagatttctccatcaacttgcttgtttgccttctgctactcagctgcacgctgagcaccaagagcttgtgatcaaaattctgttggacttgacaatgttttctatgatctgaacctgtcatttgaagtacaggttaaagactgtgtccactttgggcatgaagagtgtggagacttttcttccccattttccctccctcctttttcctttccatgttacatgagagacatcaatcaggttctcttctctttcttagaaatatctgatgttatatatacatggtcaataaaataaaactggcctgacttaagataaccattttaaaaaattgggctgtcatgtgggaataaaagaattctttctttcctactacattctgttttatttaaatactcattgttgctatttcactttttgacttgacttttatatttctttaaaaaattccttccttttaaaaaatataaaagggactactgttcattccagttttcttcttctttgttgttcttctagtgtgacttttcaagtgtaacagccattcttcctgactttaatattgtccagttctggtcttttctgtgaattaccactgggccccttacctcaatgctttttgttgatgcccactctggttcccttgtttatctgagtctgttggtaccccaaatgaccccacacccatcttaaagtactttttttcaccttccctgtttagtactggccagatgagttttttctagagctctgtcactatctgaaaagaaagaggctatgggaaacatagaaatggtatgtattaataactgatcataggctgaggagaaaaaatgtagctggctgcaaacccagtgctgtgaggtgacttatatgaggttccagatcaaagacaggccgtgtgagccagtccaggagggtgtaagttctgaatggttccttgctgactttgggtgacacatgtaccacatactggctcagtttaagtcatggttctattgtagatttatttttatattagttaataaatgactttaaattgtcaccaattgaaaatcttgtcactcttttggttttctttatatagctcagccaaatcttgttttatgtcctgtcctcatctcttaagctaaatctgtttggatcatattaataaactaaatgaaattaca

SEQ ID NO: 2190 - DNA, 2538 bp, Homo sapiens
atggcccgggagaggccgcccgggaggggctgcggcgtcctgcgccggtgtctactcggggctgtgctgttgttcggcctgcggctctgcgcagagctgcggcgcgccgggcccgggtcccccacccgcagcgccccgccgggcccggcctggcggccacctgggccgcacctgccgcccgcgccgggccagccgcgcggcgccagcaggaggcaggtgacctacgtgcgcagcggtcgccgggcgccgccggggggcggcgggagcgggacgccggagcctggctgctgtgccccgcgcgggcgcccccgccggaagggtccccggtggcatatagatctccagccttgggcaggctctgctcagtccctggatgaagaagcctggaggttcctgagatatatcagcaccacccagattgcatgcaatcacatgaatacagacagcctggctactgactctagtcctacacacaagccctggtcagtgtgtcttgacgacaggttcaatttagctcatcaaatccgcaacaagcagtgccgcctctactccttagggctaggaagtgatgatacccattttgaggttagcatggccaacaacggatgtgaagtgcatcgttttgatcctagtgtcaagtcagctcacattctggagagtcagcacctttggtatcaccgcttgtccattgactggcgggatccccatccagctgttgctgcccaaaaaccacatagcaacaccagaaaactgggaagcattttgaatgaatttggacatcacaagattgacgttctcaaggcagatctggaaagtgcagaatggaaagttttggaaaatcttattctggaagatgttcttgagcagattggacagctcatctttgagatccatctccactggcctgggtttgaggtcagtggcagtgacagcagcgttgtgcggttctggtacagccttctcaaagagttagaacaaaaggatttcaggctttttcacagttacaaagacttatctaaacctcagctattcttgaagaaagacattttcaatgcaagtagctgttatactctgagttgggtgaatacaagatggaaataggatgcaggatgtcatcaagagcacaagaaaatatttgcagaatgcagcatgtccataattctaatcatgagtttactcatccagtctcctgctagcctgtgccctgcttgaggcagggagtgtgttattgcgggcatgcagcctagtgcttggcatgtgatggggcacagtcaatacttgttaaagggataaacacagtcacccctatttgcccagactcttccttcaccttaacttggaagattatccccagctcatcacagttttccctaaaattctctatgtatctataatctatgaattcaccaacattgaaatgaaattatataaatttcctatttttactaggttggtgagatttttaagttcttcccctactgtttaaaatagggttttaaatttgaatttgaccctcctttttcaaggtttttcttatttaccttgttaatgatattctttacaaccttgtagatttcagtcattccttctcagcctttgctgaggccatgctgtggctttctaagcagcaatacttctgatttctgggaactcggatgcaccaaattctgtcactgagttaaagagactagactatcaagagcttcaacacgaaggtgtaagttccagttcgagaccaagtctgaaggtcttgacctcaccaagacccatgtcccagcttgaagacagccagacagagaattaattcttccttactgccttaggttctattcaggccttcaactggttgaatgaggtccacttacactgaggtgaagaatctgatttatttagtctactgatttaaatattaatttcatctggaaatatccttacagatacacctagaataatgtttaactaaagatctggacaccctttagtccagttaagttgacacataaaattaaccattgtaggtaggtaggtagataaatagatagatgatagatagatagatagatagatagatagataagatagattttcctactggcatgtttcaccattttcttgactcacatattctggtttccatctggctccttcggtctgtgctctcctcactgaagtaaggcctttaatgattacttcattataagtccatgagtaatatggtttggctacgtccccaaccaaatctcatcttgaattgtagttcccataatccccacgtgttgtgggagggacctggtgagaggtaattgaatcatggggttggtttcctccatgctattctcatgatactgagtaagttctcatgagatctgatggttttataagaggtgtcccccttcacttggctctcatttttctccttcctgctgccatatgaagaaggatgtgtttgcttccccttccaccacgactgtaagtttcctgaggcctcgccagccatgctaaactgtgagtcaattaaatctctttcctctataaatt

SEQ ID NO: 2191 - DNA, 6657 bp, Homo sapiens
gtcctaccgagggaggagctacaggccaccgcgaccagcagagagcgaaggcaggagggaccagcctggcccagccccttcattttactgtcgggggtagtgaggaggaagaggaagaggcgaaggctggcggaggaggaggacaattatatagagtctgttgtgaaatttagattagaacataataaatgctctatgttcaacaagaacaacagcaacaaactcagaagcactcctcgctaccgccggggagacccaggatacctaaactttactgagttggggccactcaagcctgaacagaaggatcagtggagccaacatattggttgcggcggatgcctcgcgggccggtggctatggaggcggcggcggttgatggttgaccgttggctccggggtgggggtcgccgttcgagtgatctgctcagacccgaccagagggcgcgggctgctgatgcttggcttggagcccgtgggggagacctagttcggctccgccatgccggccgccgggagtaacgagccggacggcgtcctcagctatcagagaccagatgaagaagctgtggtggatcagggtgggaccagtacaattctcaacattcactatgaaaaagaagagctggaagtcttcacaagatccctgtgaagtttgcaggcatgtgcaggacaaaggaagagaccttcaactccaaaatctctatatctttactcctggaagtctttgaagttttgttgttccagagctgtgaccagaccaaagaactgtgatatttttttctcttaactatgctaggctttttgttgttgttgttttttaaaactaaaggagttctctccacagaccttctgcttctttccaggtcacagaactctgtatgtgggagttcggatgccgcttggccggcagagccatcggcatcaccgcactcatggccagaagcaccggagacgagggcggggcaaaggagccagccagggggaggaaggcctggaagccctggcccacgacacaccatctcagcgtgttcagttcattcttggcaccgaggaagatgaagagcatgtgcctcatgagctgtttacagagctggatgagatctgtatgaaagagggagaagatgctgagtggaaggaaacagccaggtggctgaagtttgaagaagatgttgaagatgggggagaacgctggagcaagccttatgtggcaaccctttcattgcacagcctgtttgagctaaggagctgccttattaatggaacagtcctcctggatatgcatgcaaatagcatagaagaaatttcagacctgatcctggatcagcaagaactgtccagtgacctgaatgacagcatgagggttaaagtgcgggaagcccttctcaaaaagcatcatcatcagaatgaaaagaagagaaacaacctcattcccattgttcgctcctttgctgaggttggcaagaagcagtctgatcctcatttgatggataaacatggtcaaaccgtgtctcctcagtctgttccaactacaaatcttgaagtaaaaaatggagtgaattgtgaacatagtcctgtggatttaagcaaggtagaccttcatttcatgaaaaaaattcctactggggccgaggcctccaatgtcctggttggagaggtggatattttggaccgtcccattgttgcctttgtgaggctgtctccagctgttcttctctcaggcctaacagaagtgccaatcccaacaagatttttgtttatcttattgggtccagtagggaaaggtcagcagtaccatgagattggcagatccatggccaccatcatgacagatgagatttttcatgacgtagcatataaggcaaaagagcgagatgatctcctggcggggattgatgagttcctagaccaggtgacggtgctccctccaggagagtgggatccctccattagaattgagccacccaaaaatgtcccttcccaggagaaaaggaaaatgcctggagttccaaatggaaatgtttgccacatagaacaggaaccacatgggggtcacagtgggccagaacttcagcgcactgggcggctatttgggggcttggtgctggacatcaagcggaaggccccctggtactggagcgactaccgagatgcactcagcttacagtgtttggcttcctttctgttcctgtactgtgcctgcatgtcacctgtcatcacctttgggggactgcttggagaagccactgagggacgcataagtgcaattgaatccttgtttggagcttccatgactgggattgcttattccttgtttgcgggacaggctctcaccatcctgggaagtactggaccagtgcttgtgtttgaaaagattttgttcaaattctgcaaagactatgctctttcatacctctccctgcgagcttgtattggactgtggaccgctttcctgtgtattgtccttgtggcaactgatgccagttcccttgtctgctacattacccgtttcactgaagaagcatttgcctccctaatttgcattattttcatctatgaagcaatagaaaaactgattcacctggcagagacctaccccatccacatgcacagccagctggaccaccttagcctctattactgcaggtgtactctgccagagaatccaaacaatcacaccctccagtactggaaggaccacaacatcgtgacagcagaagtccactgggctaacctgactgtcagtgtaagtctgggagctgccagatgtcctagcattgtgaccacaggtttaggagggacttctaagtgaaggggaggagtagccctttggccaaactctggcatttaccgaaataaagctttttaaaaaacaagaatgccaggagatgcatggagagttcatgggatctgcgtgcggccatcatggaccctacactcctgatgtcctcttttggtcctgtattctctttttcaccaccttcatcctctcaagcaccttaaagacgtttaagacgagccgttatttcccaaccagagtacgctccatggtgagtgactttgctgttttcctcactatcttcacaatggtgattattgattttttgattggagtcccatcaccaaagcttcaagttcccagtgtgttcaagccaacaagggatgatcgcggatggattattaatcccattggccccaatccctggtggactgtgatagctgcaattatcccagctcttctctgtactatcttgatattcatggatcagcagatcacagccgtcattattaacaggaaggaacataagctcaagaaaggctgtggctaccacctggacctactgatggtggccatcatgctgggtgtctgctccatcatgggcctgccctggtttgtagctgcaactgtcttgtccatcacacatgtgaacagcctcaagctagaatctgaatgctctgctcctggagaacagcccaagttcctgggcatccgagaacagagagtgacaggccttatgatctttgtgctgatgggctgctcagtcttcatgacggctatcttaaagtttattccaatgccagtactctacggagttttcctttacatgggagtttcttcactacagggaattcagttctttgatcgtctaaagctctttgggatgcccgcaaagcaccagccagatttcatctacctgcggcatgtgccgctgcgcaaagtgcacctcttcaccctcatccagttgacctgtctcgtcctgctctgggtcatcaaggcatctccagctgccattgttttcccaatgatggttttggccttggtctttgtcaggaaagtcatggatctctgtttctctaagcgagagctgagctggctagatgatctcatgcctgaaagcaaaaagaagaagttggatgatgccaaaaagaaggccaaggaggaagaggtcatagtccttgcaccaactgtatacctgggggcctcaaattacagaacataggaagggtcatgtgaaaagtcagcatgtctggaatcccgagggttatatttaggagctgggaagattacccccaaagatgttctcagctaagaatggattagggattcttgcttctgtctgttcttaatttttgggtttgacaaccacttattttttcctttgtttacaatctactcaccaggctcatacctacaatgtgaacatacagtatgcccttattagcagattcaatggctcacattctttcaaaaggtctaatttgacaaatacataagacccattatttcctagaatgtttgtaatatatctaattgcaaatggtgctgtggttggcaccatgcaaagataacttgcataggactttctgtcttttttcatttccctcagcacttggcatcttgtcatctacacaatggaccctcaataaatggcctatatgtgcaaagaaagaatgtgtagcaaatgaaaataccagaccaagaaatgagtgagctgggaagtgtttccaaatacagttagtgcctaaaatagtgtcctttgaaaaaacttttaaaagacttttttttaggccaggcataatgggttatccctgtaattccagggcttttgggagttgaagctggaggattacttgaggccagaagtttgagactagcctaggcaatataatgagaccctgtctctacaaaaaaaaaaagaggctgagaaaatgttagaaattgggggagacaagtttcccttagagagcaggaagttactaagtagtcctggaaagaacatcagttgcagatgtgacccctctgagattaatatatctgatgaaatgcctaaaactacagtttggaaagctctcagtatgaattctggaaatgcaaaggaaaagagtctcttcaactaagagtctttgctgggatggaagatttgggccgtgtggtgcctcagggaagttctggttacagagaaaatggcgagtctctcagagaagaagcaagaccaagtctggccctgtccttggtcatctcaaagccatgccgaagcattcagttattcttggtgtgcattggaaggcatccagctatccccataccagcagccagtcaccagatgtgaatgtggaagcagaagaccacctcctgttggttcttctcctcttccttctttttctctttagaacggccaccattgaagacctagcttcccattttccagacgttttctctgaaattctctgctggcctgccaagccatatggattcattctgccactgaggagtccttcagtgaggtccctcttcctaaaggacagagtggggagtaggaggggaacagagaggacatcctctctggctctccagtgctcttagtgtctacaggctcctaggcagccctgggccttggtttgattacctcccctgggggatgctggtcagacccagaggttgtcaggaggtcagctaccaggaagatccatgatctgggcattggcagtgcctgccaccacagccaggaagatgcctctgacctgggtgcatctccatcactccttagcagcagcctgcataactggcaagaatcttggatgatacaagagccaagaagggacatttgagttgtgtcgcttagataggaaagggatccagggaaaatcaacagtaagtgaggatgagcagtgtctcttggttttcattgaggatagagtaagagattgagtttagattgcaacagaaggaattagtttagataccaggaagaacttcctagcctgaagatttgtcatagtgtctgctttctagatatctgggaaagatttgataatagttgtttgtgaatagaaaggaggatatgatgtttttattggccattttgcgggactcttcgacttcttgctgctgtctcttgaggatacattccaattccatcctggcgagatccaagtgcttacgtactgtctccttagctgccttagagtaaacgatcatcagttcaatggaccaaaatcaccttcagccatgtggtttcttcatcatcatggatttcttttggttgacaaacattctggctctcagatgcaaaaagtcacactgggaaatgaactgtaagtggtgaaattagttttggtatttaatttaaaactacatttatagtttttctcttctcttctatgttgcaatgaatgtaaagtatttgggatccagtgcttataaacctttccttcctttgtgcacagaatgtaactagcaagcccattagcacccagataattctatcatgttagtttcccatcctggaaaatctttgtacagtgggaagttccccgatgtgtttttctttcttaggtgaagggttggctatatcactttattgaattttgcattccttagacttttaaaatatactaatgtattctagtcttactctaaagacctttgatgttaaaggaatccttcatttatttcatattccctatctcatagggccacaattattttaatacagagatgattttcaaaatattttaacaactggtacaggacagatgccagccactcagaagggatgcctgctgtaaacaagcagtatgtatggttgtaccaatgcctattggctgaacattatgctactttcagatattaaaatggtgttcctttgaatcgtg

SEQ ID NO: 2192 - DNA, 4962 bp, Homo sapiens
gagctgcagtcagatccggggatggagggagccggagaagaggagtgagaaggccggggaggcaggccctgctgtcttcctgcaggccggcagcctgctggcagtggaggaccaggccgtccaggaaaggaaggggtcaggaggtcgggcagggcctcagcaggttcagacaagtccccagaagggagctgcaggcgccctcgagtccaggccccaagcctggctccggttgtccaaagagggcctaggccaggcctctggtgcggaaactgagtcacagccagacctcagggcacggcctagacgcttacgagccaaagttaggggtagagagcagagacctccggggggtctcagggagtagggggcttcagggcctcccagtctagagccggattggcgagttagacgcttgtagatccaaggttggattggggtggggtctctgggacgttggatcgctacgcaaggattggggggattcaagtgcttagagatcgaagtctgccctgggtagggggagtcagacaattggaaagcctaggtagttatttggggaggggtctctacgccttggcgaagcgcacagctgcatctttttggcttgaggcctgaggccttgtcgagaagcttccgtgaaagggtgggccagccgggccacgagaaagaaagtgaataaatcaggaatataagtgggcggggggcccctgagaggggggtcgcaaagggtgagacatggccaccaggcgtttaaccgacgctttcttgttgttgcggaataattccatccaaaaccggcagctgttagccgagcaagtgagtagtcacatcacctccagccctctgcattcacgtagcattgctgcggaagaagcggagctggacgagtaagacttgctgatgaccgtatggcactggtgtcaggcatcagcttagatccagaagcagcgattggtgtgacaaaacggccacctcctaagtgggtggatggagtggatgaaattcagtatgatgttggccggattaagcagaagatgaaagaattggccagccttcatgacaagcatttaaacagacccaccctggatgacagcagcgaagaggaacatgccattgagataactacccaagagatcactcagctcttccacaggtgccagcgtgccgtgcaggccctgccgagccgggcccgggcctgctccgagcaggaggggcggctgcttgggaacgtggtggcctcgctggcgcaggccctgcaggaactctccaccagcttccggcacgcacagtcaggctacctcaaacgcatgaagaatcgagaggaaagatcccagcattttttcgacacatcagtaccactaatggatgatggagacgataacactctttaccatcggggttttacagaggaccagttagttctggtggagcagaacacactgatggtggaagagcgggaacgagagattcgccagattgtacagtccatttctgacctgaatgaaatattcagggacttaggggcgatgattgtagaacagggtacagtccttgacagaattgactataacgttgaacagtcctgtatcaaaactgaagatggtttgaaacagcttcacaaggcagaacagtatcaaaagaagaatcggaagatgcttgtgattttaatattatttgtcatcatcattgtgctcattgttgtcctcgttggcgtgaagtctcgataagtggcattgggttttcgtgtgtgccgcgcgtgtggatctcccgggtgtgaggggcttggcctgcgccccgccagctgcccgcagaggtgcagcctcgaggaatctgagggcgtcggggcagcgaacctttgcatccacggactcctccttccctagtcctgctcaagcggtccggggaatgggtttttgtttttccttcattgttgagaatttaaggacctttgatactgctgcacaatagagattgagttctgggatcagttataatatatattttttttagaaagagaaaatgagctgagagtttacaggcactgcagaagctgttcagtattatatgtgtatatgctatttttttagcagccatgtctgagcagaatgttaacataatttttggaaaaattttctttaaaccatctggtttttaagaaatttggtaccaaaaattgatgagtagaggcaaaaatgccccttcatctttctctatatattttccagttgaaaacaaactaagaagtcctttaagaatttataatccgttccccattaacttaatttagcttttccatcactgttaatgatcagagtaacaaagtgtgaaaaataagaaaccatcattgatgttaattaacacatttagatgggccagttaaaacagcttcataagttttaaattaattgtaaatggaatattcctcatttaaaatttttgcactgcattttctactgtaaaccaaaagaggttactaagcaaaaccacctaaatttaagttggtgatttaaatgaatctcacattaaaagaaagcttgacagtgttatgaaagccaccagactcagccagtgtgtccccatgggtatccccagccatccttgctcaatccattacttatatactaactacataatgacctgttcaaaccagactctatttaatgaactgtgaatttacacagaggccattttaaatgggtcaccccatttaggattagtggatctcaaattattaaccaaacatcactccatttcaaagtaaaatattccaccagcgatttgatttattggctcttccattgccactgagcaatgcccaggaagcaggcacattgccaaggactgggggcatcttgactaggaagctcctcgtttgtgtgagcgtgggtcagaccgccaaagtaggacttcatcgtttacctacctattatcaatatggtgcttgaatatattcctataactgtagaacagtgtggaaagtgatggtaactttgaagttgttcatgttttattggctttgttttaattgacactagtagagttttaatggtctttgtgtaaattttaatggcttttccattgtttttgcttctcttaaaaagtttaagaagaatatgacctcattaaatgtgctgttttatttggaccagtcacacaaaatgtctctctagagttgactttaaagttgtttacagaaatttaaactcaattccagagattgaagttgtccaaacagctcatgggcttagtgtccaaacccctgcccagccttccctttccaagttggtgccacctccaggtagccattggtggttttcctattactgatgtggctgtggaatgataaggtcctagaggggccctggcatttcaggaagcggacctggtattccctgacaaacattgcttaggaaagagggccggagaataagaagccagcacctcatcagtcagccctgcaatgtgagacttccgtagctgttgagagtcactgcaggtgttctttcatcccatctgattttaacccatggttgagacgttccaagttagatctgctgctcttaggtgtggggctgtccacattagggaacttgcctcaaaaacagtccacagtggcaataccggacttctgttcaagctttttaaagtgctgagccttacaaacccctgaaggaaagtgaccctttaagagaggatcatctttttttatatttattttcaccaaatagggtgatgagggttggtttttgttccctcaacccatttgggtaaaataacggatctgattagaaactgttttaaggaggggctgggctcggtggctcacgcctgtaatcccagactttgagaggccaaggcggtcacgaggtcaggagttcgagaccagcctagccaacatggtgaaaccccgtctctacaaaaaatacaaaaattagccgggtgggacacgcctgtaatcccagctactcaagaggctgaggcaggagaatagcttgaacccgggaggcagaggttgcagtgagccgagatcacaccactgcactccagcctgggtgacagagcgaggctccgtctcaaaaaaaaaaaaaaaaaattgttttagcgctgggtttcccaaggtgggagagacagacccagcctggagctggcccctggcctgtgtgctgacttcttggggtcctcaaaccactgtatttttctgttgagcctgtacttggggagagatcagtagcatttgaggaagtaagagaaaagaatcatggtacctcagggtttctttccctttactcgctggcagccattgtctgtgggcacctcatgtttttccacactctactgggccgtggaggtaacgatcacccaggccagtctcctctgcctgggatgcgccctctgagaggaggcctagcagggcaggctccctctgggcatccctggatgcagcctctggacacatgcctcctttaaagtgtccgggtgcagctcaggttgagtggaggtagaaggagaaacagacatgtttaccacgcgttttccaaagctcctgatctttcccaagattgtaactgaaaactgctgtctcttgttttgttcgttttgggggtggtggtgctggctgggccatgcttgtgaagtgatgtgtgtctctgatttaacggattcactgttttctctgctaattgagagagcgttatttacattatttatttgttttgacacaagtgctttcagtgttttatcctagctaatggcttcttaaaggtaataaaacccttccaacgtaattggtcagataaaactttttttcttgtatgcttaaataaagcaattagtgaagcacttctatccaaaatgacttttttgtccttttttaaaaccaatttactgttactggaaactttttgtacaataaagcaatcacgcagattaaagaacatcctgcaatcctagtattaattttaa

SEQ ID NO: 2193 - DNA, 4120 bp, Homo sapiens; identical to SEQ ID NO: 68

SEQ ID NO: 2194 - DNA, 1977 bp, Homo sapiens; identical to SEQ ID NO: 252

SEQ ID NO: 2195 - DNA, 474 bp, Homo sapiens; identical to SEQ ID NO: 249

SEQ ID NO: 2196 - DNA, 2034 bp, Homo sapiens; identical to SEQ ID NO: 919

SEQ ID NO: 2197 - DNA, 14829 bp, Homo sapiens; identical to SEQ ID NO: 297

SEQ ID NO: 2198 - DNA, 4986 bp, Homo sapiens; identical to SEQ ID NO: 50

SEQ ID NO: 2199 - DNA, 4949 bp, Homo sapiens; identical to SEQ ID NO: 1151

SEQ ID NO: 2200 - DNA, 11287 bp, Homo sapiens
gcctcccgccctctctcttgctggccgcacgccccggccccgcgcacctccgcccggctccgcagccgctacccgcgcttcgttgccctgtgggactccgagcgagcccggagggaaccctcctcttcttctgggggcgacttttgtttgcttgcctgtttctttctggtgacttttgcagctttccaatatccgtcttcggagcgcacgggaatccgccgagctctgcgtgcaggcccttttttcttttgaggttcacattttttgaaattttacgccagggcttttgtaatttcctcccccgcccgctgacggtcctggagtcgctcggggctttaggccggttatgcaacgtgtaccgctcggggctgccggctgcacctccgccgcgcctcgccgctcactgcgctagacccggcgccccgcgtctcgcttcgcgggcagtcagggggccggcgctctgtcgaggtctccagctagagcagggagcccgagcccgagggagtccccggagccgacgaagggcttattagaccctgactcttttctgaggcgcgcagattttgtctttgatcactccctctccgcgggtctacggccgcgcgctttcggcgccggcgatggggagaagacggaggctgtgtctccagctctacttcctgtggctgggctgtgtggtgctctgggcgcagggcacggccggccagcctcagcctcctccgcccaagccgccccggccccagccgccgccgcaacaggttcggtccgctacagcaggctctgaaggcgggtttctagcgcccgagtatcgcgaggagggtgccgcagtggccagccgcgtccgccggcgaggacagcaggacgtgctccgagggcccaacgtgtgcggctccagattccactcctactgctgccctggatggaagacgctccctggaggaaaccagtgcattgtcccgatttgtagaaatagttgtggagatggattttgttcccgtcctaacatgtgtacttgttccagtgggcaaatatcatcaacctgtggatcaaaatcaattcagcagtgcagtgtgagatgcatgaatggtgggacctgtgcagatgaccactgccagtgccagaaaggatatattggaacttattgtggacaacctgtctgtgaaaatggatgtcagaatggtggacgttgcatcggacccaaccgctgtgcttgtgtttatgggttcactggtccacagtgtgaaagagattacaggacaggcccgtgtttcactcaggtcaacaaccagatgtgccaagggcagctgacaggcattgtctgcacgaagactctgtgctgtgccaccattggacgggcgtggggccatccctgtgagatgtgtccagcccagcctcagccctgccgacggggtttcatccccaacatccgcactggagcttgccaagatgttgatgaatgccaggctatcccagggatatgccaaggaggaaactgtatcaatacagtgggctcttttgaatgcagatgccctgctggtcacaaacagagtgaaactactcagaaatgtgaagtccatgtggataaagcacaagcaggagccagatgtccttgcgtgatcctcccttccagactataccttcgttaacattccttgagctagttattctttcctggcttacatgggaggcagaaaaagaacatcattgtattggaaagtttcccttaaatggctctttatgtggcagatagttgtttgcaatttagtttgaagagttttcagctttgttccattaacacagcattttgttgtttgagacttgtgacaacaaatatatttatttaggctcatgaaactcataaaagttgttggcacagtctcctctgctgctgttccaactctgcttagataaaccatggaaaataaactttctgtactaaactgaaaaacattgatgagtgcagcatcattcctgggatatgtgaaactggtgaatgttccaacaccgtgggaagctatttttgtgtttgtccacgtggatatgtaacctcaacagatggctctcgatgcatcgatcagagaacaggcatgtgtttctcgggcctggtgaatggccgctgtgcacaagagctcccggggagaatgacgaaaatgcagtgctgctgtgagcctggccgctgctggggcatcggaaccattcctgaagcctgtcctgtcagaggttctgaggaatatcgcagactttgcatggatggacttccaatgggaggaattccagggagtgctggttccagacctggaggcactgggggaaatggctttgccccaagtggcaatggcaatggctatggcccaggagggacaggcttcatccccatccctggaggcaatggcttttctcctggcgttgggggagccggtgtgggggccgggggacagggacctatcatcactggactaacaattctgaaccagacaatagatatctgtaagcatcatgctaacctttgtttaaatggacgctgtataccaactgtctcaagctaccgatgtgaatgcaacatgggttataagcaggatgcaaatggagattgtatagatgttgatgaatgcacatcaaatccctgcactaatggagattgtgttaacacacctggttcctattattgtaaatgtcatgctggattccagaggactcctaccaagcaagcatgcattgatattgatgagtgcatccagaatggggttctttgtaaaaacggtcgatgcgtgaacacagatggaagtttccagtgcatttgcaatgccggctttgaattaactacagatggaaaaaactgtgttgatcatgatgaatgtacaactaccaacatgtgtttgaatggaatgtgcatcaatgaagatggcagcttcaagtgcatctgcaaaccaggatttgtcttggctccaaatgggcgttactgtactgatgttgatgaatgccagaccccaggaatctgcatgaatgggcactgcatcaacagtgaagggtccttccgctgtgactgtcccccaggcctggctgtgggcatggatggacgtgtgtgtgttgatactcacatgcgcagtacctgctatggaggaatcaagaaaggagtgtgtgtgcgtcctttccccggtgcagtgaccaagtccgaatgctgctgtgccaatccagactatggttttggagaaccctgccagccatgccctgcaaaaaattcagctgaattccacggcctttgtagtagtggagtaggtatcactgtggatggaagagatatcaatgaatgtgctttggatcctgatatatgtgccaatgggatttgtgaaaacttacgtggtagttaccgttgtaattgcaacagtggctatgaaccagatgcctctggaagaaactgtattgacattgatgaatgtttagtaaacagactgctttgtgataacggattgtgccgaaacacgccaggaagttacagctgtacgtgcccaccagggtatgtgttcaggactgagacagagacctgtgaagatataaatgaatgtgaaagcaacccatgtgtcaatggggcctgcagaaacaaccttggatctttcaattgtgaatgttcgcccggcagcaaactcagctccacaggattgatctgtattgacagcctgaaggggacctgttggctcaacatccaggacagccgctgtgaggtgaatattaatggagccactctgaaatctgaatgctgtgccaccctcggagccgcctgggggagcccctgtgagcggtgtgaactagatacagcttgcccaagagggcttgccaggattaaaggtgttacgtgtgaagatgttaatgagtgtgaggtgttccctggcgtttgtccaaatggacgctgtgtcaacagtaagggatcttttcattgcgagtgccctgaaggccttacgttggatgggactggccgtgtatgtttggatattcgcatggagcagtgttacttgaagtgggatgaagatgaatgcatccaccccgttcctggaaagttccgcatggatgcctgctgctgtgctgtcggggcggcttggggcaccgagtgtgaggagtgccccaaacctggcaccaaggaatacgagacgctgtgcccccgcggggctggctttgctaaccgaggggatgttcttactgggcggccattttacaaagacatcaatgaatgcaaagcatttcctgggatgtgcacttatgggaagtgcagaaatacaatcggaagcttcaaatgccgttgcaatagtggctttgctctagacatggaggaaagaaactgcacggacatcgacgagtgcaggatttctcctgacctctgtggcagtggaatctgcgtcaatacaccgggcagctttgagtgcgagtgcttcgaaggctatgaaagtggcttcatgatgatgaagaactgcatggacattgacgaatgtgaacgtaaccctctcctttgtaggggtggcacctgtgtgaacactgagggcagctttcagtgtgactgcccactgggacacgagctgtcaccatcccgtgaggactgtgtggatattaatgaatgctccctgagtgacaatctctgcagaaatggaaaatgtgtgaacatgattggaacctatcagtgctcttgcaatcctggatatcaggctacgccagaccgccagggctgtacagatattgatgaatgtatgataatgaacggaggctgtgacacccagtgcacaaattcagagggaagctacgaatgcagctgcagtgagggttatgccctgatgccagatgggagatcgtgtgcagacattgatgaatgtgaaaacaatcctgatatctgtgatggcggccagtgtaccaacattcctggagagtatcgctgcctctgctatgatggcttcatggcttccatggacatgaaaacatgcattgatgtcaatgaatgtgacctaaattcaaatatctgcatgtttggggaatgtgagaacacaaagggatccttcatttgccactgtcagctgggttactcagtgaagaaggggaccacaggatgtacagatgtggatgagtgtgaaattggtgctcataactgcgacatgcatgcctcatgtctgaatatcccaggaagcttcaagtgtagctgcagagaaggctggattggaaacggcatcaagtgtattgatctggacgaatgttctaatggaacccaccagtgtagcatcaatgctcagtgtgtaaataccccgggctcataccgctgtgcctgctccgaaggtttcactggtgatggctttacctgctcagatgttgatgagtgtgcagaaaacataaacctctgtgagaacggacagtgccttaatgtcccgggtgcatatcgctgcgagtgtgagatgggcttcactccagcctcagacagcagatcctgccaagatattgatgaatgctccttccaaaacatttgtgtctttggaacatgtaataacctgcctggaatgtttcattgcatctgcgatgatggttatgaattggacagaacaggagggaactgtacagatattgatgagtgtgcagatcctataaactgtgtcaatggcctatgtgtcaacacgcctggtcgctatgagtgtaactgcccacccgattttcagttgaacccaactggtgtgggttgtgttgacaaccgtgtgggcaactgctacctgaagtttggacctcgaggagatgggagtctgtcttgcaacaccgagatcggggtgggcgtcagtcgctcttcatgctgctgctctctgggaaaggcctggggaaacccctgtgagacatgcccccctgtcaatagcactgaatattacaccctgtgtcccggaggtgaaggcttcagacctaaccccatcacaatcattttagaagacattgacgaatgccaggagttaccaggtctctgccagggtggaaactgcatcaacacttttgggagcttccagtgtgagtgcccacaaggctactacctcagcgaggatacccgcatctgtgaaggatattgatgagtgttttgcacatcctggtgtgtgtgggcctgggacctgctataacaccctgggaaattacacctgcatttgcccacctgagtacatgcaggtcaatggaggccacaactgcatggacatgagaaaaagcttttgctaccgaagctataatggaaccacttgtgagaatgagttgcctttcaatgtgacaaaaaggatgtgctgctgcacatataatgtgggcaaagcctggaacaaaccttgtgaaccatgcccaactccaggaacagctgactttaaaaccatatgtggaaatattcctggattcacctttgacattcacacaggaaaagctgttgacattgatgaatgtaaagagattccaggcatttgtgcaaatggtgtgtgcattaaccagattggcagtttccgctgtgaatgccctacaggattcagttacaatgacctgctgttggtttgtgaagatatagatgagtgcagcaatggtgataatctctgccagcggaatgcagactgcatcaatagtcctggtagttaccgctgtgaatgtgccgcgggtttcaaactttcacccaatggggcctgtgtagatcgcaatgaatgtttagaaattcctaacgtttgcagtcatggcttgtgtgttgatctgcaaggaagttaccagtgcatctgccacaatggctttaaggcttctcaggaccagaccatgtgcatggatgttgatgagtgcgagcggcatccatgtggaaatggaacttgtaaaaacaccgttggatcctataactgtctgtgctacccagggtttgaactcactcataataatgattgcctggacatagatgagtgcagttccttttttggtcaggtgtgcagaaatggacgttgttttaatgaaattggttctttcaagtgtctatgtaacgaaggttatgaacttaccccagatggcaaaaactgtatagacactaatgagtgtgtcgcccttcccggctcttgctctcctggtacctgtcagaatttggagggatccttcagatgcatctgtcccccagggtatgaagtaaaaagcgagaactgcattgatataaatgaatgtgatgaagatcccaacatttgtctttttggttcctgtactaatactccagggggcttccagtgcctctgcccccctggctttgtactatctgataatggacggagatgctttgatactcgccagagcttctgcttcacaaattttgaaaatggaaagtgttctgtacccaaagctttcaacaccacaaaagcaaaatgctgctgtagtaagatgccaggagagggctggggggacccctgtgagctgtgccccaaagacgatgaagttgcatttcaggatttgtgtccatatggccatggaactgtccctagtcttcatgatacacgtgaagatgtcaatgagtgtcttgagagcccaggcatttgttcaaatggtcaatgtatcaacaccgacggatcttttcgctgtgaatgtccaatgggctacaaccttgactacactggagtacgctgtgtggatactgatgagtgttcaatcggcaatccgtgtggaaatggtacatgcaccaatgttattgggagttttgaatgcaattgcaatgaaggctttgagccagggcccatgatgaattgtgaagcagacaatatcaacgaatgtgcccagaacccactgctgtgtgctttccgctgcatgaacacttttgggtcctatgaatgcacgtgcccgattggctatgccctcagggaagatcaaaagatgtgcaaagatctggatgaatgtgctgaagggttacacgactgtgaatctaggggcatgatgtgtaagaatctaatcggcaccttcatgtgcatctgccctcctggaatggcccgaaggcccgatggagaaggctgtgtagatgaaaatgaatgcaggaccaagccaggaatctgtgaaaatggacgttgtgttaacattattggaagctatagatgtgagtgtaatgaaggattccagtcaagttcttcaggcactgaatgccttgacaatcgacagggtctctgctttgcagaggtactgcagacaatatgtcaaatggcatccagtagtcgcaatctcgtcactaagtcagaatgctgctgtgatggtgggcgaggctggggccaccagtgcgagctttgcccacttcctggaactgcccagtacaaaaagatatgtcctcatggcccaggatatacaactgatggaagagatattgatgaatgtaaggtaatgccaaacctctgcaccaatggtcagtgcatcaataccatgggctcattccgatgcttctgcaaggttggctacaccacagacatcagtggaacctcttgtatagaccttgatgaatgctcccagtccccgaaaccatgcaactacatctgcaagaacactgaggggagttatcagtgttcatgtccgagggggtatgtcctgcaagaggatggaaagacatgcaaagaccttgatgaatgtcaaacaaagcagcataactgccagttcctctgtgtcaacaccctgggggggtttacctgtaaatgtccacctggtttcacacagcatcacactgcttgtatcgacaacaacgaatgtgggtctcaaccttcgctttgtggagcaaagggaatctgtcaaaacactccaggcagtttcagctgtgaatgccaaagagggttctctcttgatgccaccggactgaactgtgaagatgttgatgaatgtgatgggaaccacaggtgccaacacggctgccagaacatcctgggtggctacagatgtggctgcccccaaggctacatccagcactaccagtggaatcagtgtgtcgatgagaatgaatgctccaatcccaatgcctgtggctctgcttcctgctacaacaccctggggagttacaagtgcgcctgcccctcggggttctccttcgaccagttctccagtgcctgccacgacgtgaatgagtgctcgtcctccaagaacccctgcaattacggctgctctaacacggaggggggctacctctgtggctgcccccctgggtattacagagtgggacaaggccactgtgtctcaggaatgggatttaacaaggggcagtacctgtcactggatacagaggtcgatgaggaaaatgctctgtccccagaagcatgctacgagtgcaaaatcaacggctattctaagaaagacagcaggcagaagagaagtattcatgaacctgatcccactgctgttgaacagatcagcctagagagtgtcgacatggacagccccgtcaacatgaagttcaacctctcccacctcggctctaaggagcacatcctggaactaaggcccgccatccagcccctcaacaaccacatccgttatgtcatctctcaagggaacgatgacagcgtcttccgcatccaccaaaggaatgggctcagctacttgcacacggccaagaagaagctcatgcccggcacatacacactggaaatcactagcatccctctctacaagaagaaggagcttaagaaactggaagagagcaatgaggatgactacctcctaggggagcttggggaggctctcagaatgaggctgcagattcagctctattaacccttcacagacttgggcccaggctcaaatcctagcacagccagtctgcagaagcatttgaaaagtcaaggactaattttaaagaggaaaaataataataactcttgtttctttcctccctgtcttagactttgaatgttgaccctcacagggagggataatttagactctggtatggccaaagatttgagcacaaaggcaaccgtggttactgtattttttatataacttcattttaaaatatattaaaagaaacctaaatgttcaagatatcagcatatggcactaaatgcacaaaaataatgtgagctttttttttttttcctgttagcagtctgtaacactttgggtattttgctatagttgctaattaaaaaaatatagatgtttatttatttttaatgcagtaatatatggagaaatgaacaaactatgtaaacaaaaagggaaactcacttgtttttctttagatttataaatttgagctattttttttagaggtgctttttaaaaatccaatagatacaagagatgtttcctttggttttctgccagtcatccagctgatacacacctgatgattttaaagaaagccacacagagctgaatgggcagtgtaatcaataatttaaaaaacatgaatgtcattagatcctttataacgtagatcgaagccaaagcagctcatttgtgacaacatttcatatcaccagacacaccaggcaacagaagttgaagcacaaccactgtagcaaaataccttgactgcttgtgagaccattagcattgcaggccaaaccgtactgtatttccttctcataacctcaaggaaccatatgtgctacccacaacacctcattcttacccagggtgcgctgcgtcctcatggtactgtaggcagctgaagaaccgccgttcccttgaaagggaacacctggcattctgtggtgtttcgtgctgtcttaaataatggtgcatttattatgttcaagttatttcaggattgccatatgtgcaaacaaatcatgcaatgcagccaaggaatatatgttgttgttgttgttttaaacccattttttttttagaattttcattaatactgtagttatacaccatatgcctcattttatcatagcctattgtgtatgaaagatgtttgtacaatgaattgatgtttagtttgctttagtcatttaaaaagatattgtaccaggatgtgctattaagagcacgtatccattattcttctcaacccaagaacctgtttcctggaccagtgaccaaacctcatatgtgaaatggccaaagcacatgcaggctcctggttgttcctctcaaacctgtgctgaccaaagattagtaaccagttatacccagtattttgaggttttattgtttttttaataactaaaaagaaaaaaggaacagtgtaaatttgtaatcaagagtttgtgaggaaaaacttatggtttttggttttgtttgtttttgtaggtctgtgtatcaaatatgacacttttcttgcaataaagcttattttggggta

SEQ ID NO: 2201 - DNA, 2035 bp, Homo sapiens; identical to SEQ ID NO: 265

SEQ ID NO: 2202 - DNA, 1801 bp, Homo sapiens
ggcggacaaagcccgattgttcctgggccctttccccatcgcgcctgggcctgctccccagcccggggcaggggcgggggccagtgtggtgacacacgctgtagctgtctccccggctggctggctcgctctctcctggggacacagaggtcggcaggcagcacacagagggacctacgggcagaggacgttccagaagcatctggggacagaaccagcctcttccagggaggcctgggagctgggggtgtgtgtctggcagtccctgcagccctgggctctgcggcccctgcgtcctccgcttggctctgccactgcatctgagtgtcttctctcctcacggctccccgcatttctaactctttctgcctcctcgtctcaaagctgttccttcccccgactcaagaatccccggagcccggaggcctgcagcagaggagaggatgcagagggagcagacagagggatggggggagggtcgaggcagtgactaatggaccatgtggcttcccctctcaggagcggccatgaagaagctgatggtggtgctgagtctgattgctgcagcctgggcagaggagcagaataagttggtgcatggcggaccctgcgacaagacatctcacccctaccaagctgccctctacacctcgggccacttgctctgtggtggggtccttatccatccactgtgggtcctcacagctgcccactgcaaaaaaccgaatcttcaggtcttcctggggaagcataaccttcggcaaagggagagttcccaggagcagagttctgttgtccgggctgtgatccaccctgactatgatgccgccagccatgaccaggacatcatgctgttgcgcctggcacgcccagccaaactctctgaactcatccagccccttcccctggagagggactgctcagccaacaccaccagctgccacatcctgggctggggcaagacagcagatggtgatttccctgacaccatccagtgtgcatacatccacctggtgtcccgtgaggagtgtgagcatgcctaccctggccagatcacccagaacatgttgtgtgctggggatgagaagtacgggaaggattcctgccagggtgattctgggggtccgctggtatgtggagaccacctccgaggccttgtgtcatggggtaacatcccctgtggatcaaaggagaagccaggagtctacaccaacgtctgcagatacacgaactggatccaaaaaaccattcaggccaagtgaccctgacatgtgacatctacctcccgacctaccaccccactggctggttccagaacgtctctcacctagaccttgcctcccctcctctcctgcccagctctgaccctgatgcttaataaacgcagcgacgtgagggtcctgattctccctggttttaccccagctccatccttgcatcactggggaggacgtgatgagtgaggacttgggtcctcggtcttacccccaccactaagagaatacaggaaaatcccttctaggcatctcctctccccaacccttccacacgtttgatttcttcctgcagaggcccagccacgtgtctggaatcccagctccgctgcttactgtcggtgtccccttgggatgtacctttcttcactgcagatttctcacctgtaagatgaagataaggatgatacagtctccataaggcagtggctgttggaaagatttaaggtttcacacctatgacatacatggaatagcacctgggccaccatgcactcaataaagaatgaattttattatgatatttt

SEQ ID NO: 2203 - DNA, 9510 bp, Homo sapiens; identical to SEQ ID NO: 2159

SEQ ID NO: 2204 - DNA, 3037 bp, Homo sapiens; identical to SEQ ID NO: 1277

SEQ ID NO: 2205 - DNA, 1424 bp, Homo sapiens; identical to SEQ ID NO: 290

SEQ ID NO: 2206 - DNA, 1424 bp, Homo sapiens; identical to SEQ ID NO: 290

SEQ ID NO: 2207 - DNA, 6434 bp, Homo sapiens; identical to SEQ ID NO: 2163

SEQ ID NO: 2208 - DNA, 2547 bp, Homo sapiens; identical to SEQ ID NO: 56

SEQ ID NO: 2209 - DNA, 3965 bp, Homo sapiens; identical to SEQ ID NO: 276

SEQ ID NO: 2210 - DNA, 6596 bp, Homo sapiens
gcccagcctgcctggagaaaagtgtctgctcctagccaagatctcctcatcacaaaggaaaagagggcacccagcccttccccctccctcatcctcccatcccagtaaaccctgccaaattggaatcctggacttaatttaggagaaaggccctgtaaccaagatactgactgaacatggctggcggactcaggctggggtctgcagtgcagcattaatgggccgctgacatgaatatggagtagttttctctagcaaagtttgtgtctatttttttaaacattacatttgtcataatcattcatattgttgtgtgtagttgtagtttgttcattattattgctataaagaatttcattttatgaataaaatgcaatgtattcattcattatagtgttcacgaacattttgactgtttctattttgggtttatgaatattctagtaaatattttttagtaaattctcacttgttgttaagtacaatttatagaggataggaagtggcaacaacaatgagtgttccccttttgcctatgggaaaagagaggcaaagggagaattagtgttagtggcccaataaggcttctggtgcctgtttcctgattcttgggacagagcacattcttcctgctacaccattgaaaaaactggatccagatctctcttctgaaggaactagtaatacatgattagcagcacgggtgactttttaactatgcccttcaaaatccaatcattgaaaacttattgaattaaaaggaatcaggtaagttaaagaaactgggctaaatgggttttgctttctcagtcactcaacctggctcttgcctcttcagttttctggacacgtagaaagcccctttgttctctttcttctacaccagcagtttttatttgcctgtttcccagagtaatgtgggccatggagtcaggccacctcctctgggctctgctgttcatgcagtccttgtggcctcaactgactgatggagccactcgagtctactacctgggcatccgggatgtgcagtggaactatgctcccaagggaagaaatgtcatcacgaaccagcctctggacagtgacatagtggcttccagcttcttaaagtctgacaagaaccggatagggggaacctacaagaagaccatctataaagaatacaaggatgactcatacacagatgaagtggcccagcctgcctggttgggcttcctggggccagtgttgcaggctgaagtgggggatgtcattcttattcacctgaagaattttgccactcgtccctataccatccaccctcatggtgtcttctacgagaaggactctgaaggttccctatacccagatggctcctctgggccactgaaagctgatgactctgttcccccggggggcagccatatctacaactggaccattccagaaggccatgcacccaccgatgctgacccagcgtgcctcacctggatctaccattctcatgtagatgctccacgagacattgcaactggcctaattgggcctctcatcacctgtaaaagaggagccctggatgggaactcccctcctcaacgccaggatgtagaccatgatttcttcctcctcttcagtgtggtagatgagaacctcagctggcatctcaatgagaacattgccacttactgctcagatcctgcttcagtggacaaagaagatgagacatttcaggagagcaataggatgcatgcaatcaatggctttgtttttgggaatttacctgagctgaacatgtgtgcacagaaacgtgtggcctggcacttgtttggcatgggcaatgaaattgatgtccacacagcatttttccatggacagatgctgactacccgtggacaccacactgatgtggctaacatctttccagccacctttgtgactgctgagatggtgccctgggaacctggtacctggttaattagctgccaagtgaacagtcactttcgagatggcatgcaggcactctacaaggtcaagtcttgctccatggcccctcctgtggacctgctcacaggcaaagttcgacagtacttcattgaggcccatgagattcaatgggactatggcccgatggggcatgatgggagtactgggaagaatttgagagagccaggcagtatctcagataagtttttccagaagagctccagccgaattgggggcacttactggaaagtgcgatatgaagcctttcaagatgagacattccaagagaagatgcatttggaggaagataggcatcttggaatcctggggccagtgatccgggctgaggtgggtgacaccattcaggtggtcttctacaaccgtgcctcccagccattcagcatgcagccccatggggtcttttatgagaaagactatgaaggcactgtgtacaatgatggctcatcttaccctggcttggttgccaagccctttgagaaagtaacataccgctggacagtcccccctcatgccggtcccactgctcaggatcctgcttgtctcacttggatgtacttctctgctgcagatcccataagagacacaaattctggcctggtgggcccgctgctggtgtgcagggctggtgccttgggtgcagatggcaagcagaaaggggtggataaagaattctttcttctcttcactgtgttggatgagaacaagagctggtacagcaatgccaatcaagcagctgctatgttggatttccgactgctttcagaggatattgagggcttccaagactccaatcggatgcatgccattaatgggtttctgttctctaacctgcccaggctggacatgtgcaagggtgacacagtggcctggcacctgctcggcctgggcacagagactgatgtgcatggagtcatgttccagggcaacactgtgcagcttcagggcatgaggaagggtgcagctatgctctttcctcatacctttgtcatggccatcatgcagcctgacaaccttgggacatttgagatttattgccaggcaggcagccatcgagaagcagggatgagggcaatctataatgtctcccagtgtcctggccaccaagccacccctcgccaacgctaccaagctgcaagaatctactatatcatggcagaagaagtagagtgggactattgccctgaccggagctgggaacgggaatggcacaaccagtctgagaaggacagttatggttacattttcctgagcaacaaggatgggctcctgggttccagatacaagaaagctgtattcagggaatacactgatggtacattcaggatccctcggccaaggactggaccagaagaacacttgggaatcttgggtccacttatcaaaggtgaagttggtgatatcctgactgtggtattcaagaataatgccagccgcccctactctgtgcatgctcatggagtgctagaatctactactgtctggccactggctgctgagcctggtgaggtggtcacttatcagtggaacatcccagagaggtctggccctgggcccaatgactctgcttgtgtttcctggatctattattctgcagtggatcccatcaaggacatgtatagtggcctggtggggcccttggctatctgccaaaagggcatcctggagccccatggaggacggagtgacatggatcgggaatttgcattgttgttcttgatttttgatgaaaataagtcttggtatttggaggaaaatgtggcaacccatgggtcccaggatccaggcagtattaacctacaggatgaaactttcttggagagcaataaaatgcatgcaatcaatgggaaactctatgccaaccttaggggtcttaccatgtaccaaggagaacgagtggcctggtacatgctggccatgggccaagatgtggatctacacaccatccactttcatgcagagagcttcctctatcggaatggcgagaactaccgggcagatgtggtggatctgttcccagggacttttgaggttgtggagatggtggccagcaaccctgggacatggctgatgcactgccatgtgactgaccatgtccatgctggcatggagaccctcttcactgttttttctcgaacagaacacttaagccctctcaccgtcatcaccaaagagactgaaaaagcagtgccccccagagacattgaagaaggcaatgtgaagatgctgggcatgcagatccccataaagaatgttgagatgctggcctctgttttggttgccattagtgtcacccttctgctcgttgttctggctcttggtggagtggtttggtaccaacatcgacagagaaagctacgacgcaataggaggtccatcctggatgacagcttcaagcttctgtctttcaaacagtaacatctggagcctggagatatcctcaggaagcacatctgtagtgcactcccagcaggccatggactagtcactaaccccacactcaaaggggcatgggtggtggagaagcagaaggagcaatcaagcttatctggatatttctttctttatttattttacatggaaataatatgatttcactttttctttagtttctttgctctacgtgggcacctggcactaagggagtaccttattatcctacatcgcaaatttcaacagctacattatatttccttctgacacttggaaggtattgaaatttctagaaatgtatccttctcacaaagtagagaccaagagaaaaactcattgattgggtttctacttctttcaaggactcaggaaatttcactttgaactgaggccaagtgagctgttaagataacccacacttaaactaaaggctaagaatataggcttgatgggaaattgaaggtaggctgagtattgggaatccaaattgaattttgattctccttggcagtgaactactttgaagaagtggtcaatgggttgttgctgccatgagcatgtacaacctctggagctagaagctcctcaggaaagccagttctccaagttcttaacctgtggcactgaaaggaatgttgagttacctcttcatgttttagacagcaaaccctatccattaaagtacttgttagaacactgaaagactgaatttggtgatttttgacagtctctgtggcttctgtcactgtgattgaaacagaaaatacttagggggtgagtgagtatagtatgtatttgtctagcctttgtagaacctacaagtttttgttttagagatgaggaagctgttccagaggaagcatcaaagagtgctgggtaccaccctagaaaaggagctgtcgcataaatgacaaaaattttctgagtgtcaagaaaatttgccagagggaaatagaagtctgagacgagactcaaacctgtccagtgggccaggggaagtaggaccatatcttatggggcctttttggcagtggtggtgtgaaaggtctagttgcaactttgggggcttccttataggatggagtcattctttctggtattttacagcaatattcctttgttacatgcaaatttgagccaaatattggttagagagcacagataagtgataaattttagattgggtaagatggcccaccccactgcaatatccataatattgtaccacatggcaagtggagaacagaagaggtatcaaggagagaaaagatgataactatgtactgttttacactttaaaaagcattttaattcttgattgcgtttggattacctcagggcaagtcattttacatttgagtaatgttatccatttatacatttgagtgaacaaaagcttatggacattaagtaacttcatccaagatccctcaggtagaagttgagcagggattcatgtattcatctgtttgactccaaatacctatttcatcctcatatatcatggaaacatccactaatctccatccaccttacccatattgattccaacttttctgtctgtccagcaatctgtctgtctaggtagcaatctcttgaagataaaatgtagaaactcacagagctggtgttcagttacgatataagtttggaggagaaaacacaatccagaagctatgattcctcttgtttttccatggtcaatgggtttctggagagctttactgagaatctcagaaataaagtgtgggtggaagggggatttagatggctagttatccaagagttagtgtttaggccattgcagaatcaatgatttaacagcagcagaactgttttggcctgcagttaacatgaatgttaatgaagaccaagtacatgctaggaattccagtcaattaatggttataatttacatgcaactaggaggttcttagcttggtctcagttataactctaagagactaggagaggtagatgagatggaatgcatttcttcttattttgtaatcctgctccaggtcaaggaatagaaactcagagcccatgtatttaagaaagaaatgtatttttgtggtaagtttgctccaagtagggatacaagtatctatttttgacaatcaagtgacattgccatctattcagttgctcaagctggaaattatcagtgtcaacacatc

SEQ ID NO: 2211 - DNA, 1925 bp, Homo sapiens; identical to SEQ ID NO: 248

SEQ ID NO: 2212 - DNA, 2698 bp, Homo sapiens
gggtggggggagcggtgatctgagctccgagcagctggtcttcgcggctcgctccctccttcgcgctctctcgctccctgccgccgcccgcagggctgcggggctcggtggcatctcccgggcgcggcccgcagtccttgcccctgcctccgggccgctcccgcccccggcgccgctcgctcccccgacccggactcccccatgtatgacgactcctacgtgcccgggtttgaggactcggaggcgggttcagccgactcctacaccagccgcccatctctggactcagacgtctccctggaggaggaccgggagagtgcccggcgtgaagtagagagccaggctcagcagcagctcgaaagggccaagcacaaacctgtggcatttgcggtgaggaccaatgtcagctactgtggcgtactggatgaggagtgcccagtccagggctctggagtcaactttgaggccaaagattttctgcacattaaagagaagtacagcaatgactggtggatcgggcggctagtgaaagagggcggggacatcgccttcatccccagcccccagcgcctggagagcatccggctcaaacaggagcagaaggccaggagatctgggaacccttccagcctgagtgacattggcaaccgacgctcccctccgccatctctagccaagcagaagcaaaagcaggcggaacatgttcccccatatgacgtggtgccctccatgcggcctgtggtgctggtgggaccctctctgaaaggttatgaggtcacagacatgatgcagaaggctctcttcgacttcctcaaacacagatttgatggcaggatctccatcacccgagtcacagccgacctctccctggcaaagcgatctgtgctcaacaatccgggcaagaggaccatcattgagcgctcctctgcccgctccagcattgcggaagtgcagagtgagatcgagcgcatatttgagctggccaaatccctgcagctagtagtgttggacgctgacaccatcaaccacccagcacagctggccaagacctcgctggcccccatcatcgtctttgtcaaagtgtcctcaccaaaggtactccagcgtctcattcgctcccgggggaagtcacagatgaagcacctgaccgtacagatgatggcatatgataagctggttcagtgcccaccggagtcatttgatgtgattctggatgagaaccagctggaggatgcctgtgagcacctggctgagtacctggaggtttactggcgggccacgcaccacccagcccctggccccggacttctgggtcctcccagtgccatccccggacttcagaaccagcagctgctgggggagcgtggcgaggagcactccccccttgagcgggacagcttgatgccctctgatgaggccagcgagagctcccgccaagcctggacaggatcttcacagcgtagctcccgccacctggaggaggactatgcagatgcctaccaggacctgtaccagcctcaccgccaacacacctcggggctgcctagtgctaacgggcatgacccccaagaccggcttctagcccaggactcagagcacaaccacagtgaccggaactggcagcgcaaccggccttggcccaaggatagctactgacagcctcctgctgccctaccctggcaggcacaggcgcagctggctggggggcccactccaggcagggtggcgttagactggcatcaggctggcactaggctcagcccccaaaaccccctgcccagccccagcttcagggctgcctgtggtcccaaggttctgggagaaacaggggaccccctcacctcctgggcagtgacccctactaggctcccattccaggtactagctgtgtgttctgcacccctggcaccttcctctcctcccacacaggaagctgccccactgggcagtgccctcaggccaggatccccttagcagggtccttcccaccagactcagggaagggatgccccattaaagtgacaaaagggtggggtgtgggcaccatggcatgaggaagaaacaaggtccctgagcaggcacaagtcctgacagtcaagggactgctttggcatccagggcctccagtcacctcactgccatacattagaaatgagacaatcaaagcccccccagggtggcacacccatctgtttgctggggtgtggcagccacatccaagactggagcagcaggctggccacgctcgggccagagagagctcacagctgaagctcttggagggaagggctctcctcaccctgccaggaagcttcttaacatgtgacaggaccagggaccaggagcatggtgaagccaagtggcagatgggagccaacctggatgggggtttggggaaggagggcatgtgtagcagagaacttaggggggcctccttgcctttctcattcttttgccctgcatcctgtcatttctgttcttgtccctcatacatctttggagaaccgggctccagactttgttccctgactcatagctgccgcttgttaggttagggttagatggggagagacagggcacagaggacctgtctccccggctactcttgccttatggctctagtgtgtgacctacagagcatgctccacaagcccctgcctcacctcactgtcatcactaataaacatcatgcacagtc

SEQ ID NO: 2213 - DNA, 2244 bp, Homo sapiens; identical to SEQ ID NO: 340

SEQ ID NO: 2214 - DNA, 3574 bp, Homo sapiens; identical to SEQ ID NO: 2112

SEQ ID NO: 2215 - DNA, 3557 bp, Homo sapiens; identical to SEQ ID NO: 2169

SEQ ID NO: 2216 - DNA, 652 bp, Homo sapiens
caggacacgtgggtgggggaagctgagcgctgagaccaagggctaaagctgggaggtgagtctgtcaccttgagccgggcgagcgctgtgggccaagcaggggttgcagggtagtaggagtgcagtgcagactgaaaaaatgcagaccgccggggcattattcatttctccagctctgatccgctgttgtaccaggggtctaatcaggcctgtgtctgcctccttcttgaatagcccagtgaattcatctaaacagccttcctacagcaacttcccactccaggtggccagacgggagttccagaccagtgttgtctcccgggacattgacacagcagccaagtttattggtgctggggcagccacagttggtgtggctggttcaggggctggcattggaaccgtgtttggcagcttgatcattggctatgccaggaacccgtctctcaagcagcagctcttctcctatgccattcttggctttgccctgtctgaggccatggggcttttctgtttgatggtcgccttcctcatcctcttcgccatgtgaggctccatgggggggtcaccggcctgttgctactgcaactccacaccattcttggtgctggggtgtgttaagctttaccattaaacacaacgtttctctaaa

SEQ ID NO: 2217 - DNA, 1594 bp, Homo sapiens; identical to SEQ ID NO: 2100

SEQ ID NO: 2218 - DNA, 6077 bp, Homo sapiens; identical to SEQ ID NO: 2171

SEQ ID NO: 2219 - DNA, 5335 bp, Homo sapiens
gcttctctccatcttgtgattcctttttcctcctgaaccctccagtgggggtgcgagtttgtctttatcaccccccatcccaccgccttcttttcttctcgctctcctacccctccccagcttggtgggcgcctctttcctttctcgcccactttcatttttatttattcatatttatttggcgcccgctctctctctgtccctttgcctgcctccctccctccggatccccgctctctccccggagtggcgcgtcgggggctccgccgctggccaggcgtgatgttgcacgtggagatgttgacgctggtgtttctggtgctctggatgtgtgtgttcagccaggacccgggctccaaggccgtcgccgaccgctacgctgtctactggaacagcagcaaccccagattccagaggggtgactaccatattgatgtctgtatcaatgactacctggatgttttctgccctcactatgaggactccgtcccagaagataagactgagcgctatgtcctctacatggtgaactttgatggctacagtgcctgcgaccacacttccaaagggttcaagagatgggaatgtaaccggcctcactctccaaatggaccgctgaagttctctgaaaaattccagctcttcactcccttttctctaggatttgaattcaggccaggccgagaatatttctacatctcctctgcaatcccagataatggaagaaggtcctgtctaaagctcaaagtctttgtgagaccaacaaatagctgtatgaaaactataggtgttcatgatcgtgttttcgatgttaacgacaaagtagaaaattcattagaaccagcagatgacaccgtacatgagtcagccgagccatcccgcggcgagaacgcggcacaaacaccaaggatacccagccgccttttggcaatcctactgttcctcctggcgatgcttttgacattatagcacagtctcctcccatcacttgtcacagaaaacatcagggtcttggaacaccagagatccacctaactgctcatcctaagaagggacttgttattgggttttggcagatgtcagatttttgttttctttctttcagcctgaattctaagcaacaacttcaggttgggggcctaaacttgttcctgcctccctcaccccaccccgccccacccccagccctggcccttggcttctctcacccctcccaaattaaatggactccagatgaaaatgccaaattgtcatagtgacaccagtggttcgtcagctcctgtgcattctcctctaagaactcacctccgttagcgcactgtgtcagcgggctatggacaaggaagaatagtggcagatgcagccagcgctggctagggctgggagggttttgctctcctatgcaatatttatgccttctcattcagaactgtaagatgatcgcgcagggcatcatgtcaccatgtcaggtccggaggggaggtattaagaatagatacgatattacaccatttcctataggagtatgtaaatgaacaggcttctaaaaggttgagacactggtttttttttttaatatgactgtcttaaagcattcttgacagcaaaacttgtgctctctaaaagaagccttttttttttttctaggaggcaggttgggtgtggaatgctaatacagagcaggtgtgaaaacagagaaaactacaggtttgctgggggtgtgtatgtgtgagtgcctctaatttttttggtgactgggcagtgcacaccagatattttttctttgaatacagatcaccatggtgctacaactttttttttttttttttttttttttttttttttttttaagaaactcaaagaggcatttttatgaataaagtgaccttccccaaggctgacaagccagggttgatgagtgcatagtggaatagctttggatactcctctgggggatgacatgtaccaaggagaggaccgcagtggccagaggagacatgatttggctttgctggagcgccagtgtgctgtggcctttccccgcctcccaccctagtacccacgttttgctccacactccttgaccgcaggggctcggacacaaacccctgtcaccaggagagtcagtcagcactacttgggagggctaaagggaaatttggaaataaaattccaaagtttggagtaaaaaaattcaagtgttgattttatattctttccctttctgacacagcctaaagcgtagggggaacatgtgtttatctgtgggagataaacaagatggagtcccaaagactttaacaaaatatttttttaaaaatccactagaatagaaaatacattatttagatatactttatgctgagagtgagtatatatgcttgtcctatttaaacttgtgagaaaaagtggtatcccttgatacatttagaaatatgggggctatcttgtttcattgtgggggtggggcagaaggagaataaatgcaggatgaccctgttgaaggaatcttagcatggccaacaggggacgtttccagtcgattaccaggaaatgcaagccttggggtttctactggtggtggggctgtcatgaactttaaaatccaaagcctagacaaggaaaagtgttagaccaattgaaaagcaatccagccctttttttttttttttttttggctttgcacgacatgtcaacagaaaccatgcctttcaatataagaaataaatgtgatgatcatgtaaaatgtgaaaaattgaaagcattccagcaaaataagaattttttatatatttgttttttaagatgtatatgttaaaaaaagagaaggtcgcattatggacagacttcgtgaatgggaatttgcttagaattgtgagtagttctgaattagaaaagtatgtgaaggaaaggcagctgtaaacgtattgtgccctggagagttgtacacatgttgaaatgtaatctgggcttacctgatccatttggagtggatgtcactgccgagtctgttctcacatggaaccatgtgtgtggggttgccagcctcacagatacaatcaatcctattcccctctgacataaggaactcctctggagtggcagagtcttatcacagaaggcagccaccatttcaccaaaacaaaagttcacggcattcaattcctttttcctttagctatttatatatgcagtactctcagtcatatgcagaaatacttttttttttttaattaatagttacaggcttgttggtccagtgggatttgggtagggggagaaagataccttctaaaatggatcaatagaaccaaaataatacagcatgttctataaccacaaggaaatcaaatgatcctgtcatgattccagttagtcataactatgttagcagtgctaaatgcattttagaaatggtgacttctgtggttttcctagcatttgtctctaacaaatggtgaaataattactcatggccctctctgccattgtctttcattttttcacagtgaaattagacccctttacttcaccattctgccactgcaaattaagtataaagaaaatagcaagagtgtccacaccagtagacagtaagcttctctacctgtaagtgatgaaatcatagctaatgcacttgccatggagttttcaagatgattggtgtcagacagttttcactttgtttaaaaagtgttggtggccttttgtggtggtgttacaatcctctgggggcttaggaggatgttgatgcaacttttagaagcttttaatttcaaaaacaactcaaaaatctgaaggacagtcatagctgccactcagccccagttagtcaaaccccagtgacctttgcccctggttgccaagggctttgcaacatcaagcagggaaataaggatctgtctgtttagtggataccgtgtatcctttaatagaccaggtaacagttcgtgttagtttagactattgttttgtactgtactttcttgggtggcagaggaaagaaaagtaaaacattaaaaaaaaaaaaaaaactgcgttctttaaattctgtattattagcaacctctgttgtacatagtgtttgataataaagtattaatttgattcttatgtcttttgtaagtgagaacaatagactttcaggatacaaaacatgcattgaggctttgaaacatccaatgtgtaccatggctgaaaaaaagagtcacaagtggctgagacactgctccatacaggactcatgtgtggtcattgcccacccaatcttatgactccatcatcttgggacctggaacaacatgacttttttgatcgatattttgtcctcggtgttttcaaggtctgatgttggagccctgtggcccaccctcccttctccaccagcatgttggtttgaaaaggatagggaatttagaaacagttctgtactttggtttggtttggttttctgtttgtgattgttttcatggactgttttattttttcccaggaagagtctttatcaatatcatgtgcagctcactcatggaaatggttgcaaaccaatcagtgtaggaagcttaaatggggctgtttccctctctgtgtcgttgtgaaaggaagagtcacacagtacctgtggattttcagggactctgtttttctccggtgccttagcaacggcagcagccatttgtattattttcaaataattagaaaaacagttttcaactcctcctttccattcattgctctcagagttgtggtcactgacttttcttttgaaaaccgcctccaccaacacccccgtttgcctacaccaccccccttttacttagtatgtttattttttgtgtgtctcttgccttcctcccacgttttatttcccctcagagctgtgaatgggcaggtctgtctctggtttggcatcactgagtttttcccatgcattggccccagggctgctaggatgtgagacaaatctccctacaatgggcttgctcccattgtctgtacagtttaatagatgctggcatgtcggaggttacccatgagtcaaaatccgctctccatgcttactcttgacaccccattgaagccactcattgtgtgtgcgtctgggtgtgaagtccagctccgtgtggtcctgtgcttgtactgccctgctttgcagttcctttgcacttactcatcgagtgctgttttgaaatgctgacattatataaacgtaaaagaaaatgtaaaaaaaaaaaacccacacacaaacaaacccatacgatctgtatttgtatatacacgtgtccgtacaagtataactaaataaaaattaaagattttcatcattttaattgga

SEQ ID NO: 2220 - DNA, 2818 bp, Homo sapiens; identical to SEQ ID NO: 868

SEQ ID NO: 2221 - DNA, 5818 bp, Homo sapiens
gaagttgcctgaagtgaaggagggggtagcggctgcagaagctaaagcttccgccaaacaaaagaggacagcacttccggtcacgccatcgttgctgccttcttcgtcaagcgggactgactttggctcttcagtgtttgcgcatgcgcgtaacgtcctgaggcggtgggtggtatattaggcgaagaggcggggtcgcccaagctgccgcgctggcattttctcctggacaaggagagagtgcggctgctgagagccgagcccagcaatcccgatcctctgagtcgtgaagaagggaggcagcgagggggttggggttggggcctgaggcaagagcccccaggctccgctcttgccagagggacaggagccatggctcagaaaatggactgtggtgcgggcctcctcggcttccagaatcctgacgcttgtagagcagtctgtcaccccctcccccagcctcctgcctccaccctccctctttctgcattccccactctgtgcgaccccccttattctcaactccgcgatccgcctgccgtcctgagctgctactgcacgcctcttggagcgtccccggctcctgctgaggcctccgtagaagacagcgccttgcttatgcagaccttgatggaggccatccagatctcagaggctccacctactaaccaggccaccgcagctgctagtccccagagttcacagcccccaactgccaatgagatggctgacattcaggtttcagcagctgccgctaggcctaagtcagcctttaaagtccagaatgccaccacaaaaggcccaaatggtgtctatgatttctctcaggctcataatgccaaggatgtgcccaacacgcagcccaaggcagcctttaagtcccaaaatgctaccccaaagggtccaaatgctgcctatgatttttcccaggcagcaaccactggtgagttagctgctaacaagtctgagatggccttcaaggcccagaatgccactactaaagtgggcccaaatgccacctacaatttctctcagtctctcaatgccaatgacctggccaacagcaggcctaagacccctttcaaggcttggaatgataccactaaggccccaacagctgatacccagacccagaatgtaaatcaggccaaaatggccacttcccaggctgacatagagaccgacccaggtatctctgaacctgacggtgcaactgcacagacatcagcagatggttcccaggctcagaatctggagtcccggacaataattcggggcaagaggacccgcaagattaataacttgaatgttgaagagaacagcagtggggatcagaggcgggccccactggctgcagggacctggaggtctgcaccagttccagtgaccactcagaacccacctggcgcaccccccaatgtgctctggcagacgccattggcttggcagaacccctcaggctggcaaaaccagacagccaggcagaccccaccagcacgtcagagccctccagctaggcagaccccaccagcctggcagaacccagtcgcttggcagaacccagtgatttggccaaacccagtaatctggcagaacccagtgatctggccaaaccccattgtctggcccggccctgttgtctggccgaatccactggcctggcagaatccacctggatggcagactccacctggatggcagaccccaccgggctggcagggtcctccagactggcaaggtcctcctgactggccgctaccacccgactggccactgccacctgattggccacttcccactgactggccactaccacctgactggatccccgctgattggccaattccacctgactggcagaacctgcgcccctcgcctaacctgcgcccttctcccaactcgcgtgcctcacagaacccaggtgctgcacagccccgagatgtggcccttcttcaggaaagagtaagagctgtaactccccagtcacttttcccctctcttgctcttttctttgtcatcctctcatctgtaattcaaccaagtttttttgtaaatattttataagtttaatgatttcctttttccctcccaggcaaataagttggtcaagtacttgatgcttaaggactacacaaaggtgcccatcaagcgctcaggtatgcatccagtgtcccctccccaagctctgcccttcccttcactccatgctctgtcagcattcttctgcttgtagctctgcccttcccttcactccatgctctgtcggcattcttctgcttgtatgacccttccccttctatcccctcctttccatggttggctctttccacccttgaggaccttgactgtgctacccccagcagggctggcaaagggactgctgctctgtggcccccgctcggctcagatggctccctcctctctcctacagaaatgctgagagatatcatccgtgaatacactgatgtttatccagaaatcattgaacgtgcatgctttgtcctagagaagaaatttgggattcaactgaaagaaattgacaaagaagaacacctgtatattctcatcagtacccccgagtccctggctggcatactgggaacgtaagatgggaaagaaggtggaacatggcctttctcagtggtgctttttttctaggagtttcacgtagatcagggtccagggttcagggtcacatagcaggtcatgggcagagctggggtataattctcccctagctgaggaatattggggaggctagatgggcaagctggttggggtctctcatgcaaatggctactgaaaatatattctttctatattcccttaggaccaaagacacacccaagctcggtctcctcttggtgattctgggtgtcatcttcatgaatggcaaccgtgccagtgagggtgagtggctggacctgcagctgggggttggccacagcctgatttccatgcttattttccgtcccttgtctccccttgcctcccattgcagctgtcctctgggaggcactacgcaagatgggactgcgtcctgggtatgattgggctctctcatctcttgcctgtttgtgccatcctttggcaacagtggatggtcccaggattgcattaacctgggggtctggagggtttggtttggggatgttcagagcccaaagatgtgacctgggtggatggggaaacagttctgaactctctgcctcttttctcatctctgacctctgttctggaaagctctttgggcatggtaatagcctctgattgtgggtttcctttttttaccttcagggtgagacatcccctccttggagatctaaggaaacttctcacctatgagtttgtaaagcagaagtaagtgatgcctaaggggcttttcctgcttcttatgattctgcctgtgtgctggtcagctttagaaagcccttcctggctggatacaatggctcatgcctgtaatcccagtactttgggaggctcaggtgggcagatcgcttgagcccaggagttcaagaccagcctgggcaacataacgaaaccccatctctacaaaaaaatacaaaaattagccaggcgtggtgacatgcacctgtagtcccagctacttgggaggctgaggtaggggagaatcatctgagcccaggaagttgaggctgcagtgagctgtgatcatgccactgcactccaacctgggcaacagagtgagaccctgtctcaaaaaaaataaaagaaagcccttctcaagctcgtttcttacactatacttgtgcatatgtgtttctgtgcatacagaaacacttatgtcctcaggagtatttattgcatatactcctcatggttaaattctttattttttatttttttattttttgagacggagtttcgctcttgttgcccaggctggagtgcaatggcgtgatctcggctcaccgcaacctctgcctcctgggttcaagctattctcctgcctcagcctcttgagtagctgggattacaggcatgtgccaccacgcccacctaattttgtcttcttagtagagacggtgtttctccatgttaggctggtctcaaactcccgacttcaggtgatctgcctgccttggcctccagaagtgctgagattacaggcgtgagcgaccgtaccgggcgaattcttttgtttgtttttttcgagactgagtctcactctgttgcccatgctggagtgcagtggtgcaatcttggctcgcttgaacttccacctcccaggttcaagcaattcttgtgcctcagcctcccgagtaactggaacttcaggtgcgtgccaccgtgcccggctgtttttgtatttttagtagagatggggcttcaccacgttggccaggctggtctcaaactcctgacctgaagcaatccacccacctctgcctcccaaagtgctgggattacaggtgtgagccaccacacccggccagaatttttctaatttttctacttttctaagcagttgtcttgcaagtgaagcccatccaccatccccacagtagacattcccaaggctgggccaggctgacacttttgcactgcattgtactcatttcaatggacctctgtggctcactgacaagattacaagaatctggagctagagctcaggcagaaggagtgaaaggaaatgttgtcctttctgtgaccctatacaagcctcgcctgcatctctagtgagtgcttagcgttctagtgcaggaatttaaggcttgatgattaaggggtaaataccctgatggtgttcaggaatgagcccaagggggagttgctatctgaaatctgttaaaaaatgtaagattatttttcattagtggactaccattctgcctgggtaggtagacacaaagactgttttgctctttcagatacctggactacagacgagtgcccaacagcaaccccccggagtatgagttcctctggggcctccgttcctaccatgagactagcaagatgaaagtgctgagattcattgcagaggttcagaaaagagaccctcgtgactggactgcacagttcatggaggctgcagatgaggccttggatgctctggatgctgctgcagctgaggccgaagcccgggctgaagcaagaacccgcatgggaattggagatgaggctgtgtctgggccctggagctgggatgacattgagtttgagctgctgacctgggatgaggaaggagattttggagatccctggtccagaattccatttaccttctgggccagataccaccagaatgcccgctccagattccctcagacctttgccggtcccattattggtcctggtggtacagccagtgccaacttcgctgccaactttggtgccattggtttcttctgggttgagtgagatgttgggtaggtacatcactttggattgggcagttagggtctctgggggatatagggtccatggggttgtatttatgtgcatgagctagaagtattaggaaactcattgtagggagatgaggaaagtatggggcagcactctttggtatgtatattccttattatttgatatatatcattgatttttttacttcttctttcttatgttcacagatattgctatcaatcgcagtagtctttcccctgtgtgaggctgaagcctcagattccttctaaacacagctatctagagagccacatcctgttgactgaaagtggcatgcaagataaatttatttgctgttccttgtctactgctttttttccccttgtgtgctgtcaagttttggtatcagaaataaacattgaaattgcaaagtgaatta

SEQ ID NO: 2222 - DNA, 483 bp, Homo sapiens; identical to SEQ ID NO: 2173

SEQ ID NO: 2223 - DNA, 1881 bp, Homo sapiens
gggcggcggcgcgcgggtgcgatcgcggagctgtgaggcgcaggcagggctctggggcacctagagaccggggccggagacgtggcagccgccctgcccgccagaaagtttcctagaagtttgctgggcgcgggcgcacgactgactggctggaccatgaacgtgttccgaatcctcggcgacctgagccacctcctggccatgatcttgctgctggggaagatctggaggtccaagtgctgcaagggcatctctgggaagagccagatcctgtttgctctcgtcttcaccaccaggtacctggacctgttcaccaacttcatctccatctacaacacagtaatgaaggtggtttttctcctctgtgcctatgttacagtgtacatgatatatgggaaattccgtaaaacttttgacagtgagaatgacacattccgcctggagtttcttctggtcccagtcattggcctttccttccttgaaaactacagtttcactctgctggagatcctctggactttctctatctatctggaatcagtggctatcctgccccagctcttcatgatcagcaagactggagaggctgagaccataactactcactacctgttctttctgggtctgtaccgggcactctacctggctaactggatcaggcggtaccagactgagaatttctatgaccaaattgcagtcgtgtctggagtagtacaaaccatcttctactgtgacttcttctacttgtatgtgaccaaaggtaggtcctgggatgacagcaatgctgacactggcctaaggagttactcatccatttaataagtattccagcagatacagatgtgaacagtcaagtctctgccatccacaatgcttgtgttctaatgcaagaagacaaatattttcaataaagaaacaaatgccataaatccttaagggaaagaagttaagtcttccaatgccaatctgaggaccttcagagacagtctacgccttaacaagcacatgaaggaaactattttgaatgttctctttggcaacttatccataatttgggatcaaatgttaaaaccagaaaagtgtttagtgtggatttcagcaaaacctgatcatcccacccagaagaccttctcatcaatagatcgcccttaaagacccattgtaaggtcataaaaaacctcggccacctgcacaaagatggtgcctcactgcaacaagaaaccttaaggtgtcttaccgacgaaataaaaaacataaatgattgttctccaaggcctgagggcaagactcatgatgagcaagtcaaccccaatctggaacaatgtccctcctcttagaatgtcccaactaaagaccagttaaaatattagggtacgttcttgtgaatttccactttccaggtagatgaccaaatttaggtggtcaagatataaaggtgtcagctagttttaagtgtgaaacttatttcactttcacactgccttcaggccagaagcaaaccaaatttaccaggtttggctggaggagttttgtgactcatcttttactggtttgaattttttcaaaccagtggctgatacctgccttgtacttagtaccttaataccaataacctaatggtacttaggcgagtaccatttgcacaatcactgttttacttatgagcagatacagatatatccaaacccttacctactaggtatcctgctagggttttcaattccaattcttgtattaagttttttcctttcagttttaggtgcgaaagtaatcagtcaatccaatatcccccatctttgtcttgaaacaaaaactgttttaagacgtctacgttgaattattcagagaattaagcaataaaagctcacaccttattgtcaa

SEQ ID NO: 2224 - DNA, 1889 bp, Homo sapiens; identical to SEQ ID NO: 255

SEQ ID NO: 2225 - DNA, 4093 bp, Homo sapiens; identical to SEQ ID NO: 93

SEQ ID NO: 2226 - DNA, 3114 bp, Homo sapiens; identical to SEQ ID NO: 2177

SEQ ID NO: 2227 - DNA, 6335 bp, Homo sapiens; identical to SEQ ID NO: 300

SEQ ID NO: 2228 - DNA, 10553 bp, Homo sapiens
gtcacatgagccgcgcgcccgcttcgctccccctcctccccggctgggctgtgtgaatgaagctctgccggctacgtggggcgctcactcaacttggtgtcctggacgccagagccgaccgagcgcgctgcccaccggcggcggacacgggctccgccgctccggacctcggcgacagagcaaatcagttgcctggagttcccagtgaagttgtacctgtgcccgtgcgataacgtcagtggaagctgccccgagtaagtgagggaaatctagaagtttggagcataaaaaaccagcacgaatcaactttacataaacttcatacatttattagcaactgctcgggtttaacttcagggatgttaaatttcgcctagtcccacgggacgatgatcattacttcttaactgcacgcgaaataggagaagaaaaaaggcaaatcaaaacagactgtcccaggtctcagagaagtcatcggagcgctttttcctgctgaattcaccctaggagtttgtttggggctttagccccttggagaaaacagggccacatagctgcctttctatcaagtctccctacaaaactgagaggctctgggaaactcagcctgtgaccccagcgtgggtgaagataggatcaagatggccatgtggcagggtgccatggataacagaggctttcagcaggggagttttagtagcttccagaacagctccagtgatgaagacctgatggacattccagcaaccgctatggatttctccatgagagatgatgttcctcccttagaccgagaagtaggagcacattctgaccgccagggaacactggtagttctttaggtggcgtttgttgctgtgaaaggcagagaatgcagcaagtgcccttctaaagcacttcagactggggcttcttttgtaaaagctccccaacctgaatgaccaaatgcgggctgccaaggttatttcttccttgaggcagaaaaaaagaaaactgtgattgaagtgatgtgatatggctgcaagtgcctttgacccttttgtctcccttccataaactgaaatacctaagctgctccaacctcctttttgtcttttgtttcataaatcctttcccattgcacatcaactcctgtctctctttgtactgtcactctcatctgttgctttccattcacactgcctttagccactcatcattttgtgcctacaccacagaaacctctgaatgtaatggatgttcctaccagaggacaagtcgtacaatggtggaggaataggttcttcaaataggatcatggacttcttggaggagccaatccctggtgtagggacctatgatgatttcaatacaattgattgggtgagagagaagtctcgagaccgggataggcaccgagagattaccaataaaagcaaagagtcaacatgggccttaattcacagtgtgagtgatgctttttccggctggttgttgatgctccttattgggcttttatcaggttcgttagctggtttgatagacatctctgctcattggatgacagacttaaaagaaggtatatgcacagggggattctggtttaaccatgaacattgttgctggaactctgagcatgtcacctttgaagagagagacaaatgtccagagtggaatagttggtcccagcttatcatcagcacagatgagggagcctttgcctacatagtcaattatttcatgtacgtcctctgggctctcctatttgccttccttgccgtatctcttgtcaaggtgtttgcgccttatgcctgtggctctggaatccctgagataaaaactatcttgagtggtttcattattaggggctatttgggtaagtggactctggttatcaaaaccatcaccttggtgctggcagtgtcgtctggcttgagcctgggcaaagagggccctctagtgcacgtggcttgctgctgtgggaacatcctgtgccactgcttcaacaaatacaggaagaatgaagccaagcgcagagaggtcttgtcggctgcagcagcagctggtgtatctgtagcctttggagcacctataggtggagtattattcagccttgaagaggtcagctactattttcccctcaaaacattgtggcgttcattctttgctgccttggtggcagcattcactctacgctccatcaatccatttgggaacagccgcctggtactattttatgtggagtttcacaccccatggcatctctttgagctcgtgccattcattctgctgggcatatttggtggtctgtggggagcactgtttatccgcacaaacattgcctggtgtcggaagcgaaagaccacccagttgggcaagtatcctgttatagaggtactcgtcgtgacagccatcactgccatcctggctttccccaatgaatacactcggatgagcacaagtgagctcatttctgagctgtttaatgactgtggccttctggactcctccaagctctgtgattatgagaaccgtttcaacacaagcaaagggggtgaactgcctgacagaccggctggcgtgggagtctacagtgcaatgtggcagctggctttaacactcatactgaaaattgtcattactatattcacctttggcatgaagatcccttctggcctctttatccctagcatggctgttggtgctatagcaggtcgacttctaggagtaggaatggaacagctggcttattaccaccaggaatggaccgtcttcaatagctggtgtagtcagggagctgattgcatcacccccggcctttatgcaatggttggggctgcagcctgcttaggtggggtgactcggatgactgtttctcttgttgtcataatgtttgaactgactggtggcttagaatacatcgtgcctctgatggctgcagccatgacaagcaagtgggtggcagatgctcttgggcgggagggcatctatgatgcccacatccgtctcaatggatacccctttcttgaagccaaagaagagtttgctcataagaccctggcaatggatgtgatgaaaccccggagaaatgatcctttgttgactgtccttactcaggacagtatgactgtggaagatgtagagaccataatcagtgaaaccacttacagtggcttcccagtggtggtatcccgggagtcccaaagacttgtgggctttgtcctccgaagagatctcattatttcaattgaaaatgctcgaaagaaacaggatggggttgttagcacttccatcatttatttcacggagcattctcctccattgccaccatacactccacccactctaaagcttcggaacatcctcgatctcagccccttcactgtgactgaccttacacccatggagatcgtagtggatattttccgaaagctgggactgcggcagtgcctggttacacacaacgggcgattgcttggaatcattaccaaaaaggatgtgttaaagcatatagcacagatggcgaaccaagatcctgattccattctcttcaactagaatcatagagttctggatgtaaagcgggaaggacattacagaccatggatatgttgtattaactgggtacccaaaacacattttccatatttggatggtgaagtcacattagtgtgttgtctctttcctacaagttaaccagttgcactacataatctctggaaattaattttctctttaggagaaattatagttaggcttccatgatgttacattaggaagatatcatgaaagaataaataagattgctatggtttaattatatttgctttttaaaagatttttttaacttaaaaagtagttagccaatatgcaatcactgaaaactatgcaagagaaattccaaccgtcctgacctataacctgtaggaaaccgacgaaaaagtcactcttttgggatctaactgttgttactggaagacgaagtgtaaactaaggggctttgcttttcaaaccagagaaaggaaagccagaaggaaaagagtaatggtattttctagactgtgaagattcagttcaaatgttatccttgttcctgttacaatatttagcattattagtttgttatgtgtgtatgtttatgttaattttaatttctgattataagacaatgctgctttggttaatctcttctaaatgaatttagagagattgacttttatagcttgcttgttgctggtactcttttgaagtgcacaaagataagttatagagctttctccttgtctgcaaaaacggtaattttccaggtggcatttgttagctggtagacaaggactttgccgtgaatttgttagtagcaaggaatgatttcttccagcttccttgaaatgaataattagtaaacttctaagcaaagtcaatgactaggagtttcacatgtttgtgaggtcctaactaattctcttacccagatgccacctccatgaatgatggtgctttaggcttctggaatatgtaaaaacagcaaagggaaccaagtctagactgcatactggtaaaccagggaagactcagaactgcatatgcatcctcatgcattcctttgtaaagaccaccagtactaaaataactggacactcattgtacctcccagcgataagtatgtgtaacaggccagtgtgttgtccccatgatcatgaattaggcttgggatgcttccaaatatattcaaggtgttggaacaggataggcagctgtgactccctcaagagtccttagaattctaaataaaatgcagagccatcctaagacacaggggtatggacaaggcctggtgacaccaaaggtgcttgtatccaattgaaaaggtgcctgtctcaatttcataccacctttattgcagttaaaaaaaaatcacactctggggacacttggtggaattacagagccaccatcatcattccaaccactatttcattttctgtagttttacctgtgtgcaattactccccctccattctgttccacttcttactccttagtaccaaatcctctgtttgggattgagcgctgctcctggttaatcattcctactacaaaaaaaaataactcccagggctagttaaattgtaaaccaaggctcagcagtctcacaacacatggaccagaggtgacacacagccatttcctttgccatgtggcccagttgctgctgccatgcctccatttccacactggatgcctacggcagtgagatttcactgccggggtaagagttcagcctggatgattttatagctctgttcctagcacttctcatcatccttccagcccagaatcagcggtcattctgcatattcccaccaaccctctacccccaaacacttcagtgtacctcattttaagagttgctgatccctgattctaggacgtttttacccatagttcttgtctttccaaaatctgaaattcttttttttgctcagaactgggtagccaagggttattttatttttatctttaaaataatcaaggcagtcgctagagtttctccttgtgaatagatcactctagcattttaatgaaaaagaaaaaaatctttctggggtatgttgtatcatagtaatggctcagtaaccacatattttgtcctttccatgtcactgattccttcatatgagactatttggcttgactaccctgtatattgtgtagaaatcaaagttcttatctgtacatttctggtccaatacctgtcttattagttgtccttccccactaaagtttgcaaaacagaaaatgttactatttctggtatttaatgacaatgaaaggtttggtcatatttcatagtgcagtagcgataaggagggtgtctcaagtttgcttttgtgtttcttctaggctttgttcttgattttagacagatgagccagtgttaaggtgctacttcagagaataaattagagaaatcagataacactgtgccaaggtatactttgtagatgctaagcaccgattggccctccagagaatgacaatatccctttgatacctcactcctgatcaatctcattcattaacctcagcttctcaggaatccttgtagcttgtatgctagaagtagctatggtatatggtatccactatatgtccagtcctatggtttggctcaaaggttggctaattgcagctagagctctcaactgctagctcagcaccttgacatttgaagtttcttgtcttgaggagaaggaaaatgttctttctgccattgccactttaacagttggacatgcttaagcaacaaatacagccagtatagggaggactgtcagtagcatcaaatggccacatacctcaatggcaaaagactagatggtttgtgatttaaaaattaatgagtcgagatgagactattttggtattaaatgagaaaattgcctaacacaagggaagggtttacaaaagaatgccaattagtgtttcaacagagttaggattttccaagtaagagtagctggtagccatccagccataaaaggaacgagagtctatagatttgtaaaagtaaaactgctatattttgtatcttcaaatcttcaatataaagaatttaaagaacctgaaacagttaatgcatgattcgttatattggagggaaaaagcaggggactgataatacaaaataatggcaactttaaagatcatttctacgtggatgtttggttagaaacatattccaatgctctcctctttctctggccacagcatcctggctcagcccagctgtggagtagaggtggtaagatccacagaacagatatcctctggtagataagctgacattgatgatactttgaatttaccagctggtgaagcaaacgattaatttgtgattgaactgaaaagcagttgaattgttttgacaccagaggctgaatctaaaccctttacaggaagagcagagcatactatacatttcttagcagatcttcaattctgtttgaacatgatgaagtaaccagggtttagtgagatctaaggccgtgaagtaattcacaaccaagatcttatgaacgcattcagatgtgaggggggcaaatatgttttcaaaaacttagtgtgcaatagagtccattatagaaattaaccactgctatatgttttaagtagttcaatcacctgttgtggttcagtcttgattattgtttattttgttaggtgataagtaggaagatgcacttgttatcccacactatctcttgttttgttttgttttgtttttaaataatgaacagtgcaatctttgaacttgagtttttaataatgatagcaaagacaatggtgagaacttgaaacagccagcatattttatattgccaaagtacttactgatgactgaccacactgtcttgtgaggaactgggtcccctgcactggatcagagccaaatgcaagccacccatcagttcagaggaagcaggaaaacatcttttgggtggtgcatagaacattgagctcttaaaaacccggagaaaaattaggaatttagaaagtaagtgggaggtagaatattgagtccttttttaaaaaaaagaattgatgtctaaatatgtagtctgaacttaagtgtcctaaaaccttgttttttgtttttttgttttttgaggagtcgtcttgctctatcaccaggtgggagtgcagtggcacaatctcggctcactgtaacctctgcctcctgcctcccgggtccaagcaattcccctgcctcagtctcccaagtaggtgggactacaggcgcacaccaccatgcccagctaacttttgtatttttagtagagacggggtttcaccatgttggccaggatggtctcgatctcttgacctcgtgatccacccatctcggcctcccaaagtgctgggattataggtgtgagccaccgcacccagccaaaccttgatttttttagccacctctgggattgcctgggttccctttggagaagaaactaaaagttatggccatagaaaaagccctggtaagaaaatatttgaatggtgtaagatggtggaaggaaagccatcccacacccctacaacatatgttctggcatttataaactgcttgattgtgtgcctcaaggggagaaaaagtcaagcaatgcttcaaaggccaggctttctaagcaaatgagtggttcaaagcagtgtttggctcaagggcagtctggttttatggatagggccgacccaagacatctgctcatgaagaaatgtggcatctgttgccatttcctaaactataaggtttagatagattgtcttgaattttgatagcaaatttttttaaatttatatttctgcctcctcgtacatccttatatatggaaaaaaaagtaagagttcctcagatcagagctcagtagctgtgtcaatttgaagttcaatcagtgtagttgtcctggggtgatcgctgactctgctctgtttcatatttcagttgcttgctccaaggagagaatttctgagaacaatgggtgttagcaactttaagttactccccaaacgtttgctggccacattctcatttctaaacatctggatctgggtaaaggtttgaatagatgtagggaacaaaattggtttttccatggtgtagtctaattttgccaaatcacccaagaaagaaagtatatgacgtgtggagtttgcatttcttggatgggacctatcgggtcacccagcccagtcttacagtcataaattcctacctcttagttcctgccaaagggccttcagcctctgtgtgcacacttattgaatgaatgctttgcctaaagtttggccttttgaagaaaaacagcatgtgataatataaaaatatgagagtttaaaaaaaaaaaagatctctgcctctcttctctctgcctcgtcccaccttgctgtctgtctcattgtctttctctcccctcaccatgcgctgaattcagatttctctttcttttattataggcatgttgttttgaatgtggactttgtgggagggagaggattgttctgagaacagaaactggaagatacgtctgagttgatgggaccaacagggctttgctcctctgtgagggccaaagccattgatacttgtcgggggtgatgagggctttagcatctcaaggcagacatatgaagtatttactgctaaactatattacttactagtacaaatctgttggaattcaggggcagtctaagatttggtgagtgaaatgccatctggcaaaatcgagaagagagtgtggcctgagaggggaatgttcagcctcactgtcacattaagggtacctcaaaatacatggtccttccagtgtgttccttttccttcctccatttcactttgtcccctcttcttcctttctctcccattttcctggctttttagcactcagcttttttttataagtatgtatttactttttattatatatttggtcctttgggactttgtgatgattaagaatttattccattcaggattttaaaatgatgtgtttaatattttgttctcttaaactcttttgaagctatgctgctaaccaggtataggccagaaaggaggtggcccagtcagtaccttgctcacgtcagctaagggggacagtgatgtcatgtgggtgactcttcttcatttgaccaaggccagcctcctgttcttacctctgcccattcatttctggctatgggaaaactaccacctgttgagtgagccaatgaggccaggaagatcagaggggctgggttccggcccatgggccactatttgaatttctctgtagtaagctctttgtagggctggctccaactgcagtagccaaagaaaacctgtctgactcgacattttaatgcctgagagttggtgaaagttcagctgaagctaatgtctagacatcagcagtaactaggcatccagaaagtagcttcaaccaaagctaatagagcccaagtttccgcaggaagtttggtgctgagctgtccagagcagttgtttatctgagtgttgctagcccttagccatgctttcttagctttattctcgcctgttcctaggcatagcctgaaccagagctatggctcactgctcgctttattctactccctagtcatgcggaacaacatagtctaaaaaggaagatgtggactggggagttaggagacctgatttctattccctatgcttctactaactagcctcgagatcttaaccgctctgtgcctcagtgttcccatctgcaaaatggggatagtgttaattgccctacctacctcacagggttgttgtgaggataaactgagacaatgaattcaaagcaagttgacaagtaagtgctatgcaaattgtaagaaatggaaacaatcatgttaaaagcaatggaatggacattggcagaagggttaatggattgtccagccctttctctgtgtggcttaaacccaggtcgccattgctttatacattttcacttagcacagatttgtaattatgcatgtaataaagcacagccttatccaccctg

SEQ ID NO: 2229 - DNA, 7751 bp, Homo sapiens
cgggcgcgggaggaggtggcggcggagggggaggtgcgagccgggcaccgcccccggcccctccccggccttccccgcgcagagctccgaccgcgggcggcccaggggcgggcgcgccgctgcatccccatcctcgtcgtcgcccggcacagcgcgagcgggcgagcggcgcgggcggccggagcgccgaggcccggccatggccaccaccagcaccacgggctccaccctgctgcagcccctcagcaacgccgtgcagctgcccatcgaccaggtcaactttgtagtgtgccaactctttgccttgctagcagccatttggtttcgaacttatctacattcaagcaaaactagctcttttataagacatgtagttgctacccttttgggcctttatcttgcacttttttgctttggatggtatgccttacactttcttgtacaaagtggaatttcctactgtatcatgatcatcataggagtggagaacatgcacaattactgctttgtgtttgctctgggatacctcacagtgtgccaagttactcgagtctatatctttgactatggacaatattctgctgatttttcaggcccaatgatgatcattactcagaagatcactagtttggcttgcgaaattcatgatgggatgtttcggaaggatgaagaactgacttcctcacagagggatttagctgtaaggcgcatgccaagcttactggagtatttgagttacaactgtaacttcatggggatcctggcaggcccactttgctcttacaaagactacattactttcattgaaggcagatcataccatatcacacaatctggtgaaaatggaaaagaagagacacagtatgaaagaacagagccatctccaaatactgcggttgttcagaagctcttagtttgtgggctgtccttgttatttcacttgaccatctgtacaacattacctgtggagtacaacattgatgagcattttcaagctacagcttcgtggccaacaaagattatctatctgtatatctctcttttggctgccagacccaaatactattttgcatggacgctagctgatgccattaataatgctgcaggctttggtttcagagggtatgacgaaaatggagcagctcgctgggacttaatttccaatttgagaattcaacaaatagagatgtcaacaagtttcaagatgtttcttgataattggaatattcagacagctctttggctcaaaagggtgtgttatgaacgaacctccttcagtccaactatccagacgttcattctctctgccatttggcacggggtatacccaggatattatctaacgtttctaacaggggtgttaatgacattagcagcaagagctatgagaaataactttagacattatttcattgaaccttcccaactgaaattattttatgatgttataacatggatagtaactcaagtagcaataagttacacagttgtgccatttgtgcttctttctataaaaccatcactcacgttttacagctcctggtattattgcctgcacattcttggtatcttagtattattgttgttgccagtgaaaaaaactcaaagaagaaagaatacacatgaaaacattcagctctcacaatccaaaaagtttgatgaaggagaaaattctttgggacagaacagtttttctacaacaaacaatgtttgcaatcagaatcaagaaatagcctcgagacattcatcactaaagcagtgatcgggaaggctctgagggctgttttttttttttgatgttaacagaaaccaatcttagcaccttttcaaggggtttgagtttgttggaaaagcagttaactggggggaaatggacagttatagataaggaatttcctgtacaccagattggaaatggagtgaaacaagccctcccatgccatgtctccgtgggccacgccttatgtaagaatatttccatatttcagtgggcactcccaacctcagcacttgtccgtagggtcacacgcgtgccctgttgctgaatgtatgttgcgtatcccaaggcactgaagaggtggaaaaataatcgtgtcaatctggatgatagagagaaattaacttttccaaatgaatgtcttgccttaaaccctctatttcctaaaatattgttcctaaatggtattttcaagtgtaatattgtgagaacgctactgcagtagttgatgttgtgtgctgtaaaggattttaggaggaatttgaaacaggatatttaagagtgtggatatttttaaaatgcaataaacatctcagtatttgaagggttttcttaaagtatgtcaaatgactacaatccatagtgaaactgtaaacagtaatggacgccaaattataggtagctgattttgctggagagtttaattaccttgtgcagtcaaagagcgcttccagaaggaatctcttaaaacataatgagaggtttggtaatgtgatattttaagcttattctttttcttaaaagagagaggtgacgaaggaaggcaggaatgaagaagcactgcgtggcctccggtggaatgcacggggcacagccgcgactctgcaggcagcttcccccccatgccagggctctgcgccgtcatgtgagacttaaaaaaaaagttgaatgacttcgtgatactttggacttctaaattaaatttatcaggcataaattatgtagaattagaggctttgaaaataatactggtaggttgctcaaaggttttgaaagagaaatcgctaggtaggttactatctggctaatccatttcttatccttgacaatttaattcatatttgggaaacttttagggaaatgaaaaataaaagtcactgagtctgggtgacattttttaagaataatataaattcagtttcaaactcttctcacattaaaattttgctgtgaactcttactaaaatgagttttaggttctgtaagtggaaaaatgtgcttttattttatgggccatttttaccacaactaatcttgccttggattactaagcatctcctgcgatcccacagaggactgtggtggccacaggagctgaaagcagaagagtgggatttgatgccaggcagtggagtggcctcagccccagattgtacctcctgccctgtaggaggggagggggcaaagccttctgacttcacctttgtttgacctatgtatggaacttacttttactttttgccttaaatttttaatgaaatgcaaattttctgtgatggggttctctctctctttttttcggggggtggagtcactaataaatttgcaaatgaagttaaagacaaggcaaccatctggcttatgctatataatacttcatttaaagaagaaaggaaaagcaaatgcacttgcagcttttgaggtctcagcaaaaatgggcatgtgtcttttttgaagtttagaaatatcctaatctatttttatttatctaaaagtaagtgttttccggctgataaggctaaccctacccaggaaaggattgataactaaataaatttcctctgttttcccatgcattgaaattatgttggctgagcatggtggctcacacctgtaatcctagcactttgggaggccgaggtgggcggatcacttgaggtcaggagttggagaccagcctggccaacgtggtgaatccccgtctctactgaaaacacaaaaattagacgggcatggtggcgcacacctgtaatcccagctacttgggaggctgaggcaggagaattgcttgaacctgggaggtggaggttgcagtgagctaaaattgtgccactgcactccagcctgggtgacagaggaagactccgtctcacaaaaaaaaaaaaagaaaaaagaaattatgccagctgtttaatgtgagagaatagaaagaatgttcatggaatgtacctgccctgtaaaatgtttgatcattttcattaatgttgcagagaatccgactgctattaagagaaagtgaacaaattaagaatttaaaagacaggttcaggcatgtcataagtgaaaacaagaaggcttaatacaaacttgttgggttttgttcgtgtgtgtgtgtgtgtgtgtgtgtgtgtttttttttggttcagcctatctagccacctacaaataatcacatttctgttacctgaatttatttctcagcctgtaaaccttagtcactgttacctgtttcttgctcagtgaatatgatcttggcactgtcatctagaaagcaagatatttgattggttttctggttccttcgaagataataattccatatccagtttgactgattttcatacccctgaatcaactagttattttcatgaaatggtttttggatatctctcctctagtttggagaagtaataatcacaaagattaatattttgcttctagtacttacagtagaagaattttaaactggtacgtctactcctgttaaatagaaaggggattcgttgtattatgtgcttgcttttttttaatcaatagaataagattcaatgcatatttatgttttatattttccactattcaggtatcatgaaatcactctagagatgatcaatcaacatcatatttatacttttggttaattatatactactcagggaaaaaatgaacaaaaataactactcatccttcaatttcattttcttgaaacagtaagagtataatttggtatgcctcagctgtcaccattttataagtggctcattctgttcttaaagtaagtatttttattggaactcagggtaattgggggaatttatttagcttctaaaatatccggcaggatagagaagatttatttggcttcaaaaatgtctggtgaccacttctcttattagccactactgcccatttgcttcaaaaatatatttattggtctccaccatgtgtgacacacacaggatttccaaacataccacttttgagaaaaatgtgcagtaaaaaggaggtttctagaaagtgacagtaactcacatttaagcactagctgacctaggaggagacctggatcttcattctggttctgcctttcatgagacttaagacttggaggagccacctgtcctgtagaccccaagttcctcagccataagcaaacgggttaatcctaagagttcaggaccagttgggtgtcgtgaacggagccattagcaaggtctgtaggattcaaggacttgggcacattcacagtccacactattgtcatggtcattgacttactacttgagctcaaagccctgacatttcaaaaggttgtcatgataacagtgaaacctctgaatcccttaaatcagaaggcatggcaacatactttttctactggcaatagctcttacaatgagtgtttcataatgaaatagtctctgctgaagaaaacatgttttccttttgctctctctgctttgttggtttctgtgctgtgtggaattggagaagatatatgctctgaaatattttatacagattactgactactggacagggtttaccactatataacatctcaaagttattcaaggatatttaaagcatatttagtttagttacaccttattttaaaccgcagaaaacaatagctttaaaatttttgccattaaaataattataaatttatacttttactcaaggactagatcacagttttaggacaaaaatctctcctatttaaagttcataccttgtaagtatttagtttgtatattcatgaacaaatctggacatttatactttttttgtttccttatcaactgttcacaattattagttaattggtcttaacagttctacattataattgaaagaaaaattacttgagaaaataattgtttcagaatagtgcctactatatctgtgtcagctaaaaatttgtccagagttttagatataagctagtattttgtggagttttatccaggcgttaatagttcttcctggctgaaatttaatataggtgcagaatcctaaataacactgtgagatgtaatcttaactgccctcaataccttataaaactgctgcatttaacccagtgtgcatttaatgagtggctggtcgttgatacactcatcttagatgctgaaatttctgttttctccagcccttgtaaaagtgggtttcttgatgaacgcgtgctcccaatgctgaagcaaaagatttgcatttaaggagagaaatacaccctgaaatttgagtttgaaagattagaacatagagggtctctacagtgtttttctgcaacaccaagtagtcaaatctatttatagaaactctgattacaacagaaattttaaaatgaaattttccacatcggtattttgtaggaaagctcttataatcaatgcttaagctgctttttgaggcttttcttgtacagaggttgcagccaattacattttaattggtaggctgctgaataatgtttttgtatgttttaaaataatatttattttaataggttttttaacattatgcaaatcccaataaagaactgacacgttccataggccattgactgggaaattttgtgaaacacagcctaaatacacagtttttacaccaactaatttgtcttgcctttaaaactgattataactcttctttaagtacaacttttataaagaaaaaatacaacactaagactgtatgttctgtaaattatagtgtgatgacccatgcagaaccgctgtctgaagcttactcagcgattcatagccatctccagccatgttttatcaaatcacacactaaaaataaatggaaatgctacagtgaaaaaccaaaagttacagagcaacataagtaaaatgactaggcagtttcttagtaacatgtttgaaatgggaaaggtgactgactgcctttcaccagagtcttagctgtttcacgttcactattttaggttaattttcttgggaaatcaatttgaatattcccccctgtccttttgcattaaaggacgaaaatatatgttgagagtttgacagactttttaaatatgcctctttcccaattttatgtatttttggttctgcgcacacagatttatcaatgaagtacatttgcctctggctttatcacaaggaaaaaggaatcaaacattgaacacaaatgtgttccaaaccagtcttgtccatcttgtcacttttatgtgactgctcctctgaaccagaaggggcacgatagaaggccataggaatgaaagtaaatcattcaggtgaagtgagaaattcttccatatacagagtgaaaatgtgtgatttcattcctgccttcctttaaacgttgtcttgatctctgcctagtagtagttgagccctcagtcgcccaaacatgaggagagacccaactccagcagccagaatttagtatttacatttgccttcccaagttgagaatagaatgtggtgttctgtgctttctgtttttattattccaaaatatttttttaaagaagtgttatttttcaacagattcataaattagttcctgatgtacggtaaattaaaactcccactgtgtcagtcaaactgagatgtgctcatttcataaccactcatttctagtctgtcagagctgcactggtggcttattgctggtttttaaaggtgtttttaacttacatgtaacatgtttaggacatgttttttttttctaatttgtgtgtctttacaactgattaaacagtagtttaaaaata

SEQ ID NO: 2230 - DNA, 6302 bp, Homo sapiens; identical to SEQ ID NO: 79

SEQ ID NO: 2231 - DNA, 897 bp, Homo sapiens
gacaggtcgcctgactgggctcctccccgggcccgccccgacaggtttgtcttgtgaccgcgggcggccgctgcttctttcccgagcttggaacttcgttatccgcgatgcgtttcctggcagctacattcctgctcctggcgctcagcaccgctgcccaggccgaaccggtgcagttcaaggactgcggttctgtggatggagttataaaggaagtgaatgtgagcccatgccccacccaaccctgccagctgagcaaaggacagtcttacagcgtcaatgtcaccttcaccagcaatattcagtctaaaagcagcaaggccgtggtgcatggcatcctgatgggcgtcccagttccctttcccattcctgagcctgatggttgtaagagtggaattaactgccctatccaaaaagacaagacctatagctacctgaataaactaccagtgaaaagcgaatatccctctataaaactggtggtggagtggcaacttcaggatgacaaaaaccaaagtctcttctgctgggaaatcccagtacagatcgtttctcatctctaagtgcctcattgagttcggtgcatctggccaatgagtctgctgagactcttgacagcacctccagctctgctgcttcaacaacagtgacttgctctccaatggtatccagtgattcgttgaagaggaggtgctctgtagcagaaactgagctccgggtggctggttctcagtggttgtctcatgtctctttttctgtcttaggtggtttcattaaatgcagcacttggttagcagatgtttaattttttttttaacaacattaacttgtggcctctttctacacctggaaatttactcttgaataaataaaaactcgtttgtcttgtcttctgca

SEQ ID NO: 2232 - DNA, 2487 bp, Homo sapiens
atggccgggcgtgggtggggcgcgctgtgggtgtgcgtggcggccgccaccctgctgcacgctggcggcctggcccgcgcagactgctggctgatcgagggcgacaagggcttcgtgtggctggccatctgcagccagaaccaacccccctacgaggccatcccacagcagatcaacagcaccatcgtggacctgcggctcaacgagaaccgtatccgcagcgtgcagtacgcctcgctcagccgctttggcaacctcacgtacctcaacctcaccaagaacgagatcggctacatcgaggacggcgccttctcgggccagttcaacctgcaggtgctgcagctgggctacaaccggctgcgcaacctcacggagggcatgctgcgcggcctgggcaagctggagtacctgtacctgcaggccaacctcatcgaggtggtcatggccagcagcttctgggagtgtcccaacatcgtcaacatcgacctgtccatgaaccgcatccagcagctcaacagcggcaccttcgccggcctggccaagctgtcggtgtgcgagctctacagcaaccccttctactgctcctgcgagctgctgggcttcctgcgctggctggccgccttcaccaacgccacacagacgtacgaccgcatgcagtgcgagtcgccgcccgtctactccggctactacctcctgggccagggccgccgcggccaccgcagcatcctcagcaaactgcagtcagtctgcaccgaggactcgtacgcggctgaggtggtcgggcccccacgtccagcatccgggcgctcacagccgggccgctccccgccgcccccgcctccgccggagcccagtgacatgccctgtgccgatgatgagtgcttctccggggacggcaccacgccactggtggccctgcccacgctggccacgcaggccgaggcccgccccctcatcaaggtcaagcagctcactcagaactcggccaccatcaccgtccagctgcccagcccgttccaccggatgtacaccctggagcatttcaacaacagcaaggcctccaccgtgtccaggctgaccaaggcccaggaggagatccgtctgaccaacctgttcacgctcaccaactacacctactgcgtggtgtccaccagcgccgggctgcgccacaaccacacctgcctcaccatctgcttgccccggctgcccagcccgcctggtccggtgcccagcccctccacggccacccactacatcatgaccatcctgggctgcctcttcggcatggtgctggtgctgggcgccgtctactactgcctgcgcaggcggcggcgccaggaggagaagcacaagaaggccgcctcggcagccgcagctggcagcctcaagaagaccatcatcgagctcaagtacgggccagagctggaggcgcccggcctggccccgctgtcccagggcccgctgctgggccccgaggccgtgacgcgcatcccttacctgcctgcggccggcgaggtggagcagtacaagctggtggagagcgcggacacccccaaggccagcaagggcagctacatggaggttcgaaccggggaccctccggaacgcagggactgtgagctgggccggccgggccccgacagccagagttcggtggccgagatctccaccatcgccaaggaggtggacaaggtcaaccagatcatcaacaactgcatcgacgcgctcaagtccgagtccacctccttccagggcgtcaagtcggggcccgtgtccgtcgcggagccgccgctggtgctgctgtccgagccgctggccgccaagcacggcttcctggcgcccgggtacaaggacgccttcggccacagcctgcagcggcaccacagcgtggaggccgccgggccccctcgtgccagcacctcgtccagcggctccgtgcgcagcccccgcgccttccgagccgaggccgtcggggtgcacaaggccgcggccgccgaggccaagtacatcgagaagggctcccccgcggccgacgccatcctcactgtgacacccgcggccgccgtgctgcgggccgaggccgagaagggtcgccagtacggcgagcaccggcactcgtaccccggctcccacccggccgagccacctgcgccccccgggccaccgccgccgcctccgcacgagggcctggggcgcaaggcgtccatcctggagccactcacccggccgcggccccgcgacctcgcctactcgcagctgtccccgcagtaccacagcctgagctactcctccagccccgagtacacctgccgggcctcccagagcatctgggagcgcttcagactgagccgccggcggcacaaggaggaagaggagttcatggccgcgggccatgccctgcgcaagaaggttcagttcgccaaagacgaggatctgcacgacatcctggactactggaagggcgtgtcggcccagcacaagtcctga

SEQ ID NO: 2233 - DNA, 2724 bp, Homo sapiens
gggcggggcgcaggagccccggggcggaggagccggggaggcgggaggcgggaggcgggaggtgttggggccgttgaagcggcctccctcccgcccccagccgcccggtctggccccagccctgtcccgacccccggcctggcccactccgaccctacccggccgaagggttccgctggacacgcaggcggcctccggagcagcccaagcccatgagggccgcgcgcccggccgccggtgctgacgagacggagctcctggcccccgaggaggagcagaggatcaatgcggttcaagaatcgattccagcgggttcatgaaccatcgagctccagccaatggccgctacaagccaacttgctatgaacatgctgctaactgttacacacacgcattcctcattgttccggccatcgtgggcagtgccctcctccatcggctgtctgatgactgctgggaaaagataacagcatggatttatggaatgggactctgtgccctcttcatcgtttctacagtatttcacattgtatcatggaaaaagagccacttaaggacagtggagcattgttttcacatgtgtgatagaatggttatctatttcttcattgctgcttcttatgctccatggttaaatcttcgtgaacttggacccctggcatctcatatgcgttggtttatctggctcatggcagctggaggaaccatttatgtatttctctaccatgaaaaatataaggtggttgaactctttttctatctcacaatgggattctctccagccttggtggtgacatcaatgaacaacaccgatggacttcaggaacttgcctgtgggggcttaatttattgcttgggagttgtgttcttcaagagtgatggcatcattccatttgcccacgccatctggcacctgtttgtggccacggcagctgcagtgcattactacgccatttggaaatacctttaccgaagtcctacggactttatgcggcatttatgaccaatctgtactaattctccaaaccagtattatttcaattatggcacttgggagtggggtgagagctaaacattgcacagggaaagaaaaaaaataactgcactgactttatatcttttgaatataattactgtgaaagtataaaggctgtgttctggaattttctgcctcacagcaaataaataaggtagtgaattaattattcattccattccactatcatgaaggactctgaatagacttggccaactgatgtttacaaaccagacttttatattttaattttacagattttactacatgatttttctaaattactatgtcaggttgtaaaagtcagtgcaataacaaaccttcctttttaagaagaaaattgtttctattactttcccattcactaggtaaagaatcatggacagaacttacactactttttaccatgtttcatcttggcataacatggttcttttttaaatagaaactttagttttttgtaaatttttaaaaaaatatttcattgatatgcatctctgcaggtcctcattcatgttgtaaatttttgcagcaagcagtcaacattccacaaacgaacaaacattatacctcttctgatagttttattaagcatggagaaattgccaatttttaaaaactgcagttttccaaacttttctgccaacctcttactctgaattcagtgctgctttgggacatatacttgacctagcttggtttaccagtgatggaaaagtattttgatatcattaactttttcaaaagatccaactttttctctatgcctttgccacattctcttcagggtctctttccacagtggataaatgttttttctgtattatgacagtattgttgtgatggccatctgctggaaactcctgaagagcattatgtattacagtgagcagttgtattgcctgtttggtgcccaatggttaagtcattgtcacttagctttatattgtcagtttgatatttattttaaattgtggaactagatgcataaattcacatttctgcctttcctttgcatcttctcatatattgtgtttttttttttttttcctagaaaaaatatttaaagcattgtttgacaggtagaaactcatgtatctgtagtccatgagttatatcctggctcagtggagtgatatttatgtattatttttacttttctctcagtgtcttatattaagattaacatgttgttaatagttgctttgttgattaatctctcttgttggtgttttaataaatgaaataggcttgcctttagatcgggtgctgatattgcctgtttcctagtaatgggctgatcaaatgatcagtggaattcttggtttgatgataaccttattaattgaaattttttactgatgtggctttaaaagaggtttattttgtatatgtttagaactctctgattttgatgaattatatgggaatgagaaacagaagaagtggtatttgctggcgagttaaataggcaaggtacccagtgataacaccaaccaaaccactcctatctgcatgattctgaacatctggatgcctgttgttttactgtgtatattttatttttaatatattaactttgtggattcatttaaggtctactcaaaagtaacactgtcaaaaccactaatatgtatgtaaaaattgtgctgtatactacaataaagttgttacttggatttgttcca

SEQ ID NO: 2234 - DNA, 15555 bp, Homo sapiens
cggcgtctgcgcagctgccagcgcctttaagcccgggctcgcgctctcggaccgtgctttcgccgcctgggagccgtccggcgcagcagtttctaggtccccactgtccccgccgtcccgccccttcgcgtcccgggaaccggctggcttccgagccgcactcgccgatcctccaggcatgccccgctacgagctggctttaatcctgaaagccatgcagcggggttggtacagtaggcttcactagacttagctgcaactcagaatttctcctccagcacctgagtaaatgctgatggtcttgtggagagtggattaagagtacgagctaagttctcaatcccaattaagaagcggaaaatttaaactgtcttcttcaaagtttatcacaaccaccaccatcaagacagcaaaccaaaggacaaagactttgaccctgctgtgttgctctgtgtagtccagttcacgtatggtttacagacttggctggggttactaaaaataaataaaaagttggacacttctgtcattggagcgctattattcacaagttaccagaatgagagctgtactggacacagcagacattgccatagtggccctgtattttatcctggtcatgtgcattggtttttttgccatgtggaaatctaatagaagcaccgtgagtggatacttcctggcggggcgctctatgacctgggtaacaattggtgcctctctgtttgtgagcaatattgggagtgagcacttcattgggctggcaggatctggagctgcaagtggatttgcagtgggcgcatgggaattcaatgccttactgcttttacaacttctgggatgggttttcatcccaatttacatccggtcaggggtatataccatgcctgaatacttgtccaagcgatttggtggccataggattcaggtctattttgcagccttgtctctgattctctatattttcaccaagctctcggtggatctgtattcgggtgccctttttatccaggagtctttgggttggaatctttatgtgtctgtcatcctgctcattggcatgactgctttgctgactgtcaccggaggccttgttgcagtgatctacacagacactctgcaggctctgctcatgatcattggggcacttacacttatgattattagcataatggagattggcgggtttgaggaagttaagagaaggtacatgttggcctcacccgatgtcacttccatcttattgacatacaacctttccaacacaaattcttgtaatgtctcccctaagaaagaagccctgaaaatgctgcggaatccaacagatgaagatgttccttggcctggattcattcttgggcagaccccagcttcagtatggtactggtgtgctgaccaagtcatcgtgcagagggtccttgcagccaaaaacattgctcatgccaaaggctctactcttatggctggcttcttaaagctcctgccaatgtttatcatagttgtcccaggaatgatttccaggatactgtttactgatgatatagcttgcatcaacccagagcactgcatgctggtgtgtggaagcagagctggttgctccaatattgcttacccacgcctggtgatgaagctggttcctgtgggccttcggggtttaatgatggcagtgatgattgcagctctgatgagtgacttagactctatctttaacagtgccagtaccatattcaccctcgatgtgtacaaacttatccgcaagagcgcaagctcccgggagttaatgattgtggggaggatatttgtggcatttatggtggtgatcagcatagcatgggtgccaatcatcgtggagatgcaaggaggccagatgtacctttacattcaggaggtagcagattacctgacacccccagtggcagccttgttcctgctggcaattttctggaagcgctgcaatgaacaaggggctttctatggtggaatggctggctttgttcttggagcagtccgtttgatactggcctttgcctaccgtgccccagaatgtgaccaacctgataataggccgggcttcatcaaagacatccattatatgtatgtggccacaggattgttttgggtcacgggactcattactgtaattgtgagccttctcacaccacctcccacaaaggaacagattcgaaccaccaccttttggtctaagaagaacctggtggtgaaggagaactgctccccaaaagaggaaccataccaaatgcaagaaaagagcattctgagatgcagtgagaataatgagaccatcaaccacatcattcccaacgggaaatctgaagacagcattaagggccttcagcctgaagatgttaatctgttggtaacctgcagagaggagggcaacccagtggcatccttaggtcattcagaggcagaaacaccagttgacgcttactccaatgggcaagcagctctcatgggtgagaaagagagaaagaaagaaacggatgatggaggtcggtactggaagttcatagactggttttgtggctttaaaagtaagagcctcagcaagaggagtctcagagacctgatggaagaggaggctgtttgtttacagatgctagaagagactcggcaagttaaagtaatactaaatattggactttttgctgtgtgttcacttggaattttcatgtttgtttatttctccttatgaacttaaggatatggtgagacactaacttaagacaatactgactggtctttggggaaaaaagttatgtaactgtgcatctctcaggcattgtttacgctgtaggttttagccaaattttacttagcagaaaatcatctaattacaagactttattttcccagagatggattaaagtaaatcttcaacttaagtgaagccaaacctaacagactgaattgtgcaaatgtggttttaaattttgcataccaaagtaagaagagaccaattattctcacagagcacttagagcagaatatatgttaagttaccatgaattaaggtatactgtctgcactgccaagtcttggcagaccttaccctgaagtagaagatttgctcatttctaaagttttttttctgtctctgtaatccctcctaccattaagaaaaacttatttcttagacattgtacaatcagttatgtactgaaaatcgaatgtgcttgtgtgatacttgtttcaggacaagttcatttgccaggttcattttgttagcatgagcctacggattctgatttcccaaagaaagaatgttttcctgtaggtatttttgtaccaccagtatatggaatgttagggaaaaactttgttccagttcctttttttttttctttctactttcaagtttaagtgaaccatactgaaatgaccaacaagtctgcctgtaaagttacatgtcatgattgtgttgttaaatgattatgggggagaaaatgaagtaaatgttgctgatgatccccatatttattgatcatattaaggttgtttatatagtttggaaatgaccagccccctaagcagtgtttgattaacttatgctaatcagatgattactcatatattctgctaattttctagctttattcttgttatttggaaaaattattagccaaatgccttcctaggtggatccagttggaagatatgtccagaaacctgaagaaaaattgacgctgcctttgtgtgctggattgctctacttgattagatcatgatatatcaaggttgaatttttagagggaaaatttaattctgatatcttattgcatccttgataagtttttccctgattttttttttcctcaaaagactttccatctgtacacagcctctacatttttgttgtagtgacttagagcataaggatgtttcagtgcaaactggccgtcggtaacagaaaactcagtgcatactttgctgttgttaggttgtcaatatagtctttctgtaggatggatagcatgtttgagaggtgccaaacaagaacttttggggttagtagtgtgtcttgtggagggtattacaggactgtgtaattataggactctaacttgacatggcttggcacccacttgcagctagtgggtacagggtacaaaagatgttagagaaaagctctacagattacgtacttctgtgtcttcgtatgctcaacactgtcctttgtcctccatgaaagatgaaggaagcaaattatgtatgtactttctttgaccttctttaatctctgatactttttagattgcatgattttactaggcttgtatttagggaaattactttcataaatacttttgtagattttgaatcaaaactcagtctttttaatttttttgtagtctataaactagtttcattatgatggacttgattagtccaaagttaattttagaaattgtcaggtagcatagtgtcttcccatgatcaggaggctttctgaaggactgagtctgtaaatgaaaaaataatttatgtatgaatagcatgtatttctgaagagcttagagtgccttgtagaatttttttctcaattttattcttgaggtttataatttgggggccaaatagatagagctcatcattttcttgtttggaagttgaggctgcgacatgtccaaggttatgaagtctcttttgggaagaacagaaaccaggtctccaaatctggactcatggtttgttcagatgtgtctggacaaatggttgtcaatgttttgtcctgttttttcaaaggaactgttcttcctttgggacaaccttttggtgtttgggaaagtaataagatcttggatttttcaaattaacattaagttgtaagaactaaaattttctttgaaccacattactgtgtaattcactgataattgacatattggctgggcagcctatctcttccatatccagcgtaaatgaataggaggtgtttgtgattttttttttctccctttatttaacattgagtcctagtagtttggagaattagggtccctctaccttctttctgctcttgtcttagtaagatacataaggtacatcatcttgtgtctgtgtgtatatagcagtaggtcaagtttagagtactaaagtctgtaaataaggaatgactattagcatattcattagaattgtttattcttgccagtataaacatcattttatttagactaaagtccctgaagcttgtctttcttattgcttcccagtaatagataatgtgctcgagtaagtttgtgaattgctgattgcaacttaattcagggaccagtcttcaatctatatttcattagaatgattgttcctggaatgatcatacatggactgtcttaagctagcaaaatgttcatactttacactgactaaatgggtcctaaatgatgacattggtctttagacattaacatgtgtatatttttatattagctcaagctaaggttcagaattgaagcttgatattgactagaatagctaaaagtcaaaatgaggtgaggacactggtcttggaaggtagagaaaaataaatgtcttaccaggtgttaatggtatccccagttcttagacttttgtcttctcaggcaattttcatctcaagatctgatgagaagggcatattacattggtatgcaggatgattattgcatattttgtgggacctctaatttccctggtcatctttcagaatattctgttctgccacccccagagagtaaacacttgagccgatttcttcttccccagctattctttcctgggggtaattatgctttgtctttagattagagaagcatcaagcaatagcaatggtgctgtgtccttcggcctaaattcaatagatctcatctcctagggcttccttttcacttggctcaaaggatccattgtattttggcacaaagagcctggccagggtcatgtagccatagctcttagggatgatacctcaagaaattagctgggacccatcactctgtgaaacttcacattttaagaactgagttgagggggttgttatgcacttctgtaacttgaggctaagcaaggggttaactcttgtgagagccaatagagtgtgtctgtattcgcagtccatggctcattttctttatagtaggcatatggatcttcccctctgactttgaatatcatttggtgtggcctgtgggttattttcattctttaccaccaaataaagcggcttattagctactcagttacttgctactcaaaggttaggtcttccctgttcctgcttggcagtgttaaagcttacagggttaacttatgatgattctcctggctcattttcatcagaggcatgatgactggaaagggatcacatgggtcgttggtggtgacacctcactgtttcctaggtttggatagagagatgtatacaagacctttcctgttaaattacgtgactacagagacttgccaggacaaaattttcctaagaaatcagaaaaatgattaagtgagataagtacctgggtgacacagatattagcccgttggtaaaagacaacaaatattagcttaaaatctgcatatgtagaatcattttcattagatttagagcttgaagcaccttggctctcagctactttaaactcctccccatataaatcagggcaccaataaataagtttcagctttttaaaccctggtttgatgttaagcattataaagtacgaagtttgttaccacagtagagataatttagtagaaaaatgctttgaggcttcagtatttgtaagattttgcattagccagatgctaggttgttgaaggcatttcagtgttgataatagcctgagcagacttctttacaaatgggatctgtttctatatgtgtatatgcccacttaccattcagagagactggtctttctctttgtcttccttcacattgctgtgtcagttctacacctagtcttttcagcacttagcaaattcaaattttgatttttttgtcagcttagttcactttaaggcatattggcatggtgtgtgaaagtgatgttttgccccagtattgaggacttttagatccaaataatgactcattaaatataattatgttttaagtatactgaatttctgttagcttaaaatgttaattctcaggaatgattttctcacactttgtgttggctaataataaaagcactgttttattctcaaaactcctttttcaaaaattagggagagagcagtagtgatcatttatgtgagcccctttgaaatgatggtgtcagagtgcagagaaacaatggagttttgatgccaaaaaggtttttttgcagtaaaagtaaaaatttggaattagttggcatatagaggaacccttttgtactggaacgtatgaggctggattgtgaaaaggtaatctttcgattgctagacttggttaacttagggctgcaaatctttttcttctgtcaaggtcacttaatatggaatgtttttgtcagactgtcctttgttggaatactttagctgttcagctactttgactcctaggagagaatttagttaaggttcaaagtaattaactggctttgccagtggtgagtcccacaccattattcacttagtagtcatataaatgtttttatttaaacttctctctcttcaatgctgagaataaggctttaaattactgattcacctttaaaggaatgttgtgagaattgatgtaatttctgtttctgtttccatctaaacttctttataaaaagagggattagtttttttgttttggggtaagcacctaatttatccagtaaccaacaaccctaaccattggcatatatagtctttcactcagaaataaacaaaaactgtttggtatatctgtatcattgctaatcttgtgcactttactttttgggcagtaccatacatagtctgaggctattgacttaaaccaataactgtactttatgtaatgactcttaaatttggttacctgggttcacagcttgcttgaagagaaaggatgctagaataaagtaagcagctgaagagcgagcaaatcaagacaaaacacagtggtctcagatttttcgtagtgtgggaacagtggttttgctctataccactgaaaagcactataacataattgttgtccatgatactgaagcttttcccctcacttctaggttgtttacattcagagctctatcaataagaggaatacatattacagtgaattcgacaaccgcacaagttggcagtaggtatccccaacctaatttatcttggtaaattcaccctgtttcctagtgctgctggataaaagagtgtttactttttattgctcttagacagagtagtctagataagttttcaatttatcaacatagcctagacttctgtaagtggaatgttcattagtaactcatctttttgttgttataattggaaacagaaacgaggcttattgctattgcagaaatcccaaactggcaaaggccagtatatatggtattccataatataaccagcttttgaaatttatgtgtttggattagtgccttctggttaccagtattgactctgctagtttgcacctttccgttcttaacagaaaatttgtatttgttattcctcttaaattttgtcgtaactagtgaaggaagtaaaaaaaaaaaaaaaacatgcattacattgacatactttatgtgcagcctttatttaggttcagtgaaaccaggtagttctgtatttgtgttgtagcctaaatgttgtttcttttatatccattaaaaacttaaagttacttatgttctgtgatcttaattttgttgtgtttccattgtaggttgataggtatatcgagaacaggtacgtgacaacagtttatattccatgatagaaagctaaagtccatagaaagcacaaaatcgtgttcacacattagtgtacccacacatagaaagcacaagactaatagtattctctgtatcccacaagtgccagtcataaaggccaccaggtatttgtctcagagttgctatgagcactacagtattgataagcccaagacaatgcggtatctaaactggtcctaatggtaagggacccaaaggaataatctcaataagtttgtaccacattgatggagggagagaatataaatgtcaagaatgccaaaattatatttgggggttactagctaaaatggggtttgagggctttttactgcaacttgaaactggagaaatagggacagatgtctaggtttttggtgggtggaacaggtgacatatttctgttttaagctgtagtgtgattggggttttttgtaaaaaatcttaaatcttttaggaaatattacctcttaacagtgcccccccaaacatgcagaaagtcatactttaacagggcaaatactacttgtctttgattttttttgtgtacgtttgtatgtgagagatgaagttacctttatttttttcctatacttgactgtgcttcattttaataaaggataatttgatctgagtgttctgagcatcagactaattctgaagcatatttgctagaggagctactttgcttttcacaatggggtggagaggattctttcacttgtcccattaaccctcttctagtctagatgagatgaaatctgttaatgtgtgtgtagaagaaaacgtatgttcttctactcagcattgcccttttccacctcctcacttcacctccgagtagcttgtttatcaagaatgaatgaatgtctttgtcttaaattttgcccatgtgttaaaagatgtaattctcagaatgggagagaaatgactacctttgttcctactcttttatataattatccttttagggaaagacttggtcaactctaatatatctagaaggaagactatatctggtgtagactaatatgagatgttttagaagagttaacctgaacactttgagggagagattattcttgccagcaaaaagctagccaggaatgagcctaccacattatttgagaatatcaaacctcaggcctggggggatgaggggaagaagattaccagaagtgcaggaaagagaagtttgaggaacacccttggcttagcaacatgtgataatgcaaagctgttataacctgttaatcctacgtactatgtgttctgtacctttacatgtttttaaatttaagatagtttgtaagaactgtacaaaaaaatgcttctggagatttctttggcagaaatgcctttcatctataatttcatggagaactgctttaattagcctaggtgaaaagtagtcctagcagtgtaaatatgtataattagagttttctaatttcactgtgagatctctaacttttgagtggcaaacagatcaagtcttttgctcatagacttttctgtggggttattaaaatgcaaaagctttattttttttaataatgccatactccattagtgtcagatgatggtatggaatttgttcccttgctttcccccactgttactgcttcagtttatagattgccagcagagttcagaaatagagcagggatttacccgttctttgcttggacatcccattttcttttgtccagacccatgttggcaatcatgtatgaactgtgttatacttctcagtgctttcttttttctttttgataagatggatatcaaaaatagttgctgtgcaaaagttagtagtcttcttcaagaagaaaaccaattctttttctaataatatcctgtgaaattgcttcattcattcatttatttttaagccaaatgtcagcagagtgctgctgcttttatctagtaattttgatatgtaagtattaatgcatttttaaaagatgtctacattgaaacatgttcttcccagtgtcctgcttatgatgctttgttcagattttttgtaagagaccagttagtacactgggggtgtatattgtgtacatgtgtcattttagttaggcattgtaggccaaatgtgattataaatgaagttgatgaacattaattttgttattagtgagttttttgaattgtaaatggatttccagtttaccttctgttgtctacagcttttttaattttaaggtttgactaattgtatccatctcattgtacagtgttttagttgcaagcagaaagtagaatttggtataaagcaggttatttctatattgaaaggagtacagttgaaattgtagatttaagattgttaaaatcatgacaattctaacttgtctattctaacctattgtgtacaatctgattttttaaaattgtaaacatgtatgatcttggtttcatgtgtttttgaaagtgttattgtttaaaaaatgaaaaaagcatatctgctaaagagctgtcagttttcattactgactctgtaaaatacactgttctttgtgtactgtgtgttattttgccagctgctgcattagccttcaaaagtatttggaaacttaagatgaactacatttcttgcaaagtacattcctttctgtggtattttgtcctgtaactgaagtatagtaattattttatggaaatgttagcaattctgtaccaactttgaataaaatgaaaaatttataattacagatctacctttagcacagaagtagccatagacactatgcagatgtgtgagttggctgtgttccagttcaactttatttgcaaatacaggtagcaagccagatttggcccaagagccctggtttgccaaccctgctttatggtgaggtaaggtctatggggcgttatttttgctcctccttccacctttcgttttatacttctgggtgttttgaaattaaagtgagatgaatgtggccattccagtagtctacagtttgaccttgacatactgaagtcaaacaatttttttttttatattttcctaagttacattcttgttaggtagcctttcccctttttgagacagatgtaagaagaaaatgttttttactttataagctcttacttcagaagagggtaatgagttttatactgtaaacacttcagttggaacttaaaagatattgagatatattcctttttaatcaggcaaaactggaattgaaatttatttgggtagctaatcagaaaactaatcaatcaaatgtttttttcctttttttttttgagtgcaaagctgagacccgactctttatttggatgggctgttcctttaccttatcatacgttaattgatgtaatgccaggtcaagaaacagcattttcagttaaatgaaatactgtgctgctgttaataatgagtcctctgcagatgtatggcgatgtctttgtgaactataatgaaatgtgagaagaatgtagtcttcatatgattagaactgtctaggaatgtgtttgatacaatcataaggataaattgccttagactttttacctactgttaatgggaagagattttggcctgaatttttattgtcttcaggaaatttctgttttatcttaaggttggttaaatatataaacaacgattcagtaggaatttttaaaatccctaatggacttcaatatgaaaagaaagtaaagaatgtttttttctaagccttaagccaatacttagcacatttcataccattttagcagcacttgtcagaaagaaaattttaaaaatatagtggattttgtttggttgccagaatgcacacttaaacttgttctgcaattttctcttcatttgatccccaaatgaacctctggaaggtagcctattcttaagtttcctcctgcactttaaaatcaccctgcttgcacctcttcacgtaggtctttgaggagatgtgcaccttgtctttgccaaggtgtgcctctggcttcctccccgatggtttccacagctttccttctccttgcagcaggcgtttccacttaatagctgccctgtcagcatctctctagagatcccatcccaaatctgtaaaccttcttggctttttttttttatgaagataaaatatgtaacaataagacactagaccatatagtagttatccagtaaatcatagctgtcatcgttgttgctattttagaaatcctacattttatcgtcttgcatggtccgctcctttttgactaccaacttgcccatgtgttttctcctaaaacacgttgctcaagttgcttgtccctggagccctggcattttctcctcctcaccattgttctcatacctctaccatgggaaccttggcagcctgctttctggccccatcttgccaaatgcccatgtagctaccacaccgcggctttttcttgatctctgtcctctaccccattgtcattctggacaaggcagtctcccgattttccttgtcctatttgatgatacgttttatatttgcttctctgactttgagtcctcttgttagcccctaaatgtttgtactccccaaggttctgctggtgatctcctttcctctccccctccaccctttctattgatctcacctccttctcaggcttcagagagccgtctgtgcaggtgactatgaaatgtgtatttctcatccacctgctttgagcttaagatttacatctggagaggtcaacctaggggagccatggcatctgagactcagcgtgtcttaaaccagattcatctcttactgtcctcaccagcttctccagctctccttttagctgtagtgacagttgcactctctcagccaccagattgtggtgcccttcttcgccacatcttgccttcattctccacattgcattcgttgcagttttcaggcttatccttataaagtatcttttcttccaaaaattgcttgtgtatacatatgcatagagagatatctggaaagaaattcaccagaaagtttaattcaccatccagtctatctctgggtaatgggattctatattgttcaagcttttttttttttttttttaaataacaggccttgattactcatggacttgtgcccagtgtatacccgtctatctcctcagcactcccttgccctgaaccccatcactggggctcagttgctggttcattcattctttgtacctccggtcatcattttccgggtgcctttcaagtaaactttccttagtgaaacccttcttccagctgaatgtttcttcctttcgtgagccctctggtctctatgctatttcctgtattctgccctctgctctccatacatgtgtattttgtgttctgtcctttattagattgtaagctccatgagggcagagtttgggtctgattacccatcctttcccccttttggttacagtctcccagtttttctttgggagacaacaccttttccccctggctacagttttggtgggatgggcagttcaggtgtcctgccaacgagatactcttctcctggaatttgaattttgagtcatgggatacaaggactgacagtgattggcactgattcagcctggccgaggtgctctgaagaagccactcattagttcctgcctcccagatccctggagctgccctggtccctgaactctccgaagcctggttcttcagatattcctcgtatctgtgagctatctcatatccttacaataaattctctctctcttttattttaagttaaccaaaaccagcttctgttgcttttacccagcgattcctaccagtagagctgttatgattggaactgagcagacttaatcattctagctcttatattaattctgatgcttttttttcttttctttaaaaacacaaacaaaaacagccagagactgctgctactttgaaacgtacgatagaggccctgatggacagaggagcaatagtgagggacttggaaaacctgggtgaacgagcgcttccttataggatctctgcccacagtcagcagcacaacagaggcgggtatttcttggtggatttttatgcacccaccgcagctgttgaaagcatggtggagcacttgtctcgagatatagatgtgattagagggaatattgtcaaacaccctctgacccaggaactaaaagaatgtgaagggattgtcccagtcccactcgcagaaaaattatattccacaaagaagaggaagaagtgagaagattcgccagattttagccttatatgtaattccttcacatttgggcagcatggacgagaaggaagaatttgcaagtttggcctttatataagcatgtgttgcaggtgctgtttgatttttctaaggtatttttagcccttgatcccctttgcttgcgagaggtggggaactgctcactgacagcttctctgtaacctgcagtaccagtggatcgttcttgattttgttttcattagtgtcatttctttgtcattgaggacttttccccttacaacagtaacaccattttttgaagagcaaaacttataatacctcctgggattgtgagctagtcattcagcctgtgtaaccatgtggaaataaaaattgacgaccaatgtattatatggacaacttttgctttgagtaataaacttgattgtaggaatgtg

SEQ ID NO: 2235 - DNA, 456 bp, Homo sapiens
atgttttatgggaactctgatttaatgggaagcaaactagttcatattagcaggaattattttattttttcgagacagagtttcactctcgttggccaggctggagtgcaatggcgtgatctcggctcaccgcaacctctgcttcccgggttcaagcgattctcctgcctcagcctcccaagtagctgggattacaggcatacaccaccacacccagctaatttttttgtatttttgttagagacagggtttctccatgttggtcaggctggtctcgaactcccgacctcaggtgatccgcccacctcggcctcccaaagtgatgattttatttttatttttaattgtattaatctgcatctagataatgactttgtgaagggtgtgtgttgtgtgcaaaacttaaggtattggttgagagttaaatacattatttttataatatgttgggtatag

SEQ ID NO: 2236 - DNA, 1080 bp, Homo sapiens
tagggagggcgggcctgtttccgggaggcgcgtggggcttgaggccgagaacggcccttgctgccaccaacatggagactttgtaccgtgtcccgttcttagtgctcgaatgtcccaacctgaagctgaagaagccgccctggttgcacatgccgtcggccatgactgtgtatgctctggtggtggtgtcttacttcctcatcaccggaggaataatttatgatgttattgttgaacctccaagtgtcggttctatgactgatgaacatgggcatcagaggccagtagctttcttggcctacagagtaaatggacaatatattatggaaggacttgcatccagcttcctatttacaatgggaggtttaggtttcataatcctggaccgatcgaatgcaccaaatatcccaaaactcaatagattccttcttctgttcattggattcgtctgtgtcctattgagttttttcatggctagagtattcatgagaatgaaactgccgggctatctgatgggttagagtgcctttgagaagaaatcagtggatactggatttgctcctgtcaatgaagttttaaaggctgtaccaatcctctaatatgaaatgtggaaaagaatgaagagcagcagtaaaagaaatatctagtgaaaaaacaggaagcgtattgaagcttggactagaatttcttcttggtattaaagagacaagtttatcacagaattttttttcctgctggcctattgctataccaatgatgttgagtggcattttctttttagtttttcattaaaatatattccatatctacaactataatatcaaataaagtgattattttttacaaccctcttaacattttttggagatgacatttctgattttcagaaattaacataaaatccagaagcaagattccgtaagctgagaactctggacagttgatcagctttacctatggtgctttgcctttaactagagtgtgtgatggtagattatttcagatatgtatgtaaaactgtttcctgaacaataagatgtatgaacggagcagaaataaatactttttctaattaatacc

SEQ ID NO: 2237 - DNA, 5170 bp, Homo sapiens
gcttctgctgggcagggccggctgttaatctcgcctggcggagcggacaccggggcgtggtgggggagatgggccttataggtggcgtccgctggtgagaaacaccttgcgcaggtaaaagggtggcggcgagagggagttcccacccgtggctttcttagagaaatgaagtcttaagtcttaaatagacaacaaggaggggccgatcggtgtcttttggacgcgtctggagcccctccctccgccaaaggaaaagccccttggatgagaggcaggcgcttcagagaagctaagaaaagcacctctccgcgcgccccacctcctccgcctcgcgctcctcctgagcagcgggcccagactgcgctccggccgcggccctcgccccgcggagccctcctaccccggcccgacgctcggcccgcgacctgccccgagccctctccatggaggcagcccgcccctccggctcctggaacggagccctctgccggctgctcctgctgaccctcgcgatcttaatatttgccagtgatgcctgcaaaaatgtgacattacatgttccctccaaactagatgccgagaaacttgttggtagagttaacctgaaagagtgctttacagctgcaaatctaattcattcaagtgatcctgacttccaaattttggaggatggttcagtctatacaacaaatactattctattgtcctcggagaagagaagttttaccatattactttccaacactgagaaccaagaaaagaagaaaatatttgtctttttggagcatcaaacaaaggtcctaaagaaaagacatactaaagaaaaagttctaaggcgcgccaagagaagatgggctccaattccttgttcgatgctagaaaactccttgggtccttttccacttttccttcaacaggttcaatctgacacggcccaaaactataccatatactattccataagaggtcctggagttgaccaagaacctcggaatttattttatgtggagagagacactggaaacttgtattgtactcgtcctgtagatcgtgagcagtatgaatcttttgagataattgcctttgcaacaactccagatgggtatactccagaacttccactgcccctaataatcaaaatagaggatgaaaatgataactacccaatttttacagaagaaacttatacttttacaatttttgaaaattgcagagtgggcactactgtgggacaagtgtgtgctactgacaaagatgagcctgacacgatgcacacacgcctgaagtactccatcattgggcaggtgccaccatcacccaccctattttctatgcatccaactacaggcgtgatcaccacaacatcatctcagctagacagagagttaattgacaagtaccagttgaaaataaaagtacaagacatggatggtcagtattttggtctacagacaacttcaacttgtatcattaacattgatgatgtaaatgaccacttgccaacatttactcgtacttcttatgtgacatcagtggaagaaaatacagttgatgtggaaatcttacgagttactgttgaggataaggacttagtgaatactgctaactggagagctaattataccattttaaagggcaatgaaaatggcaattttaaaattgtaacagatgccaaaaccaatgaaggagttctttgtgtagttaagcctttgaattatgaagaaaagcaacagatgatcttgcaaattggtgtagttaatgaagctccattttccagagaggctagtccaagatcagccatgagcacagcaacagttactgttaatgtagaagatcaggatgagggccctgagtgtaaccctccaatacagactgttcgcatgaaagaaaatgcagaagtgggaacaacaagcaatggatataaagcatatgacccagaaacaagaagtagcagtggcataaggtataagaaattaactgatccaacagggtgggtcaccattgatgaaaatacaggatcaatcaaagttttcagaagcctggatagagaggcagagaccatcaaaaatggcatatataatattacagtccttgcatcagaccaaggagggagaacatgtacggggacactgggcattatacttcaagacgtgaatgataacagcccattcatacctaaaaagacagtgatcatctgcaaacccaccatgtcatctgcggagattgttgcggttgatcctgatgagcctatccatggcccaccctttgactttagtctggagagttctacttcagaagtacagagaatgtggagactgaaagcaattaatgatacagcagcacgtctttcctatcagaatgatcctccatttggctcatatgtagtacctataacagtgagagatagacttggcatgtctagtgtcacttcattggatgttacactgtgtgactgcattaccgaaaatgactgcacacatcgtgtagatccaaggattggcggtggaggagtacaacttggaaagtgggccatccttgcaatattgttgggcatagcattgctcttttgcatcctgtttacgctggtctgtggggcttctgggacgtctaaacaaccaaaagtaattcctgatgatttagcccagcagaacctaattgtatcaaacacagaagctcctggagatgacaaagtgtattctgcgaatggcttcacaacccaaactgtgggcgcttctgctcagggagtttgtggcaccgtgggatcaggaatcaaaaacggaggtcaggagaccatcgaaatggtgaaaggaggacaccagacctcggaatcctgccggggggctggccaccatcacaccctggactcctgcaggggaggacacacggaggtggacaactgcagatacacttactcggagtggcacagttttactcagccccgtcttggtgaagaatccattagaggacacactctgattaaaaattaaacaatgaaagaaagtgtatctgtgtaatcaagatgaaaatcacaagcatgcccaagactatgtcctgacatataactatgaaggaagaggatcggtggctgggtctgtaggttgttgcagtgaacgacaagaagaagatgggcttgaatttttggataatttggagcccaaatttaggacactagcagaagcatgcatgaagagatgagtgtgttctaataagtctctgaaagccagtggctttatgacttttaaaaaaaattacaaaccaagaattttttaaagcagaagatgctatttgtgggggtttttctctcattatttggatggaatctctttggtcaaatgcacatttacagagagacactataaacaagtacacaaatttttcaatttttacatatttttaaattacttatcttctatccaaggaggtctacagagaaattaaagtctgccttatttgttacatttgggtataatgacaacagccaatttatagtgcaataaaatgtaattaattcaagtccttattatagactatttgaagcacaacctaatggaaaattgtagagaccttgctttaacattatctccagttaattaagtgttcatgtggtgcttggaaactgttgttttcctgaacatctaaagtgtgtagactgcattcttgctattattttattcttgtaatgtgaccttttcactgtgcaaagggagatttctagccaggcattgactattacaatttcattttggtggagtttagttttaggttttattgtatataaaatcctgcactgaatctgtgtctcctctgttacctacttttgccagtgaaatttaagttttaaaatactttcagaatgtatttttactactgcaagtttttggtctttaaaatgtcaagtagcatctctctctttctctctgtctctttctgtttctctctccagttttttttttttttttaatttccatatgggctaaagaatccaaatattttaaaaatctgtctctcttttcttctctcataaagtgaattattccttttttttgttttatgtaagtgtatatattcttagtttttcttgaaatcattgtaatgttaactttgttgtttcaaatatcttggtgattgcttcattatctcttcaacaaaaaaaacctttaattttgccattgaaactgtagaactatgccatgcttttattagaagcagtgctctgtgttaacaacaagaatggtgtaattagaattgggatgtggatatttactgtatgacaacacatttacagttctgtaatgcaaggatgcagtttaaaaatgtgaagtagtgatggtttttgaaataagctttaaaatatagggatcttgaaggctccctggggtaactattttataacttagataaaatggctagtcatatctgtgtgtttgtaaagttatttttttaatattttaagattacaattttaacaaatgtagaaatgagccaaactatttaaattttaaaacagtaaaacaaaatgaaacttaatagctcacaaaattccagtccatgtttcatgacttattttagtcaatgaattttctatttatactaaacatatggacattttaaatgtgtttctaatatttttgattatctataatgtgcctgtcttcaattcacaagattgggttataacaattatttgccagattaacactagggaattatttgataaccagcttatcttatcagtagttttattgctgatcaggcaaaaatagttttccaaagttatttttaataaagtatatacaaaattcttatatattactagtcatgataaagtaaattaagcagtttttaaaacttagtgtgagtttgttcatcacaggtctgatatgagtttaagggatttcgcactccctgaatcagagaagtaagaccccttccttagattcctgttatacattttttaaaatgtagagtttgttttggagacattttcagtgcattgttattgccatatttatataatatgactattctaaaggctgtgaggccatggggtattggttaagttgcttgcttttgctttgtccattttcatcattttaaaatgggggataataacagaacttgtttcctagggccattgtaagtcacttgaataaaaaatagttttgaagca

SEQ ID NO: 2238 - DNA, 5467 bp, Homo sapiens
gcggtggtggacacgtcgagccgggtagaagtggaggggccgttcgaagagtcgtgagggggtgacgggttaagattcggagagagaggtgctagtggctggacttgacctggaaaggaatcttctgctgactctcaacttttcctggaaaaaatggatcattcccaccatatggggatgagctatatggactccaacagtaccatgcaaccttctcaccatcacccaaccacttcagcctcacactcccatggtggaggagacagcagcatgatgatgatgcctatgaccttctactttggctttaagaatgtggaactactgttttccggtttggtgatcaatacagctggagaaatggctggagcttttgtggcagtgtttttactagcaatgttctatgaaggactcaagatagcccgagagagcctgctgcgtaagtcacaagtcagcattcgctacaattccatgcctgtcccaggaccaaatggaaccatccttatggagacacacaaaactgttgggcaacagatgctgagctttcctcacctcctgcaaacagtgctgcacatcatccaggtggtcataagctacttcctcatgctcatcttcatgacctacaacgggtacctctgcattgcagtagcagcaggggccggtacaggatacttcctcttcagctggaagaaggcagtggtagtggatatcacagagcattgccattgacatcaaactctatggcgtggccttatcgattgcagtgggaagttgttgaagacttgaagacgtgattcctgctccaatcatcccttcttgctcctctttgtgcacgtacacacacacacacacacacacacacacacacccctgctcaacagaggtttagtttacagtctctgaactaaagtagtaacctcccaaattgttttttctaataagctgagattcccatttctcttaaggagaagccacccatgagatgtcttttccttctccatcatcttagagccaagttatatgttcttgtctaatccatgtagctttttgttcaatgacttgatcatctgcttcctttttgaatttttaacagatagtaagtaaatttggtggttttttcccctgggtcagtgatggaaaggggttaacttcagccaggattgatggcagctgagggaaattcttgcccaactaaacccagaactcaaacttaacattagaaaataaggtccagggccggacacagtggcccatgcctgtaatcccagcactttggggggccaaggcaggctggatcacctgaggacaggagttcgagaccagtctggccaacatggggaaaccccgtctctactaaaaatacaaaaattagccgggcatggtggtgggcgcctgtaatcccagctactcagaaggctgaggcaggagaatcacttgaacctaggaggcggaggttgcagtgagccaagatggcgccattgcactccagcctgggtgacaagagtgaaactccatctcaaaaaaaaagaaaagaaggtccagcttttggattcaatgagtgggaaatacattgtgcctttctctagatgtgatacgttataccaaaatctttgtagtgtgcagagcggtggtttgagactaaatacaggcttagaacttgcagagtgtgtattcttggatggctgatgcatcgacttgcattcccacttaacactttgattagcatgaacttgccaatcaaaaaatgacaatcaatttgagaaaatagaaatagatatttttaaataaaaccattcacagtttactttgtcttgataccttggtttgtcccagctgaagtgaagcaagagagtttgaattaatttttccattataatgttttcgcatgtctgcctctaaaactgtgattttcaagctttagcgtgcatcagaatcacctgtagggcttgttaaaacactaattgctgggcctcaacccaaaagcccccaaagtggcacttctgagttcctgctgatgttacaagggaccacacttttgagaatctgtgctttaagctaaggaaatattgcctggtgggttggctgcctggtattgggcatggaaatttgaattgctgattggtagatggtgtgtctggacttaactcacgtagtaaatactgctgatcaatacctaatcattccacatttattgagctccacctgtgtgtatgtgtacccaagcacacatgtgtgaagggctatagccaaagtatttttactagcctgtatgaaatcactagtccttatttttaaaggtctatggtttcttggaagtagtttgattgttgagagagacctttgatctgcagtgtaaatctaccagtcatgggccagaagggcaaaagcccagctttctctttggaaagactcaggctgtggtttgttgatggccaggttttcctcaggctccaacaactgtgcttataccaagcagatcctcatcctccatataatcatctttgttattcgtgggggtttaattacattacaagtggccaaaacccctgttctcagtgaagaaccacattggatttgtattctgttcagttgtagtctacactgcagtcttattcctggttcaaactacctctttaaattgatttgtcttgtgctggtctgttaaatcctgccctccttggtgctagatccagttgtgcctcagggcagaggaaacaaaacacagctatcctgttggcctgtgttgtggttttgaagtttgtactttctctgtgggtgccagttaaatattggagagcaaggaatgtggacttgtatggctttgaaccaagagagggttatgagcctactggattgaggttaaaatccaagaaccaacatttagagctttgtgcttttctctcattccatcactttgtaatgatgatacttaacatgagcagggtgaatgacaggtactgacgaagtccaacacaaaggtataatacagcctgttgtctaaagccaaggagtcataaaaccatgagaaataaataggaatcaatagttagtagtgacattggtgctctctagaaatctcagcatgagctgctatagaataccctcccagcaacaaaacctaatcagtaaggccagctagacccaatggctcatgcctgtaatcccaacactttgggaggccaaggtgggaggatggcttgtgtccagaagttcgagaccagcctggacaacatagtgagatcctatctctataaaaaatcaaaaattagccaggcatggtggtgcatacctatagtcctggctatttgggaggctgaggcaggaggattgctttagccctggaggtcgaggctgcagtaagccatgattgcgccactgcactcagcccgggtgacaaagcaagaccctgtctcagaaaaaaagaaaattcaaggccagttaagacaaaatgctatgactttgaaattcacagaaagaaataacagtttagattaggtcttcaggtattcaggatagagataatctcctgaaaaacctgaatttcagagattcttagactggctgccaaaggatgaagctagtgaaggagaaaaagcttaaattccatcttgagctcttggattgtgataatacaatgatttcattaacttttcatttctgtatacctgttcatttggaatttaatgcttgacttctttgttcattttggatctaaacttctcttttcttccttccccattcacatctattagaagactgcatcaccatttctttggcccccttactctgttgtcctttcccttttctttcagtttttttaatcgcatgtctagtatattaagtctccatagccctcctgatgcagtagacagtgctatgctgtggatataataccaaccagaaattggcatttataaacctgttaagagactttaagcatgcttcaagaggcagttgacccactggaatttctataaggctggtacccttcccagagttacagaatcttaggtgccgtctctagtctgtgagggaggaactcccagcatccccattgcccacaaatggaatcctcactgtatccactaggagattagaaattaaggtttcttcactacttctatggtagggttgtctgaaattccctttcaggctgtgggtactggtcttgggttctagtcataaggggttccttataaggagcaggcggaggggagtacactttcatgtgatttaattttgatcctgccctctccagctgctccttcaaaagatacatcaaaagatagaaactctgggctgggcacagtggctcacacactttgggaggccaagcgggggtgcagatcacctgaggtcaggagtttgagaccagcctggccaatgtggtgaaaccccatctctactaaaaatacaaaaattagctgggcgtggtggtgcatgcctgtaatcccagctactcgggaggctgaggcaggagaatcgcttgaacccaggaggcggaggttgcagtgagccaagatggcgccattgcactccagcctgggcgacaagagcaaaactccgtctcaaaaaaaaaaaaaagatacaaagtctgcatttgatataatgccttaattactgggtctacaattaatgttgactgttttagattgtaagctcctggagagcagtattgctgtagtaggaatgttttaacagtgtcatatgaaaaagaacaaaataaatattttgattttgtgattctaaaaaaaaaaaaaaaaaaaagtgctgggattacaggcatgagccaccacacctgtccctctccccctcgtattactcagacttaaactaccccaaaaaggctaaagtcctgctaagagtctccgtagaactgatgattcaagaggctcttatgatcacagctggtgattccctgtgttgaattagtgaaaacaggccaggcacagtaatcccagcactttgagaggactgcttaatgtcaggagctcaagcccagcttgggcaacacagatgcctgtctctacataaaacaataaaaatttttaaaaaaaatttttttttaatgcccagaacaatagggcatgattcaaaattatcctccgagctgcctctctggttctttctgggaaaaacacttaggcaagttgagaaaggaaggaaagttggaataatggcaaaactgttagaagcattcctctttcctccattgcctgtcctcccaacattatacccaaactagttacaaagccattctgtaaagagatcgggtacctacaatttcttcagatttacacaatatccactagaatttaatttctacaagggcagggatctttgttgagtggcacatggtagacactcaataaatacttattgaatagatgggttaagtgaaagtggcagggatcaactagagtgtcctgtgcttagggtcttttaataaagatggaaagaatgatgttaa

SEQ ID NO: 2239 - DNA, 3373 bp, Homo sapiens
ggtaaatatattaaagaccaagatttgcagtaacatttatcatatcaaatctccaaatctagtggaggaatttaaacagaggacacagacagctcttgggagagtcttcatatttttattgctttaggagaggagcagacagctcttagctagggtcagatttcaaattctcatctcttggtgccaataccaccaccagattcttctttgaagtcaacttttgagatcttcactaagtacacgttggtgtctgaagattcacacgagtgcctctggtaatcattttcttcagggaatcacagtctctcctctcagcaaagcatccactgtactgaactttgcttttggaaacatcttcttcctgagacctcgttgaaagaaactctctggtgtcatactttccaatatggaggtgaagaactttgcagtttgggattatgttgtatttgcagccctctttttcatttcctctggaattggggtgttctttgccattaaggagagaaaaaaggcaacttcccgagagttcctggttgggggaaggcaaatgagctttggccctgtcggcttgtctctgacagccagcttcatgtcagctgtcacggtcctggggaccccttctgaagtctaccgctttggggcatccttcctagtcttcttcattgcttacctatttgtcatcctcttaacatcagagctctttctccctgtgttctacagatctggtatcaccagcacttatgagtacttacaactacgattcaacaaaccagttcgctatgctgccacggtcatctacattgtacagacgattctctacacaggagtggtggtgtatgctcctgccctggcactcaatcaagtgactgggtttgatctctggggctctgtgtttgcaacaggaattgtttgcacattctactgtaccctgggaggattaaaagcagtggtgtggacagatgcatttcagatggttgtcatgattgtgggcttcttaacggttctcattcaaggatcaactcatgctgggggattccacaatgtattagagcaatcaacaaatggatctcgactacatatatttgactttgatgtagatcctctcaggcgacacactttttggactatcacagtgggaggaacttttacttggctcggaatctatggggtcaatcaatcaactattcagcgatgcatctcttgcaaaacagaaaagcatgctaagcttgccttgtattttaacttgctgggtctctggatcattctggtgtgtgctgtcttctctggcttaatcatgtactctcactttaaagactgtgacccttggacttctggcatcatctcagcaccagaccagctgatgccgtactttgtcatggagatatttgccacaatgccaggactgccaggactttttgtggcttgtgccttcagtggaactctgagcaccgtggcttccagcatcaatgccttggcaacagtgacctttgaggattttgtcaagagctgttttcctcatctctccgacaagctgagcacctggatcagtaaaggcttatgtaggtacagctggtggactttctattccatatcatgaaatgtacatgtggtagatgtcaaaatcctgcatgtgctattcaggacacacttataaacacaaatgcactgtgagatatgtgaagaatcccacacatagattcttacacttccaaagatccagcagggtatcaggaaagaatgactagctagtttaccttaactgcctttattttcagatactcttctatacttaccctacactctagacgaggcttatccaacccacggcctgtgggccgcatacggcccaggatggctttgaatgcagcccaacacaaattcgtaaactttcttaaaacattctggaatttttttgtaattttttaaatcttagcagctatcattagtgtttgtgtattttatgtgtactccaaggcaactccttctttcaacgtggcccagggaggccaaaagattggacacccctgcaaactaatcacatcaatctctcttgattacactgtgtgatggtcatattagtctctctacatgggaagatgttgtgcttactatggccagtcactttgacaaagaaaagccaaattcttttctaaagaattgttccttattaccaaactcccagtaaccccctcaaagaataattgccccttgcttaatcatgcaattgcatattatgtttatactcacttcagcacttatcagagataattgcagtttcacaaggtttactttttaaagtataaacaaattatgtatttacttactaatagaaaatataggtaatttggggaaatttatgtacattgttaaataaaattatatctatctaagtctcttatttggcgtgatgtgtacctctatggctgtggctgcatctgtcatgggaggtgttgtgcaggcttccctcagcattcacggcatgtgtggaggaccaatgctgggcttattctccctgggaatcgtgttcccttttgtgaattggaagggtgcactaggaggtcttcttactggaatcaccttgtcattttgggtggccattggggccttcatttaccctgcaccagcctctaagacatggcctttgcctctgtcaacagaccaatgtatcaaatcaaatgtgacagcaacagggcctccagtactatccagcagacctggaatagctgatacctggtactcgatctcctacctttactacagtgcagtgggctgcttaggatgcattgttgctggagtaatcatcagcctcataacaggtcgccaaagaggtgaggatattcaaccactgttaattagaccagtttgtaatttattttgcttttggtctaagaagtacaaaacactatgctggtgtggagttcagcatgacagtgggacagagcaggaaaaccttgagaatggcagtgcccggaaacagggggctgaatctgtcttacagaacggactcagaagagaaagcctggtacatgttccaggctatgatcctaaggacaaaagctacaacaatatggcatttgagactacccatttctaaggcaatacctgtatgaatgcacacacacacgtgcaatacacacacacacacacaaactccacatacttcttgcctacttgttagtagatatgtatagttgccattgctagaagacagggatgtctggtgcctatttctacttatttataactacatgcaaaatgactgtctctcgggatattctttgaaagactccaactttcacagagaaaaaccaacctgctccaaatgcccttgactacttccttcttgaataaattagggctggatttcattacc

SEQ ID NO: 2240 - DNA, 3452 bp, Homo sapiens
gtcagtgtgacaactgatcgggtgaacgatgcaccactaaccaccatggaaacaaggaaaaataaagccagctcacaggatctctcttcactggattgagagcctcagcctgccgactgagaaaaagagttccaggaaaaagaaggaatcccggctgcagcctcctgccttcctttatattttaaaatagagagataagattgcgtgcatgtgtgcatatctatagtatatattttgtacactttgttacacagacacacaaatgcacctatttataccgggcaagaacacaaccatgtgattatctcaaccaaggaactgaggaatccagcacgcaaggacatcggaggtgggctagcactgaaactgcttttcaagacgaggaagaggaggagaaagagaaagaagaggaagatgttgggcaacatttatttaacatgctccacagcccggaccctggcatcatgctgctattcctgcaaatactgaagaagcatgggatttaaatattttacttctaaataaatgaattactcaatctcctatgaccatctatacatactccaccttcaaaaagtacatcaatattatatcattaaggaaatagtaaccttctcttctccaatatgcatgacatttttggacaatgcaattgtggcactggcacttatttcagtgaagaaaaactttgtggttctatggcattcatcatttgacaaatgcaagcatcttccttatcaatcagctcctattgaacttactagcactgactgtggaatccttaagggcccattacatttctgaagaagaaagctaagatgaaggacatgccactccgaattcatgtgctacttggcctagctatcactacactagtacaagctgtagataaaaaagtggattgtccacggttatgtacgtgtgaaatcaggccttggtttacacccagatccatttatatggaagcatctacagtggattgtaatgatttaggtcttttaactttcccagccagattgccagctaacacacagattcttctcctacagactaacaatattgcaaaaattgaatactccacagactttccagtaaaccttactggcctggatttatctcaaaacaatttatcttcagtcaccaatattaatgtaaaaaagatgcctcagctcctttctgtgtacctagaggaaaacaaacttactgaactgcctgaaaaatgtctgtccgaactgagcaacttacaagaactctatattaatcacaacttgctttctacaatttcacctggagcctttattggcctacataatcttcttcgacttcatctcaattcaaatagattgcagatgatcaacagtaagtggtttgatgctcttccaaatctagagattctgatgattggggaaaatccaattatcagaatcaaagacatgaactttaagcctcttatcaatcttcgcagcctggttatagctggtataaacctcacagaaataccagataacgccttggttggactggaaaacttagaaagcatctctttttacgataacaggcttattaaagtaccccatgttgctcttcaaaaagttgtaaatctcaaatttttggatctaaataaaaatcctattaatagaatacgaaggggtgattttagcaatatgctacacttaaaagagttggggataaataatatgcctgagctgatttccatcgatagtcttgctgtggataacctgccagatttaagaaaaatagaagctactaacaaccctagattgtcttacattcaccccaatgcatttttcagactccccaagctggaatcactcatgctgaacagcaatgctctcagtgccctgtaccatggtaccattgagtctctgccaaacctcaaggaaatcagcatacacagtaaccccatcaggtgtgactgtgtcatccgttggatgaacatgaacaaaaccaacattcgattcatggagccagattcactgttttgcgtggacccacctgaattccaaggtcagaatgttcggcaagtgcatttcagggacatgatggaaatttgtctccctcttatagctcctgagagctttccttctaatctaaatgtagaagctgggagctatgtttcctttcactgtagagctactgcagaaccacagcctgaaatctactggataacaccttctggtcaaaaactcttgcctaataccctgacagacaagttctatgtccattctgagggaacactagatataaatggcgtaactcccaaagaagggggtttatatacttgtatagcaactaacctagttggcgctgacttgaagtctgttatgatcaaagtggatggatcttttccacaagataacaatggctctttgaatattaaaataagagatattcaggccaattcagttttggtgtcctggaaagcaagttctaaaattctcaaatctagtgttaaatggacagcctttgtcaagactgaaaattctcatgctgcgcaaagtgctcgaataccatctgatgtcaaggtatataatcttactcatctgaatccatcaactgagtataaaatttgtattgatattcccaccatctatcagaaaaacagaaaaaaatgtgtaaatgtcaccaccaaaggtttgcaccctgatcaaaaagagtatgaaaagaataataccacaacacttatggcctgtcttggaggccttctggggattattggtgtgatatgtcttatcagctgcctctctccagaaatgaactgtgatggtggacacagctatgtgaggaattacttacagaaaccaacctttgcattaggtgagctttatcctcctctgataaatctctgggaagcaggaaaagaaaaaagtacatcactgaaagtaaaagcaactgttataggtttaccaacaaatatgtcctaaaaaccaccaaggaaacctactccaaaaatgaacaaaaaaaaaaaaagcgaaagactgcagttgtgctaaaaacaaaacaaaacaaacaaacaaacaaaaaagtaaaaaaagattactttcgagagagaagtttaagcttcaccaatgctgctcctgaccaatggaaatatgtacaacttcagcattttaagtaactggcttcaaggggtactgtggcaaccaaataaaataactccattttctaaaactttcatgtaacttttatgtctggactacagttcaagtggacaaaaacatttctgtattttttttaagtaaataagagtagttgaactgagcaatacctcctcctgtgttgtattacacatattagccacgagtttttgcagtgaccagataaacttgaattgacacgtggtgtaataaaatggacaaattctgtagagtagacacagtgagtatgtggacctcttttataaggaaaaatacattttggattaaaatcaa

SEQ ID NO: 2241 - DNA, 3739 bp, Homo sapiens; identical to SEQ ID NO: 2168

SEQ ID NO: 2242 - DNA, 2392 bp, Homo sapiens
ccgacaagtgcgctgcaccagtggcaccggctgggggcgagccgacctcgagcagccgccgccgccgccgtcgttgctactgccgcagcggagttcagagggcccggaggtgggagacttcccacacggtgactgagatgtcgtccactgcggctttttaccttctctctacgctaggaggatacttggtgacctcattcttgttgcttaaatacccgaccttgctgcaccagagaaagaagcagcgattcctcagtaaacacatctctcaccgcggaggtgctggagaaaatttggagaatacaatggcagcctttcagcatgcggttaaaatcggaactgatatgctagaattggactgccatatcacaaaagatgaacaagttgtagtgtcacatgatgagaatctaaagagagcaactggggtcaatgtaaacatctctgatctcaaatactgtgagctcccaccttaccttggcaaactggatgtctcatttcaaagagcatgccagtgtgaaggaaaagataaccgaattccattactgaaggaagtttttgaggcctttcctaacactcccattaacatcgatatcaaagtcaacaacaatgtgctgattaagaaggtttcagagttggtgaagcggtataatcgagaacacttaacagtgtggggtaatgccaattatgaaattgtagaaaagtgctacaaagagaattcagatattcctatactcttcagtctacaacgtgtcctgctcattcttggccttttcttcactggcctcttgccctttgtgcccattcgagaacagttttttgaaatcccaatgccttctattatactgaagctaaaagaaccacacaccatgtccagaagtcaaaagtttctcatctggctttctgatctcttactaatgaggaaagctttgtttgaccacctaactgctcgaggcattcaagtaagtttctggaatgatgcattttggaagcagcatagctcaccagtttaacacaaatataaagggcaagaacttttaactgacttagtttggcccttgactctgatgctgctgctttactgatccacaaatgaggaccttaagctcttccttacacttagcaataaagcattggcatttctggagtgtatatttgggtattaaatgaagaacaagaatacaaaagagcttttgatttgggagcaactggggtgatgacagactatccaacaaagcttagggattttttacataacttttcagcatagaaaaagaggtacttagaagtattgaaggaaaaaatgaagacctaagaaaaaaatatttcatgatcatttccctaagccatttccagaatggtaaaaggtttaatcagtttttattacctcatttttaagcctgtatgagaatgtagaaactatatattatatgtatatttattttaaataatattgtatattttatgtttgtaaattgtttagaaagataattggttatgagatgtaagttttaatttcttaatgtgcatttttgtttctagatcttatacagaaatcttgattaataacatacacagaaatgtacatactacatcatctacagaaatcttgatcaataacctagaaactaggttatctaggttattgatcaagatttctgtagatgatgcagtgttctatcataagtaattctggaatcaaagactattggatacatttggcattgggctgagtgtggtggctcatgcctgtaatcccagcactttgggaggctgagacaggcggatcatctgaagtcaggagttaaagaccagcctggccaacatggcaaaaccccatctctaccaaaaatacaaaaattaaccatgcgtggtggtacacgtctgtcatcccagcagctcttaaggctgaggcacaagaattgcttgaacccgggaggcagaggctgtagtgagccaagatagcaccactgcactccagcctgggagacagagtgagactccgtctcgtttgaaccactgcacccggccagtaaaagaaattttgaaggccattgcagctatttggtagtgtcttgttatttctaggtgtaccttagttaaagaggaaaaataaaacggaaaaaagcttggaaatcagtgatgtgtagttatttggcaagttatacataatcagcagcagccaggctcaagaaaataaaagttgattagttgatcagaaataaaatctgtagagtgaattagatttctgagttgttgttgttaatggaacattctatttgagacctttttcaggtgtgtagcaattctaccatgtccatttttttaagcattaaaaaggaacttaccagttgtaaattaagacaagatccaaatagtcatatttttgtgtttc

SEQ ID NO: 2243 - DNA, 3739 bp, Homo sapiens; identical to SEQ ID NO: 2168

SEQ ID NO: 2244 - DNA, 3739 bp, Homo sapiens; identical to SEQ ID NO: 2168

SEQ ID NO: 2245 - DNA, 3280 bp, Homo sapiens
aatttagagaagatgtagggagtgttcaacatgttcgttgtggaagagaaagagctaagagagaggagcttaaagacacaaacgggtagaatcaaggagtgtgctctcaaatgagaggaacaggagtgacattaaccttgaaatgctcggagactctactccttcatgacagtaggaggataattaacaatagatacaaatgcagtgtaggaattgatgagtgccatcagaaagctgtatcatgagctgcctgcacttctaaagtgtccagtggatttttaatcacatgagcctggaaatagggttatgagaagaagctcagagcagagcaccgaaagtggccactaccagcatgaagagcccaacaattcaaactggtgaagtgagaaaaacagaatgcagctttcaaggttgaggttcgtttcaagcagttggcttgtgggactctgagagatgctgctgcccatgacatgcgggaattatcatgatcaactacccagcttggatttcacccagtggccaagagctttgtgtgggagacggcaagggttggatttttcaaaagagtaaaccagttggatttttcaaagattttctcaggataaatcatgaggaacctataacccttttggccacatgcaaaaaagcaagacccgtgaccaaggtgtagactaagaagtggagtcatgcttcacacggccatatcatgctggcagccattcctgggtctggctgtggtgttaatcttcatgggatccaccattggctgccccgctcgctgtgagtgctctgcccagaacaaatctgttagctgtcacagaaggcgattgatcgccatcccagagggcattcccatcgaaaccaaaatcttggacctcagtaaaaacaggctaaaaagcgtcaaccctgaagaattcatatcatatcctctgctggaagagatagacttgagtgacaacatcattgccaatgtggaaccaggagcattcaacaatctctttaacctgcgttccctccgcctaaaaggcaatcgtctaaagctggtccctttgggagtattcacggggctgtccaatctcactaagcttgacattagtgagaataagattgtcattttactagactacatgttccaagatctacataacctgaagtctctagaagtgggggacaatgatttggtttatatatcacacagggcattcagtgggcttcttagcttggagcagctcaccctggagaaatgcaacttaacagcagtaccaacagaagccctctcccacctccgcagcctcatcagcctgcatctgaagcatctcaatatcaacaatatgcctgtgtatgcctttaaaagattgttccacctgaaacacctagagattgactattggcctttactggatatgatgcctgccaatagcctctacggtctcaacctcacatccctttcagtcaccaacaccaatctgtctactgtacccttccttgcctttaaacacctggtatacctgactcaccttaacctctcctacaatcccatcagcactattgaagcaggcatgttctctgacctgatccgccttcaggagcttcatatagtgggggcccagcttcgcaccattgagcctcactccttccaagggctccgcttcctacgcgtgctcaatgtgtctcagaacctgctggaaactttggaagagaatgtcttctcctcccctagggctctggaggtcttgagcattaacaacaaccctctggcctgtgactgccgccttctctggatcttgcagcgacagcccaccctgcagtttggtggccagcaacctatgtgtgctggcccagacaccatccgtgagaggtctttcaaggatttccatagcactgccctttctttttactttacctgcaaaaaacccaaaatccgtgaaaagaagttgcagcatctgctagtagatgaagggcagacagtccagctagaatgcagtgcagatggagacccgcagcctgtgatttcctgggtgacaccccgaaggcgtttcatcaccaccaagtccaatggaagagccaccgtgttgggtgatggcaccttggaaatccgctttgcccaggatcaagacagcgggatgtatgtttgcatcgctagcaatgctgctgggaatgataccttcacagcctccttaactgtgaaaggattcgcttcagatcgttttctttatgcgaacaggacccctatgtacatgaccgactccaatgacaccatttccaatggcaccaatgccaatactttttccctggaccttaaaacaatactggtgtctacagctatgggctgcttcacattcctgggagtggttttattttgttttcttctcctttttgtgtggagccgagggaaaggcaagcacaaaaacagcattgaccttgagtatgtgcccagaaaaaacaatggtgctgttgtggaaggggaggtagctggacccaggaggttcaacatgaaaatgatttgaaggcccacccctcacattactgtctctttgtcaatgtgggtaatcagtaagacagtatggcacagtaaattactagattaagaggcagccatgtgcagctgcccctgtatcaaaagcagggtctatggaagcaggaggacttccaatggagactctccatcgaaaggcaggcaggcaggcatgtgtcagagcccttcacacagtgggatactaagtgtttgcgttgcaaatattggcgttctggggatctcagtaatgaacctgaatatttggctcacactcacggacaattattcagcattttctaccactgcaaaaaacaaaagaaaaaataaaaaagaacaacctacagtgtaggatttacatattaaaaagacacatttgtctaaaacatactctacagaaaaatttgtatctatgattatcatttgttaaagccttgcatcataccatattgttggttcagtaccacaaagagatcaatatattcttttcttccttttttgaaacatatatgctgtacatgttttaaagcaatatgaatgagaggttgtgcttttagttactcaccactatagatccaagtgtgatttcaccttccgttacctacagatgaccctgagactagatccctggagttatgggcggagatattttgagagatgtgtttgtctgatgtaggatgccaagaaacaggacccaaggcaaaactgctcaactctgttaacttctgttactataaataaaggcatgtgcctagttttgatacagaa

SEQ ID NO: 2246 - DNA, 1713 bp, Homo sapiens; identical to SEQ ID NO: 58

SEQ ID NO: 2247 - DNA, 1634 bp, Homo sapiens
aaaatgtgcttcttacaggaatataaatagtttctggaaaggacactgacaacttcaaagcaaaatgaagttctttctgttgcttttcaccattgggttctgctgggctcagtattccccaaatacacaacaaggacggacatctattgttcatctgtttgaatggcgatgggttgatattgctcttgaatgtgagcgatatttagctccgaagggatttggaggggttcaggtctctccaccaaatgaaaatgttgcaatttacaaccctttcagaccttggtgggaaagataccaaccagttagctataaattatgcacaagatctggaaatgaagatgaatttagaaacatggtgactagatgtaacaatgttggggttcgtatttatgtggatgctgtaattaatcatatgtgtggtaacgctgtgagtgcaggaacaagcagtacctgtggaagttacttcaaccctggaagtagggactttccagcagtcccatattctggatgggatttcaatgatggtaaatgtaaaactggaagtggagatatcgagaactacaatgatgctactcaggtcagagattgtcgtctgactggtcttcttgatcttgcactggagaaggattacgtgcgttctaagattgccgaatatatgaaccatctcattgacattggtgttgcagggttcagacttgatgcttccaagcacatgtggcctggagacataaaggcaattttggacaaactgcataatctaaacagtaactggttccctgcaggaagtaaacctttcatttaccaggaggtaattgatctgggtggtgagccaattaaaagcagtgactactttggtaatggccgggtgacagaattcaagtatggtgcaaaactcggcacagttattcgcaagtggaatggagagaagatgtcttacttaaagaactggggagaaggttggggtttcgtaccttctgacagagcgcttgtctttgtggataaccatgacaatcaacgaggacatggggctggaggagcctctattcttaccttctgggatgctaggctgtacaaaatggcagttggatttatgcttgctcatccttacggatttacacgagtaatgtcaagctaccgttggccaagacagtttcaaaatggaaacgatgttaatgattgggttgggccaccaaataataatggagtaattaaagaagttactattaatccagacactacttgtggcaatgactgggtctgtgaacatcgatggcgccaaataaggaacatggttattttccgcaatgtagtggatggccagccttttacaaattggtatgataatgggagcaaccaagtggcttttgggagaggaaacagaggattcattgttttcaacaatgatgactggtcattttctttaactttgcaaactggtcttcctgctggcacatactgtgatgtcatttctggagataaaattaatggcaattgcacaggcattaaaatttacgtttctgatgatggcaaagctcatttttctattagtaactctgctgaagatccatttattgcaattcatgctgaatctaaattgtaaaatttaaaattaaatgcatgtcctcaaaacaata

SEQ ID NO: 2248 - DNA, 2756 bp, Homo sapiens
gcatgagaggccagcctgctagggaaatccaggaatctgcaacaaaaacgatgacagtctgaaatactctctggtgccaacctccaaattctcgtctgtcacttcagacccccactagttgacagagcagcagaatttcaactccagtagacttgaatatgcctctgggcaaagaagcagagctaacgaggaaagggatttaaagagtttttcttgggtgtttgtcaaacttttattccctgtctgtgtgcagaggggattcaacttcaatttttctgcagtggctctgggtccagccccttacttaaagatctggaaagcatgaagactgggctttttttcctatgtctcttgggaactgcagctgcaatcccgacaaatgcaagattattatctgatcattccaaaccaactgctgaaacggtagcacctgacaacactgcaatccccagtttaagggctgaagctgaagaaaatgaaaaagaaacagcagtatccacagaagacgattcccaccataaggctgaaaaatcatcagtactaaagtcaaaagaggaaagccatgaacagtcagcagaacagggcaagagttctagccaagagctgggattgaaggatcaagaggacagtgatggtcacttaagtgtgaatttggagtatgcaccaactgaaggtacattggacataaaagaagatatgagtgagcctcaggagaaaaaactctcagagaacactgattttttggctcctggtgttagttccttcacagattctaaccaacaagaaagtatcacaaagagagaggaaaaccaagaacaacctagaaattattcacatcatcagttgaacaggagcagtaaacatagccaaggcctaagggatcaaggaaaccaagagcaggatccaaatatttccaatggagaagaggaagaagaaaaagagccaggtgaagttggtacccacaatgataaccaagaaagaaagacagaattgcccagggagcatgctaacagcaagcaggaggaagacaatacccaatctgatgatattttggaagagtctgatcaaccaactcaagtaagcaagatgcaggaggatgaatttgatcagggtaaccaagaacaagaagataactccaatgcagaaatggaagaggaaaatgcatcgaacgtcaataagcacattcaagaaactgaatggcagagtcaagagggtaaaactggcctagaagctatcagcaaccacaaagagacagaagaaaagactgtttctgaggctctgctcatggaacctactgatgatggtaataccacgcccagaaatcatggagttgatgatgatggcgatgatgatggcgatgatggcggcactgatggccccaggcacagtgcaagtgatgactacttcatcccaagccaggcctttctggaggccgagagagctcaatccattgcctatcacctcaaaattgaggagcaaagagaaaaagtacatgaaaatgaaaatataggtaccactgagcctggagagcaccaagaggccaagaaagcagagaactcatcaaatgaggaggaaacgtcaagtgaaggcaacatgagggtgcatgctgtggattcttgcatgagcttccagtgtaaaagaggccacatctgtaaggcagaccaacagggaaaacctcactgtgtctgccaggatccagtgacttgtcctccaacaaaaccccttgatcaagtttgtggcactgacaatcagacctatgctagttcctgtcatctattcgctactaaatgcagactggaggggaccaaaaaggggcatcaactccagctggattattttggagcctgcaaatctattcctacttgtacggactttgaagtgattcagtttcctctacggatgagagactggctcaagaatatcctcatgcagctttatgaagccaactctgaacacgctggttatctaaatgagaagcagagaaataaagtcaagaaaatttacctggatgaaaagaggcttttggctggggaccatcccattgatcttctcttaagggactttaagaaaaactaccacatgtatgtgtatcctgtgcactggcagtttagtgaacttgaccaacaccctatggatagagtcttgacacattctgaacttgctcctctgcgagcatctctggtgcccatggaacactgcataacccgtttctttgaggagtgtgaccccaacaaggataagcacatcaccctgaaggagtggggccactgctttggaattaaagaagaggacatagatgaaaatctcttgttttgaacgaagattttaaagaactcaactttccagcatcctcctctgttctaaccacttcagaaatatatgcagctgtgatacttgtagatttatatttagcaaaatgttagcatgtatgacaagacaatgagagtaattgcttgacaacaacctatgcaccaggtatttaacattaactttggaaacaaaaatgtacaattaagtaaagtcaacatatgcaaaatactgtacattgtgaacagaagtttaattcatagtaatttcactctctgcattgacttatgagataattaatgattaaactattaatgataaaaataatgcatttgtattgttcataatatcatgtgcacttcaagaaaatggaatgctactcttttgtggtttacgtgtattattttcaatatcttaataccctaataaagagtccataaaaatccaaa

SEQ ID NO: 2249 - DNA, 1637 bp, Homo sapiens
tggttcttataaaaacctcacagccttccactaacatcccgtaggagcctctctccctactgctgctacacaagaccctgagactgacctgcaggacgaaaccatgaagagcctgatccttcttgccatcctggccgccttagcggtagtaactttgtgttatggaatcacatgaaagcatggaatcttatgaacttaatcccttcattaacaggagaaatgcaaataccttcatatcccctcagcagagatggagagctaaagtccaagagaggatccgagaacgctctaagcctgtccacgagctcaatagggaagcctgtgatgactacagactttgcgaacgctacgccatggtttatggatacaatgctgcctataatcgctacttcaggaagcgccgagggaccaaatgagactgagggaagaaaaaaaatctctttttttctggaggctggcacctgattttgtatccccctgtagcagcattacagaaatacataggcttatatacaatgcttctttcctgtatattctcttgtctggctgcacccctttttcccgcccccagattgataagtaatgaaagtgcactgcagtgagggtcaaaggagagtcaacatatgtgattgttccataataaacttctggtgtgatactttcatcttgtaaatctgctttcttttgggaagatattgagatatttaaatcatggcccaccttacccaaaataggagattctgttcatctcatatctagtattaattagaaaaataactacataaaaagaaggaagctaagaaggcactcactcagccataaattctctaaaccctctctaccttggaatccgtgaatggaatctggtatgttttttgcaggattttcctattgtaaattgtggcaaatacagggctcccttcatttgcttttcatctcttatgcatcaaagtcaaaaacatttctgaatcaagataatctagaagagaaaaaaggaggaaaaggaaaagagaaagcagaagggacaaataaaagcaattggcaaaaactgtcaataatagtttatacacttaactatatcaataatcacattatatgtaaatagtctaaacaatccaattattttttacttctacttatgttatatttttacttctacatttgttaaaggttccacgctacatttttactattcttgctttaaataattttaataatttcttttaaagtttagataataagaaaatatcccgggccaggcacagtggccacacctgtaatctcagtagccatgaccataccaatgcactccagcctgtgaaacagagtgagactctgtctctacagaaaaataaaaaagaaaagaaagaaaagatctcatatatttacccatgtaattttcatttcctgttttcttcattcttctttccatctggtgtcacttcctttctgcctgacgacttcctttaacgttttttatagttcaggtctgcaggattctttaagttttgtatgcttgtttttattcttgaaagatattttcactgtatattgaatcccaagttgccacgtttcttttaattattttaaggtattccactgaattctagcttgcacaatttttcgatataaaattt

SEQ ID NO: 2250 - DNA, 4692 bp, Homo sapiens
gcacacagagcagcataaagcccagttgctttgggaagtgtttgggaccagatggattgtagggagtagggtacaatacagtctgttctcctccagctccttctttctgcaacatggggaagaacaaactccttcatccaagtctggttcttctcctcttggtcctcctgcccacagacgcctcagtctctggaaaaccgcagtatatggttctggtcccctccctgctccacactgagaccactgagaagggctgtgtccttctgagctacctgaatgagacagtgactgtaagtgcttccttggagtctgtcaggggaaacaggagcctcttcactgacctggaggcggagaatgacgtactccactgtgtcgccttcgctgtcccaaagtcttcatccaatgaggaggtaatgttcctcactgtccaagtgaaaggaccaacccaagaatttaagaagcggaccacagtgatggttaagaacgaggacagtctggtctttgtccagacagacaaatcaatctacaaaccagggcagacagtgaaatttcgtgttgtctccatggatgaaaactttcaccccctgaatgagttgatcattacaataaccttcaaaattccactagtatacattcaggatcccaaaggaaatcgcatcgcacaatggcagagtttccagttagagggtggcctcaagcaattttcttttcccctctcatcagagcccttccagggctcctacaaggtggtggtacagaagaaatcaggtggaaggacagagcaccctttcaccgtggaggaatttgttcttcccaagtttgaagtacaagtaacagtgccaaagataatcaccatcttggaagaagagatgaatgtatcagtgtgtggcctatacacatatgggaagcctgtccctggacatgtgactgtgagcatttgcagaaagtatagtgacgcttccgactgccacggtgaagattcacaggctttctgtgagaaattcagtggacagctaaacagccatggctgcttctatcagcaagtaaaaaccaaggtcttccagctgaagaggaaggagtatgaaatgaaacttcacactgaggcccagatccaagaagaaggaacagtggtggaattgactggaaggcagtccagtgaaatcacaagaaccataaccaaactctcatttgtgaaagtggactcacactttcgacagggaattcccttctttgggcaggtgcgcctagtagatgggaaaggcgtccctataccaaataaagtcatattcatcagaggaaatgaagcaaactattactccaatgctaccacggatgagcatggccttgtacagttctctatcaacaccaccaatgttatgggtacctctcttactgttagggtcaattacaaggatcgtagtccctgttacggctaccagtgggtgtcagaagaacacgaagaggcacatcacactgcttatcttgtgttctccccaagcaagagctttgtccaccttgagcccatgtctcatgaactaccctgtggccatactcagacagtccaggcacattatattctgaatggaggcaccctgctggggctgaagaagctctccttctattatctgataatggcaaagggaggcattgtccgaactgggactcatggactgcttgtgaagcaggaagacatgaagggccatttttccatctcaatccctgtgaagtcagacattgctcctgtcgctcggttgctcatctatgctgttttacctaccggggacgtgattggggattctgcaaaatatgatgttgaaaattgtctggccaacaaggtggatttgagcttcagcccatcacaaagtctcccagcctcacacgcccacctgcgagtcacagcggctcctcagtccgtctgcgccctccgtgctgtggaccaaagcgtgctgctcatgaagcctgatgctgagctctcggcgtcctcggtttacaacctgctaccagaaaaggacctcactggcttccctgggcctttgaatgaccaggacaatgaagactgcatcaatcgtcataatgtctatattaatggaatcacatatactccagtatcaagtacaaatgaaaaggatatgtacagcttcctagaggacatgggcttaaaggcattcaccaactcaaagattcgtaaacccaaaatgtgtccacagcttcaacagtatgaaatgcatggacctgaaggtctacgtgtaggtttttatgagtcagatgtaatgggaagaggccatgcacgcctggtgcatgttgaagagcctcacacggagaccgtacgaaagtacttccctgagacatggatctgggatttggtggtggtaaactcagcaggtgtggctgaggtaggagtaacagtccctgacaccatcaccgagtggaaggcaggggccttctgcctgtctgaagatgctggacttggtatctcttccactgcctctctccgagccttccagcccttctttgtggagctcacaatgccttactctgtgattcgtggagaggccttcacactcaaggccacggtcctaaactaccttcccaaatgcatccgggtcagtgtgcagctggaagcctctcccgccttcctagctgtcccagtggagaaggaacaagcgcctcactgcatctgtgcaaacgggcggcaaactgtgtcctgggcagtaaccccaaagtcattaggaaatgtgaatttcactgtgagcgcagaggcactagagtctcaagagctgtgtgggactgaggtgccttcagttcctgaacacggaaggaaagacacagtcatcaagcctctgttggttgaacctgaaggactagagaaggaaacaacattcaactccctactttgtccatcaggtggtgaggtttctgaagaattatccctgaaactgccaccaaatgtggtagaagaatctgcccgagcttctgtctcagttttgggagacatattaggctctgccatgcaaaacacacaaaatcttctccagatgccctatggctgtggagagcagaatatggtcctctttgctcctaacatctatgtactggattatctaaatgaaacacagcagcttactccagagatcaagtccaaggccattggctatctcaacactggttaccagagacagttgaactacaaacactatgatggctcctacagcacctttggggagcgatatggcaggaaccagggcaacacctggctcacagcctttgttctgaagacttttgcccaagctcgagcctacatcttcatcgatgaagcacacattacccaagccctcatatggctctcccagaggcagaaggacaatggctgtttcaggagctctgggtcactgctcaacaatgccataaagggaggagtagaagatgaagtgaccctctccgcctatatcaccatcgcccttctggagattcctctcacagtcactcaccctgttgtccgcaatgccctgttttgcctggagtcagcctggaagacagcacaagaaggggaccatggcagccatgtatataccaaagcactgctggcctatgcttttgccctggcaggtaaccaggacaagaggaaggaagtactcaagtcacttaatgaggaagctgtgaagaaagacaactctgtccattgggagcgccctcagaaacccaaggcaccagtggggcatttttacgaaccccaggctccctctgctgaggtggagatgacatcctatgtgctcctcgcttatctcacggcccagccagccccaacctcggaggacctgacctctgcaaccaacatcgtgaagtggatcacgaagcagcagaatgcccagggcggtttctcctccacccaggacacagtggtggctctccatgctctgtccaaatatggagcagccacatttaccaggactgggaaggctgcacaggtgactatccagtcttcagggacattttccagcaaattccaagtggacaacaacaaccgcctgttactgcagcaggtctcattgccagagctgcctggggaatacagcatgaaagtgacaggagaaggatgtgtctacctccagacatccttgaaatacaatattctcccagaaaaggaagagttcccctttgctttaggagtgcagactctgcctcaaacttgtgatgaacccaaagcccacaccagcttccaaatctccctaagtgtcagttacacagggagccgctctgcctccaacatggcgatcgttgatgtgaagatggtctctggcttcattcccctgaagccaacagtgaaaatggatgcttgaaagatctaaccatgtgagccggacagaagtcagcagcaaccatgtcttgatttaccttgataaggtgtcaaatcagacactgagcttgttcttcacggttctgcaagatgtcccagtaagagatctgaaaccagccatagtgaaagtctatgattactacgagacggatgagtttgcaattgctgagtacaatgctccttgcagcaaagatcttggaaatgcttgaagaccacaaggctgaaaagtgctttgctggagtcctgttctcagagctccacagaagacacgtgtttttgtatctttaaagacttgatgaataaacactttttctggtcaatgtcggttgggggaggcc

SEQ ID NO: 2251 - DNA, 2513 bp, Homo sapiens
gaatctacaataagacaaatttcaaatcaagttgctccactatactgcataagcagtttagaatcttaagcagatgcaaaaagaataaagcaaatgggaggaaaaaaaaggccgataaagtttctggctacaatacaagagacatatcattaccatatgatctaatgtgggtgtcagccggattgtgttcattgagggaaaccttattttttaactgtgctatggagtagaagcaggaggttttcaacctagtcacagagcagcacctaccccctcctcctttccacacctgcaaactcttttacttgggctgaatatttagtgtaattacatctcagctttgagggctcctgtggcaaattcccggattaaaagggaataataagacacgccctgaaggagtacatcgtctagtgagggacagaccaagcacgcaaaacaaattgcaatataatgtgataagttctttaaaagaggtaagagcaacgtgctttgggagcagagaagagggagaaagcagcatcttgcctggatgagccaggggacacagaagagaagcccactatctcatttaatctttacaactctcttgcaagaggttccctggttgtgaaaatacatgagataaatcatgaaggccactatcatcctccttctgcttgcacaagtttcctgggctggaccgtttcaacagagaggcttatttgactttatgctagaagatgaggcttctgggataggcccagaagttcctgatgaccgcgacttcgagccctccctaggcccagtgtgccccttccgctgtcaatgccatcttcgagtggtccagtgttctgatttgggtgtctggacaaagtgccaaaggatcttccccctgacacaactctgctagacctgcaaaacaacaaaataaccgaaatcaaagatggagactttaagaacctgaagaaccttcacgcattgattcttgtcaacaataaaattagcaaagttagtcctggagcatttacacctttggtgaagttggaacgactttatctgtccaagaatcagctgaaggaattgccagaaaaaatgcccaaaactcttcaggagctgcgtgcccatgagaatgagatcaccaaagtgcgaaaagttactttcaatggactgaaccagatgattgtcatagaactgggcaccaatccgctgaagagctcaggaattgaaaatggggctttccagggaatgaagaagctctcctacatccgcattgctgataccaatatcaccagcattcctcaaggtcttcctccttcccttacggaattacatcttgatggcaacaaaatcagcagagttgatgcagctagcctgaaaggactgaataatttggctaagttgggattgagtttcaacagcatctctgctgttgacaatggctctctggccaacacgcctcatctgagggagcttcacttggacaacaacaagcttaccagagtacctggtgggctggcagagcataagtacatccaggttgtctaccttcataacaacaatatctctgtagttggatcaagtgacttctgcccacctggacacaacaccaaaaaggcttcttattcgggtgtgagtcttttcagcaacccggtccagtactgggagatacagccatccaccttcagatgtgtctacgtgcgctctgccattcaactcggaaactataagtaattctcaagaaagccctcatttttataacctggcaaaatcttgttaatgtcattgctaaaaaataaataaaagctagatactggaaacctaactgcaatgtggatgttttacccacatgacttattatgcataaagccaaatttccagtttaagtaattgcctacaataaaaagaaattttgcctgccattttcagaatcatcttttgaagctttctgttgatgttaactgagctactagagatattcttatttcactaaatgtaaaatttggagtaaatatatatgtcaatatttagtaaagcttttcttttttaatttccaggaaaaaataaaaagagtatgagtcttctgtaattcattgagcagttagctcatttgagataaagtcaaatgccaaacactagctctgtattaatccccatcattactggtaaagcctcatttgaatgtgtgaattcaatacaggctatgtaaaatttttactaatgtcattattttgaaaaaataaatttaaaaatacattcaaaattactattgtatacaagcttaattgttaatattccctaaacacaattttatgaagggagaagacattggtttgttgacaataacagtacatcttttcaagttctcagctatttcttctacctctccctatcttacatttgagtatggtaacttatgtcatctatgttgaatgtaagcttataaagcacaaagcatacatttcctgactggtctagagaactgatgtttcaatttacccctctgctaaataaatattaaaactatcatgtga

SEQ ID NO: 2252 - DNA, 5819 bp, Homo sapiens
atgagtacagaaagagactcagaaacgacatttgacgaggattctcagcctaatgacgaagtggttccctacagtgatgatgaaacagaagatgaacttgatgaccaggggtctgctgttgaaccagaacaaaaccgagtcaacagggaagcagaggagaaccgggagccattcagaaaagaatgtacatggcaagtcaaagcaaacgatcgcaagtaccacgaacaacctcactttatgaacacaaaattcttgtgtattaaggagagtaaatatgcgaataatgcaattaaaacatacaagtacaacgcatttacctttataccaatgaatctgtttgagcagtttaagagagcagccaatttatatttcctggctcttcttatcttacaggcagttcctcaaatctctaccctggcttggtacaccacactagtgcccctgcttgtggtgctgggcgtcactgcaatcaaagacctggtggacgatgtggctcgccataaaatggataaggaaatcaacaataggacgtgtgaagtcattaaggatggcaggttcaaagttgctaagtggaaagaaattcaagttggagacgtcattcgtctgaaaaaaaatgattttgttccagctgacattctcctgctgtctagctctgagcctaacagcctctgctatgtggaaacagcagaactggatgggagaaaccaatttaaaatttaagatgtcacttgaaatcacagaccagtacctccaaagagaagatacattggctacatttgatggttttattgaatgtgaagaacccaataacagactagataagtttacaggaacactattttggagaaacacaagttttcctttggatgctgataaaattttgttacgtggctgtgtaattaggaacaccgatttctgccacggcttagtcatttttgcaggtgctgacactaaaataatgaagaatagtgggaaaaccagatttaaaagaactaaaattgattacttgatgaactacatggtttacacgatctttgttgttcttattctgctttctgctggtcttgccatcggccatgcttattgggaagcacaggtgggcaattcctcttggtacctctatgatggagaagacgatacaccctcctaccgtggattcctcattttctggggctatatcattgttctcaacaccatggtacccatctctctctatgtcagcgtggaagtgattcgtcttggacagagtcacttcatcaactgggacctgcaaatgtactatgctgagaaggacacacccgcaaaagctagaaccaccacactcaatgaacagctcgggcagatccattatatcttctctgataagacggggacactcacacaaaatatcatgacctttaaaaagtgctgtatcaacgggcagatatatggggaccatcgggatgcctctcaacacaaccacaacaaaatagagcaagttgattttagctggaatacatatgctgatgggaagcttgcattttatgaccactatcttattgagcaaatccagtcagggaaagagccagaagtacgacagttcttcttcttgctcgcagtttgccacacagtcatggtggataggactgatggtcagctcaactaccaggcagcctctcccgatgaaggtgccctggtaaacgctgccaggaactttggctttgccttcctcgccaggacccagaacaccatcaccatcagtgaactgggcactgaaaggacttacaatgttcttgccattttggacttcaacagtgaccggaagcgaatgtctatcattgtaagaaccccagaaggcaatatcaagctttactgtaaaggtgctgacactgttatttatgaacggttacatcgaatgaatcctactaagcaagaaacacaggatgccctggatatctttgcaaatgaaactcttagaaccctatgcctttgctacaaggaaattgaagaaaaagaatttacagaatggaataaaaagtttatggctgccagtgtggcctccaccaaccgggacgaagctctggataaagtatatgaggagattgaaaaagacttaattctcctgggagctacagctattgaagacaagctacaggatggagttccagaaaccatttcaaaacttgcaaaagctgacattaagatctgggtgcttactggagacaaaaaggaaactgctgaaaatataggatttgcttgtgaacttctgactgaagacaccaccatctgctatggggaggatattaattctcttcttcatgcaaggatggaaaaccagaggaatagaggtggcgtctacgcaaagtttgcacctcctgtgcaggaatctttttttccacccggtggaaaccgtgccttaatcatcactggttcttggttgaatgaaattcttctcgagaaaaagaccaagagaaataagattctgaagctgaagttcccaagaacagaagaagaaagacggatgcggacccaaagtaaaaggaggctagaagctaagaaagagcagcggcagaaaaactttgtggacctggcctgcgagtgcagcgcagtcatctgctgccgcgtcacccccaagcagaaggccatggtggtggacctggtgaagaggtacaagaaagccatcacgctggccatcggagatggggccaatgacgtgaacatgatcaaaactgcccacattggcgttggaataagtggacaagaaggaatgcaagctgtcatgtcgagtgactattcctttgctcagttccgatatctgcagaggctactgctggtgcatggccgatggtcttacataaggatgtgcaagttcctacgatacttcttttacaaaaactttgcctttactttggttcatttctggtactccttcttcaatggctactctgcgcagactgcatacgaggattggttcatcaccctctacaacgtgctgtacaccagcctgcccgtgctcctcatggggctgctcgaccaggatgtgagtgacaaactgagcctccgattccctgggttatacatagtgggacaaagagacttactattcaactataagagattctttgtaagcttgttgcatggggtcctaacatcgatgatcctcttcttcatacctcttggagcttatctgcaaaccgtagggcaggatggagaggcaccttccgactaccagtcttttgccgtcaccattgcctctgctcttgtaataacagtcaatttccagattggcttggatacttcttattggacttttgtgaatgctttttcaatttttggaagcattgcactttattttggcatcatgtttgactttcatagtgctggaatacatgttctctttccatctgcatttcaatttacaggcacagcttcaaacgctctgagacagccatacatttggttaactatcatcctggctgttgctgtgtgcttactacccgtcgttgccattcgattcctgtcaatgaccatctggccatcagaaagtgataagatccagaagcatcgcaagcggttgaaggcggaggagcagtggcagcgacggcagcaggtgttccgccggggcgtgtcaacgcggcgctcggcctacgccttctcgcaccagcggggctacgcggacctcatctcctccgggcgcagcatccgcaagaagcgctcgccgcttgatgccatcgtggcggatggcaccgcggagtacaggcgcaccggggacagctgatcccttacccccaggctgggatgcggccacaaagcacgtctatttttttatgaaagactctcaggactttgtgtgtgtgtgtgaattgcattcatcacaaagatattgaagacaataaataatctttataacaaactccttgggttggactattaaacaatagcagagccaagaaataggacttttaaaagtcctattattcggccgggcgtggtggctcaggtctgtaatcccagcactttaggaggctgaggaggggagatcacctgaggccaggagttcgagaccagcccagccaacatggtgaaaccctgtctctaccataaattaaaaattagccgggcttggtggtgggcacccgtaatcccacctatttgagaagctgaagcagaagaatcgcttgaacctgggagatggaggttacagtgagccgagattgcgccactgcactccagcctgggtgacagagcaagactctgtcttaagaaaaatttaaaaataggccgggcatggtggctcatgcctgtcatcctagcactttgggaggccaaggcaggtggatcacttgaggtcaggagaccagcccggccaacatggtgaaaccccatctctactaaaaatacaaaaattagctggaaatcgcttgaacctgggaggtggaggttccagtgagccgagatcgtggcactgcactccaacctgagcaacagagtgagacaccagctcaaaaaaaattttttaataataataaaagtcctattattcaactggttatgtacattatggttgaaagggaacgttttaatccagtctcaatccagggcaatagaattacaaagcatgttgtatttcagttcaaatggtattgtattataaaattacagttacattttcctttcggtgatcttcagcataatttcccagaggcccctttttcctccctataggccatcttattaacagattttaaaatttatagtaatgacaaatgacttatcagtgttcatcatctgaaagctaagtggttcgttcaatcactttttcaaagttgatagtagattgcatggtttcatgtttcctcatattggtttattaattctatttaatcaaggaaaataacttcagattccataaagtttcagtttatttttagtttactactaggtgagatagcacattacatacttttactatcaaatattattttagcagcttcccatagtaccaaatgatttgattccctactctcattttttaaagcatataaatatttatgggcttaaaaagggggtttttaaaaactgaggatatcagtaataaattgcagaatattttgcaaagctttcttttggaaagcaaacttttgtgcctgcctatatgcaaagtattttatcagggacttgaacaaagacctcactctttttcacttgtcttatgtcgagagaaaaggttattggcagccacattcctaagactggggaatggtgtgtccttttaaatttgaagataactttaggtaattatggaaactcctcaaagaggagaaagtaatttttttccagacatttttctcattctgtgtctttcacacactagtttccatagttcgagaattctgttttttaccattgggctgtgaatgttcacaatatcagtcctgttgaattcctatgaggtaatcacaatgtgtatatgttcattttctaggtatgataaaagaatgtatggctttttattctgtggaagtaaaatcctgaacgtttacaacttttccttaacttgtaaataaaaaattgtaagttttttctttttttacagaaaacttagcttgtgtaattctgttagtttcagatttctctcctgtttttgcaaattgtgggaaagattgacaatgcaaatgtgtcaaagacatactgttgggtgcaatattaacaattttaaatgcaaatttctttggataaattatttctatattctgtaaatctgagatttaatgtatattttgtttaaaaaaatgatttagtaaaatctttgaaaagtatgatcttctaaagtatttaaa

SEQ ID NO: 2253 - DNA, 4969 bp, Homo sapiens
cagctatcaaaaaggccataaggattttgtccccaaatttcacatgagctaccttgcttcaaactactgagatgaagggggcaagattatttgtccttctttctagtttatggagtgggggcattgggcttaacaacagtaagcattcttggactatacctgaggatgggaactctcagaagactatgccttctgcttcagttcctccaaataaaatacaaagtttgcaaatactgccaaccactcgggtcatgtcggcggagatagctacaactccagaggcaagaacttctgaagacagtcttcttaaatcaacactgcctccctcagaaacaagtgcacctgctgagggtgtgagaaatcaaactctcacatccacagagaaagcagaaggagtggtcaagttacagaatcttaccctcccaaccaacgctagcatcaagttcaatcctggagcagaatcagtggtcctttccaattctacactgaaatttcttcagagctttgccagaaagtcaaatgaacaagcaacttctctaaacacagttggaggcactggaggcattggaggcgttggaggcactggaggcgtgggaaatcgagccccacgggaaacatacctcagccggggtgacagcagttccagccaaagaactgactaccaaaaatcaaatttcgaaacaactagaggaaagaattggtgtgcttatgtacataccaggttatctcccacagtgatattggacaaccaggtcacttatgtcccaggtgggaaaggaccttgtggctggaccggtggatcctgtcctcagagatctcagaagatatccaatcctgtctataggatgcaacataaaattgtcacctcattggattggaggtgctgtcctggatacagtgggccgaaatgtcaactaagagcccaggaacagcaaagtttgatacacaccaaccaggctgaaagtcatacagctgttggcagaggagtagctgagcagcagcagcagcaaggctgtggtgacccagaagtgatgcaaaaaatgactgatcaggtgaactaccaggcaatgaaactgactcttctgcagaagaagattgacaatatttctttgactgtgaatgatgtaaggaacacttactcctccctagaaggaaaagtcagcgaagataaaagcagagaatttcaatctcttctaaaaggtctaaaatccaaaagcattaatgtactgataagagacatagtaagagaacaatttaaaatttttcaaaatgacatgcaagagactgtagcacagctcttcaagactgtatcaagtctatcagaggacctcgaaagcaccaggcaaataattcaaaaagttaatgaatctgtggtttcaatagcagcccagcaaaagtttgttttggtgcaagagaatcggcccactttgactgatatagtggaactaaggaatcacattgtgaatgtaaggcaagaaatgactcttacatgtgagaagcctattaaagaactagaagtaaagcagactcatttagaaggtgctctagaacaggaacactcaagaagcattctgtattatgaatccctcaataaaactctttctaaattgaaggaagtacatgagcagcttttatcaactgaacaggtatcagaccagaagaatgctccagctgctgagtcagttagcaataatgtcactgagtacatgtctactttacatgaaaatataaagaagcagagtttgatgatgctgcaaatgtttgaagatttgcacattcaagaaagcaagattaacaatctcaccgtctctttggagatggagaaagagtctctcagaggtgaatgtgaagacatgttatccaaatgcagaaatgattttaaatttcaacttaaggacacagaagagaatttacatgtgttaaatcaaacattggctgaagttctctttccaatggacaataagatggacaaaatgagtgagcaactaaatgatttgacttatgatatggagatccttcaacccttgcttgagcagggagcatcactcagacagacaatgacatatgaacaaccaaaggaagcaatagtgataaggaaaaagatagaaaatctgactagtgctgtcaatagtctaaattttattatcaaagaacttacaaaaagacacaacttacttagaaatgaagtacagggtcgtgatgatgccttagaaagacgtatcaatgaatatgccttagaaatggaagatggcctcaataagacaatgactattataaataatgctattgatttcattcaagataactatgccctaaaagagactttaagtactattaaggataatagtgagatccatcataaatgtacctccgatatggaaactattttgacatttattcctcagttccaccgtctgaatgattctattcagactttggtcaatgacaatcagagatataactttgttttgcaagtcgccaagacccttgcaggtattcccagagatgagaaactaaatcagtccaacttccaaaagatgtatcaaatgttcaatgaaaccacttcccaagtgagaaaataccagcaaaatatgagtcatttggaagaaaaactactcttaactaccaagatttccaaaaattttgagactcggttgcaagacattgagtctaaagttacccagacgctcataccttattatatttcagttaaaaaaggcagtgtagttacaaatgagagagatcaggctcttcaactgcaagtattaaattccagatttaaggcgttggaagcaaaatctatccatctttcaattaacttcttttcgcttaacaaaactctccacgaagttttaacaatgtgtcacaatgcttctacaagtgtgtcagaactgaatgctaccatccctaagtggataaaacattccctgccagatattcaacttcttcagaaaggtctaacagaatttgtggaaccaataattcaaataaaaactcaagctgccctatctaatttaacttgttgtatagatcgatcgttgcctggtagtctggcaaatgttgtcaagtctcagaagcaagtaaaatcattgccaaagaaaattaacgcacttaagaaaccaacggtaaatcttaccacagtcctgataggccggactcaaagaaacacggacaacataatatatcctgaggagtattcaagctgtagtcggcatccgtgccaaaatgggggcacgtgcataaatggaagaactagctttacctgtgcctgcagacatccttttactggtgacaactgcactatcaagcttgtggaagaaaatgctttagctccagatttttccaaaggatcttacagatatgcacccatggtggcattttttgcatctcatacgtatggaatgactatacctggtcctatcctgtttaataacttggatgtcaattatggagcttcatataccccaagaactggaaaatttagaattccgtatcttggagtatatgttttcaagtacaccatcgagtcatttagtgctcatatttctggatttttagtggttgatggaatagacaagcttgcatttgagtctgaaaatattaacagtgaaatacactgtgatagggttttaactggggatgccttattagaattaaattatgggcaggaagtctggttacgacttgcaaaaggaacaattccagccaagtttccccctgttactacatttagtggctatttattatatcgtacataagttagtatgaaaaacagactatcacctttattgagaaacagccagtgttttcatttatctttgcttgcacatctgctctgttttggtttttctacaggaaatgaaaatcaacttgtttttttaatatgagtaaacttgtatgtctattttataaaattatttgaatattgtttaatgtctgaatatgaaagagttcttgatcctaaagaaatttagtggcacagaaaacaaagtgaatttgttagcataattattcctattcttatttcttcattttaagtcattgcaatggaaagtaatattataaaatggtaattacaacatattatcagtcacagttttctttccaattaaacacttaacttttgttattccctgtatataaatatataacacacattttctagattcacaaatttaaataaattactcaaaaaatgaaaattgattttgtaaacttttatttttactctttacgttgagttgatcaattttccatactaagattttcattcagaatcaaaattaagaaagttggactgaaaatatgaaaaatgcttaactattgttctcttcctataattctctaattataacatagtaatttacatgtagttggacatgtacactcaagtctaagaatatatgagtggatcatttaccgccccccgccccacaacatctataaggggcaaaaagtctttttctaataagtattcttctatggtagtacctacagatctgcccttcttcttctaaagggtaagtcataatctgtgtaatactacaatttatgggatgctcactatgccctgtttctcttctaaacaatttacatgtaatgtctcattcctcacaataacccttgtaaagtgggcatgattaccatgatttttatagttgaagaacctaagacacagagaccaaggcccatgagctcatagggctgaggcaggatttggaatcaggccatgtcttctccagagcccacatccatcctttctctatattgcctcccacagatgtgctaaaatttatttaactaatcctttatcctctatttgtgttgtctcccattttttattattacaatattactgtggtgaacatgcttaaaaatacattccttggatatctgacaacgtgtttctgaaaaacagattttcataagtaataataaaaataataataaaaaagttttggtatggtaa

SEQ ID NO: 2254 - DNA, 2801 bp, Homo sapiens
aaacacggtgaaaagaaaccgcccattacacaccccagtacaccagcagaggaaacttataacctcgggaggcaggtccttcccctcagtgcggtcacatacttccagaagagcggaccagggctgctgccagcacctgccactcagagcgcctctgtcgctgggacccttcagaactctctttgctcacaagttaccaaaaaaaaaagagccaacatgttggtattgctggctggtatctttgtggtccacatcgctactgttattatgctatttgttagcaccattgccaatgtctggttggtttccaatacggtagatgcatcagtaggtctttggaaaaactgtaccaacattagctgcagtgacagcctgtcatatgccagtgaagatgccctcaagacagtgcaggccttcatgattctctctatcatcttctgtgtcattgccctcctggtcttcgtgttccagctcttcaccatggagaagggaaaccggttcttcctctcaggggccaccacactggtgtgctggctgtgcattcttgtgggggtgtccatctacactagtcattatgcgaatcgtgatggaacgcagtatcaccacggctattcctacatcctgggctggatctgcttctgcttcagcttcatcatcggcgttctctatctggtcctgagaaagaaataaggccggacgagttcatggggatctggggggtggggaggaggaagccgttgaatctgggagggaagtggaggttgctgtacaggaaaaaccgagataggggaggggggagggggaagcaaaggggggaggtcaaatcccaaaccattactgaggggattctctactgccaagcccctgccctggggagaaagtagttggctagtactttgatgctcccttgatggggtccagagagcctccctgcagccaccagacttggcctccagctgttcttagtgacacacactgtctggggccccatcagctgccacaacaccagccccacttctgggtcatgcactgaggtccacagacctactgcactgagttaaaatagcggtacaagttctggcaagagcagatactgtctttgtgctgaatacgctaagcctggaagccatcctgcccttctgacccaaagcaaaacatcacattccagtctgaagtgcctactggggggctttggcctgtgagccattgtccctctttggaacagatatttagctctgtggaattcagtgacaaaatgggaggaggaaagagagtttgtaaggtcatgctggtgggttagctaaaccaagaaggagaccttttcacaatggaaaacctgggggatggtcagagcccagtcgagacctcacacacggctgtccctcatggagacctcatgccatggtctttgctaggcctcttgctgaaagccaaggcagctcttctggagtttctctaaagtcactagtgaacaattcggtggtaaaagtaccacacaaactatgggatccaaggggcagtcttgcaacagtgccatgttagggttatgtttttaggattcccctcaatgcagtcagtgtttcttttaagtatacaacaggagagagatggacatggctcattgtagcacaatcctattactcttcctctaacatttttgaggaagttttgtctaattatcaatattgaggatcagggctcctaggctcagtggtagctctggcttagacaccacctggagtgatcacctcttggggaccctgcctatcccacttcacaggtgaggcatggcaattctggaagctgattaaaacacacataaaccaaaaccaaacaacaggcccttgggtgaaaggtgctatataattgtgaagtattaagcctaccgtatttcagccatgataagaacagagtgcctgcattcccaggaaaatacgaaaatcccatgagataaataaaaatataggtgatgggcagatcttttctttaaaataaaaaagcaaaaactcttgtggtacctagtcagatggtagacgagctgtctgctgccgcaggagcacctctatacaggacttagaagtagtatgttattcctggttaagcaggcattgctttgccctggagcagctattttaagccatctcagattctgtctaaaggggttttttgggaagacgttttctttatcgccctgagaagatctaccccagggagaatctgagacatcttgcctacttttctttattagctttctcctcatccatttcttttatacctttcctttttggggagttgttatgccatgatttttggtatttatgtaaaaggattattactaattctatttctctatgtttattctagttaaggaaatgttgagggcaagccaccaaattacctaggctgaggttagagagattggccagcaaaaactgtgggaagatgaactttgtcattatgatttcattatcacatgattatagaaggctgtcttagtgcaaaaaacatacttacatttcagacatatccaaagggaatactcacattttgttaagaagttgaactatgactggagtaaaccatgtattcccttatcttttactttttttctgtgacatttatgtctcatgtaatttgcattactctggtggattgttctagtactgtattgggcttcttcgttaatagattatttcatatactataattgtaaatattttgatacaaatgtttataactctagggatataaaaacagattctgattcccttcattgtgtgaatgtttttttctaaaaaaaa

SEQ ID NO: 2255 - DNA, 976 bp, Homo sapiens; identical to SEQ ID NO: 1084

SEQ ID NO: 2256 - DNA, 4640 bp, Homo sapiens
gggggccactgggaattcagtgaagagggcaccctataccatggcagtgcccggcgacgctgcacgagtcagggacaagcccgtccacagtggggtgagtcaagcccccacggcgggccgggactgccaccatcgtgcggaccccgcatcgccgcgggactcgggctgccgtggctgctggggagacctggtgctgcagccgctccggagctctcggaaactttcctccgcgctgtgcgcgggctccctgtcctttctgctggcgctgctggtgaggctggtccgcggggaggtcggctgtgacctggagcagtgtaaggaggcggcggcggcggaggaggaggaagcagccccgggagcagaagggggcgtcttcccggggcctcggggaggtgctcccgggggcggtgcgcggctcagcccctggctgcagccctcggcgctgctcttcagtctcctgtgtgccttcttctggatgggcttgtacctcctgcgcgccggggtgcgcctgcctctggctgtcgcgctgctggccgcctgctgcgggggggaagcgctcgtccagattgggctgggcgtcggggaggatcacttactctcactccccgccgcgggggtggtgctcagctgcttggccgccgcgacatggctggtgctgaggctgaggctgggcgtcctcatgatcgccttgactagcgcggtcaggaccgtgtccctcatttccttagagaggttcaaggtcgcctggagaccttacctggcgtacctggccggcgtgctggggatcctcttggccaggtacgtggaacaaatcttgccgcagtccgcggaggcggctccaagggagcatttggggtcccagctgattgctgggaccaaggaagatatcccggtgtttaagaggaggaggcggtccagctccgtcgtgtccgccgagatgtccggctgcagcagcaagtcccatcggaggacctccctgccctgtataccgagggaacagctcatggggcattcagaatgggaccacaaacgagggccaagaggatcacagtcttcaggaaccagtattactgtggacatcgccgtcatgggcgaggcccacggcctcattaccgacctcctggcagacccttctcttccaccaaacgtgtgcacatccttgagagccgtgagcaacttgctcagcacacagctcaccttccaggccattcacaagcccagagtgaatcccgtcacttcgctcagtgaaaactatacctgttctgactctgaagagagctctgaaaaagacaagcttgctattccaaagcgcctgagaaggagtttgcctcctggcttgttgagacgagtttcttccacttggaccaccaccacctcggccacaggtctacccaccttggagcctgcaccagtacggagagaccgcagcaccagcatcaaactgcaggaagcaccttcatccagtcctgattcttggaataatccagtgatgatgaccctcaccaaaagcagatcctttacttcatcctatgctatttctgcagctaaccatgtaaaggctaaaaagcaaagtcgaccaggtgccctcgctaaaatttcacctctttcatcgccctgctcctcacctctccaagggactcctgccagcagcctggtcagcaaaatttctgcagtgcagtttccagaatctgctgacacaactgccaaacaaagcctaggttctcacagggccttaacttacactcagagtgccccagacctatcccctcaaatcctgactccacctgttatatgtagcagctgtggcagaccatattcccaagggaatcctgctgatgagcccctggagagaagtggggtagccactcggacaccaagtagaacagatgacactgctcaagttacctctgattatgaaaccaataacaacagtgacagcagtgacattgtacagaatgaagatgaaacagagtgcctgagagagcctctgaggaaagcatcggcttgcagcacctatgctcctgagaccatgatgtttctggacaaaccaattcttgctcccgaacctcttgtcatggataacctggactcaattatggagcagctaaatacttggaattttccaatttttgatttagtggaaaatataggaagaaaatgtggccgtattcttagtcaggtatcttacagactttttgaagacatgggcctctttgaagcttttaaaattccaattagggaatttatgaattattttcatgctttggagattggatatagggatattccttatcataacagaatccatgccactgatgttttacatgctgtttggtatcttactacacagcctattccaggcctctcaactgtgattaatgatcatggttcaaccagtgattcagattctgacagtggatttacacatggacatatgggatatgtattctcaaaaacgtataatgtgacagatgataaatacggatgtctgtctgggaatatccctgccttggagttgatggcgctgtatgtggctgcagccatgcacgattatgatcatccaggaaggactaatgctttcctggttgcaactagtgctcctcaggcggtgctatataacgatcgttcagttttggagaatcatcacgcagctgctgcatggaatcttttcatgtcccggccagagtataacttcttaattaaccttgaccatgtggaatttaagcatttccgtttccttgtcattgaagcaattttggccactgacctgaagaaacactttgacttcgtagccaaatttaatggcaaggtaaatgatgatgttggaatagattggaccaatgaaaatgatcgtctactggtttgtcaaatgtgtataaagttggctgatatcaatggtccagctaaatgtaaagaactccatcttcagtggacagatggtattgtcaatgaattttatgaacagggtgatgaagaggccagccttggattacccataagccccttcatggatcgttctgctcctcagctggccaaccttcaggaatccttcatctctcacattgtggggcctctgtgcaactcctatgattcagcaggactaatgcctggaaaatgggtggaagacagcgatgagtcaggagatactgatgacccagaagaagaggaggaagaagcaccagcaccaaatgaagaggaaacctgtgaaaataatgaatctccaaaaaagaagactttcaaaaggagaaaaatctactgccaaataactcagcacctcttacagaaccacaagatgtggaagaaagtcattgaagaggagcaacggttggcaggcatagaaaatcaatccctggaccagacccctcagtcgcactcttcagaacagatccaggctatcaaggaagaagaagaagagaaagggaaaccaagaggcgaggagataccaacccaaaagccagaccagtgacaatggatagaatgggctgtgtttccaaacagattgacttgtcaaagactctcttcaagccagcacaacatttagacacaacactgtagaaatttgagatgggcaaatggctattgcattttgggattcttcgcattttgtgtgtatatttttacagtgaggtacattgttaaaaactttttgctcaaagaagctttcacattgcaacaccagcttctaaggattttttaaggagggaatatatatgtgtgtgtgtatataagctcccacatagatacatgtaaaacatattcacacccatgcacgcacacacatacacactgaaggccacgattgctggctccacaatttagtaacatttatattaagatatatatatagtggtcactgtgatataataaatcataaaggaaaccaaatcacaaaggagatggtgtggcttagcaaggaaacagtgcaggaaatgtaggttaccaactaagcagcttttgctcttagtactgagggatgaaagttccagagcattatttgaattctgatacatcctgccaacactgtgtgtgtgtgtgtgtgtgtgtgtgtgtgtgtgtgtgtgtgtgaaagagagacagaagggaatggtttgagagggtgcttgtgtgcatgtgtgtgcatatgtaaagagatttttgtggtttaagtaactcagaatagctgtagcaaatgactgaatacatgtgaacaaacagaaggaagttcactctggagtgtctttgggaggcagccattccaaatgccctcctccatttagcttcaataaagggccttttgctgatggagggcactcaagggctgggtgagagggccacgtgtttggtattacattactgctatgcaccacttgaaggagctctatcaccagcctcaaacccgaaagactgaggcattttccagtctacttgcctaatgaatgtataggaactgtctatgagtatggatgtcactcaactaagatcaaatcaccatttaaggggatggcattctttatacctaaacacctaagagctgaagtcaggtcttttaatcaggttagaattctaaatgatgccagagaaggcttgggaaattgtacttcagcgtgatagcctgtgtcttcttaatttgctgcaaaatatgtggtagagaaagaaaagga

SEQ ID NO: 2257 - DNA, 3041 bp, Homo sapiens
cactttcgagagtgccgtctatttgccacacacttccctgatgaaatgtctggatttggactaaagaaaaaaggaaaggctagcagtcatccaacagaatcatgagacagactttgccttgtatctacttttgggggggccttttgccctttgggatgctgtgtgcatcctccaccaccaagtgcactgttagccatgaagttgctgactgcagccacctgaagttgactcaggtacccgatgatctacccacaaacataacagtgttgaaccttacccataatcaactcagaagattaccagccgccaacttcacaaggtatagccagctaactagcttggatgtaggatttaacaccatctcaaaactggagccagaattgtgccagaaacttcccatgttaaaagttttgaacctccagcacaatgagctatctcaactttctgataaaacctttgccttctgcacgaatttgactgaactccatctcatgtccaactcaatccagaaaattaaaaataatccctttgtcaagcagaagaatttaatcacattagatctgtctcataatggcttgtcatctacaaaattaggaactcaggttcagctggaaaatctccaagagcttctattatcaaacaataaaattcaagcgctaaaaagtgaagaactggatatctttgccaattcatctttaaaaaaattagagttgtcatcgaatcaaattaaagagttttctccagggtgttttcacgcaattggaagattatttggcctctttctgaacaatgtccagctgggtcccagccttacagagaagctatgtttggaattagcaaacacaagcattcggaatctgtctctgagtaacagccagctgtccaccaccagcaatacaactttcttgggactaaagtggacaaatctcactatgctcgatctttcctacaacaacttaaatgtggttggtaacgattcctttgcttggcttccacaactagaatatttcttcctagagtataataatatacagcatttgttttctcactctttgcacgggcttttcaatgtgaggtacctgaatttgaaacggtcttttactaaacaaagtatttcccttgcctcactccccaagattgatgatttttcttttcagtggctaaaatgtttggagcaccttaacatggaagataatgatattccaggcataaaaagcaatatgttcacaggattgataaacctgaaatacttaagtctatccaactcctttacaagtttgcgaactttgacaaatgaaacatttgtatcacttgctcattctcccttacacatactcaacctaaccaagaataaaatctcaaaaatagagagtgatgctttctcttggttgggccacctagaagtacttgacctgggccttaatgaaattgggcaagaactcacaggccaggaatggagaggtctagaaaatattttcgaaatctatctttcctacaacaagtacctgcagctgactaggaactcctttgccttggtcccaagccttcaacgactgatgctccgaagggtggcccttaaaaatgtggatagctctccttcaccattccagcctcttcgtaacttgaccattctggatctaagcaacaacaacatagccaacataaatgatgacatgttggagggtcttgagaaactagaaattctcgatttgcagcataacaacttagcacggctctggaaacacgcaaaccctggtggtcccatttatttcctaaagggtctgtctcacctccacatccttaacttggagtccaacggctttgacgagatcccagttgaggtcttcaaggatttatttgaactaaagatcatcgatttaggattgaataatttaaacacacttccagcatctgtctttaataatcaggtgtctctaaagtcattgaaccttcagaagaatctcataacatccgttgagaagaaggttttcgggccagctttcaggaacctgactgagttagatatgcgctttaatccctttgattgcacgtgtgaaagtattgcctggtttgttaattggattaacgagacccataccaacatccctgagctgtcaagccactacctttgcaacactccacctcactatcatgggttcccagtgagactttttgatacatcatcttgcaaagacagtgccccctttgaactctttttcatgatcaataccagtatcctgttgatttttatctttattgtacttctcatccactttgagggctggaggatatctttttattggaatgtttcagtacatcgagttcttggtttcaaagaaatagacagacagacagaacagtttgaatatgcagcatatataattcatgcctataaagataaggattgggtctgggaacatttctcttcaatggaaaaggaagaccaatctctcaaattttgtctggaagaaagggactttgaggcgggtgtttttgaactagaagcaattgttaacagcatcaaaagaagcagaaaaattatttttgttataacacaccatctattaaaagacccattatgcaaaagattcaaggtacatcatgcagttcaacaagctattgaacaaaatctggattccattatattggttttccttgaggagattccagattataaactgaaccatgcactctgtttgcgaagaggaatgtttaaatctcactgcatcttgaactggccagttcagaaagaacggataggtgcctttcgtcataaattgcaagtagcacttggatccaaaaactctgtacattaaatttatttaaatattcaattagcaaaggagaaactttctcaatttaaaaagttctatggcaaatttaagttttccataaaggtgttataatttgtttattcatatttgtaaatgattatattctatcacaattacatctcttctaggaaaatgtgtctccttatttcaggcctatttttgacaattgacttaattttacccaaaataaaacatataagcacgtaa

SEQ ID NO: 2258 - DNA, 5218 bp, Homo sapiens
actctggagtgggagtgggagcgagcgcttctgcgactccagttgtgagagccgcaagggcatgggaattgacgccactcaccgacccccagtctcaatctcaacgctgtgaggaaacctcgactttgccaggtccccaagggcagcggggctcggcgagcgaggcacccttctccgtccccatcccaatccaagcgctcctggcactgacgacgccaagagactcgagtgggagttaaagcttccagtgagggcagcaggtgtccaggccgggctgcgggttcctgttgacgtcttgccctaggcaaaggtcccagttccttctcggagccggctgtcccgcgccactggaaaccgcacctccccgcagcatgggcaccagcctcagcccgaacgacccttggccgctaaacccgctgtccatccagcagaccacgctcctgctactcctgtcggtgctggccactgtgcatgtgggccagcggctgctgaggcaacggaggcggcagctccggtccgcgcccccgggcccgtttgcgtggccactgatcggaaacgcggcggcggtgggccaggcggctcacctctcgttcgctcgcctggcgcggcgctacggcgacgttttccagatccgcctgggcagctgccccatagtggtgctgaatggcgagcgcgccatccaccaggccctggtgcagcagggctcggccttcgccgaccggccggccttcgcctccttccgtgtggtgtccggcggccgcagcatggctttcggccactactcggagcactggaaggtgcagcggcgcgcagcccacagcatgatgcgcaacttcttcacgcgccagccgcgcagccgccaagtcctcgagggccacgtgctgagcgaggcgcgcgagctggtggcgctgctggtgcgcggcagcgcggacggcgccttcctcgacccgaggccgctgaccgtcgtggccgtggccaacgtcatgagtgccgtgtgtttcggctgccgctacagccacgacgaccccgagttccgtgagctgctcagccacaacgaagagttcgggcgcacggtgggcgcgggcagcctggtggacgtgatgccctggctgcagtacttccccaacccggtgcgcaccgttttccgcgaattcgagcagctcaaccgcaacttcagcaacttcatcctggacaagttcttgaggcactgcgaaagccttcggcccggggccgccccccgcgacatgatggacgcctttatcctctctgcggaaaagaaggcggccggggactcgcacggtggtggcgcgcggctggatttggagaacgtaccggccactatcactgacatcttcggcgccagccaggacaccctgtccaccgcgctgcagtggctgctcctcctcttcaccaggtatcctgatgtgcagactcgagtgcaggcagaattggatcaggtcgtggggagggaccgtctgccttgtatgggtgaccagcccaacctgccctatgtcctggccttcctttatgaagccatgcgcttctccagctttgtgcctgtcactattcctcatgccaccactgccaacacctctgtcttgggctaccacattcccaaggacactgtggtttttgtcaaccagtggtctgtgaatcatgacccagtgaagtggcctaacccggagaactttgatccagctcgattcttggacaaggatggcctcatcaacaaggacctgaccagcagagtgatgattttttcagtgggcaaaaggcggtgcattggcgaagaactttctaagatgcagctttttctcttcatctccatcctggctcaccagtgcgatttcagggccaacccaaatgagcctgcgaaaatgaatttcagttatggtctaaccattaaacccaagtcatttaaagtcaatgtcactctcagagagtccatggagctccttgatagtgctgtccaaaatttacaagccaaggaaacttgccaataagaagcaagaggcaagctgaaattttagaaatattcacatcttcggagatgaggagtaaaattcagtttttttccagttcctcttttgtgctgcttctcaattagcgtttaaggtgagcataaatcaactgtccatcaggtgaggtgtgctccatacccagcggttcttcatgagtagtgggctatgcaggagcttctgggagatttttttgagtcaaagacttaaagggcccaatgaattattatatacatactgcatcttggttatttctgaaggtagcattctttggagttaaaatgcacatatagacacatacacccaaacacttacaccaaactactgaatgaagcagtattttggtaaccaggccatttttggtgggaatccaagattggtctcccatatgcagaaatagacaaaaagtatattaaacaaagtttcagagtatattgttgaagagacagagacaagtaatttcagtgtaaagtgtgtgattgaaggtgataagggaaaagataaagaccagaaattcccttttcaccttttcaggaaaataacttagactctagtatttatgggtggatttatccttttgccttctggtatacttccttacttttaaggataaatcataaagtcagttgctcaaaaagaaatcaatagttgaattagtgagtatagtggggttccatgagttatcatgaattttaaagtatgcattattaaattgtaaaactccaaggtgatgttgtacctcttttgcttgccaaagtacagaatttgaattatcagcaaagaaaaaaaaaaaagccagccaagctttaaattatgtgaccataatgtactgatttcagtaagtctcataggttaaaaaaaaaagtcaccaaatagtgtgaaatatattacttaactgtccgtaagcagtatattagtattatcttgttcaggaaaaggttgaataatatatgccttgtataatattgaaaattgaaaagtacaactaacgcaaccaagtgtgctaaaaatgagcttgattaaatcaaccacctatttttgacatggaaatgaagcagggtttcttttcttcactcaaattttggcgaatctcaaaattagatcctaagatgtgttcttatttttataacatctttattgaaattctatttataatacagaatcttgttttgaaaataacctaattaatatattaaaattccaaattcatggcatgcttaaattttaactaaattttaaagccattctgattattgagttccagttgaagttagtggaaatctgaacattctcctgtggaaggcagagaaatctaagctgtgtctgcccaatgaataatggaaaatgccatgaattacctggatgttctttttacgaggtgacaagagttggggacagaactcccattacaactgaccaagtttctcttctagatgattttttgaaagttaacattaatgcctgctttttggaaagtcagaatcagaagatagtcttggaagctgtttggaaaagacagtggagatgaggtcagttgtgttttttaagatggcaattactttggtagctgggaaagcataaagctcaaatgaaatgtatgcattcacatttagaaaagtgaattgaagtttcaagttttaaagttcattgcaattaaacttccaaagaaagttctacagtgtcctaagtgctaagtgcttattacattttattaagctttttggaatctttgtaccaaaattttaaaaaagggagtttttgatagttgtgtgtatgtgtgtgtggggtggggggatggtaagagaaaagagagaaacactgaaaagaaggaaagatggttaaacattttcccactcattctgaattaattaatttggagcacaaaattcaaagcatggacatttagaagaaagatgtttggcgtagcagagttaaatctcaaataggctattaaaaaagtctacaacatagcagatctgttttgtggtttggaatattaaaaaacttcatgtaattttattttaaaatttcatagctgtacttcttgaatataaaaaatcatgccagtatttttaaaggcattagagtcaactacacaaagcaggcttgcccagtacatttaaattttttggcacttgccattccaaaatattatgccccaccaaggctgagacagtgaatttgggctgctgtagcctatttttttagattgagaaatgtgtagctgcaaaaataatcatgaaccaatctggatgcctcattatgtcaaccaggtccagatgtgctataatctgtttttacgtatgtaggcccagtcgtcatcagatgcttgcggcaaaaggaaagctgtgtttatatggaagaaagtaaggtgcttggagtttacctggcttatttaatatgcttataacctagttaaagaaaggaaaagaaaacaaaaaacgaatgaaaataactgaatttggaggctggagtaatcagattactgctttaatcagaaaccctcattgtgtttctaccggagagagaatgtatttgctgacaaccattaaagtcagaagttttactccaggttattgcaataaagtataatgtttattaaatgcttcatttgtatgtcaaagctttgactctataagcaaattgcttttttccaaaacaaaaagatgtctcaggtttgttttgtgaattttctaaaagctttcatgtcccagaacttagcctttacctgtgaagtgttactacagccttaatattttcctagtagatctatattagatcaaatagttgcatagcagtatatgttaatttgtgtgtttttagctgtgacacaactgtgtgattaaaaggtatactttagtagacatttataactcaaggataccttcttatttaatcttttcttatttttgtactttatcatgaatgcttttagtgtgtgcataatagctacagtgcatagttgtagacaaagtacattctggggaaacaacatttatatgtagcctttactgtttgatataccaaattaaaaaaaaattgtatctcattacttatactgggacaccattaccaaaataataaaaatcactttcataatcttgttatgaagttttatgttgtagcaaatatagtctaatgtatcactttatttcaactattactatggattattcaattaaaatattgcactgtaaaca

SEQ ID NO: 2259 - DNA, 5624 bp, Homo sapiens
gggggcggggaactttacctgggagtgggccaggccgccagccccgccagccccgccagccccgccagccccgcgatggcttgggccgcgctcctcggcctcctggccgcactgttgctgctgctgctactgagccgccgccgcacgcggcgacctggtgagcctcccctggacctgggcagcatcccctggttggggtatgccttggactttggaaaagatgctgccagcttcctcacgaggatgaaggagaagcacggtgacatctttactatactggttgggggcaggtatgtcaccgttctcctggacccacactcctacgacgcggtggtgtgggagcctcgcaccaggctcgacttccatgcctatgccatcttcctcatggagaggatttttgatgtgcagcttccacattacagccccagtgatgaaaaggccaggatgaaactgactcttctccacagagagctccaggcactcacagaagccatgtataccaacctccatgcagtgctgttgggcgatgctacagaagcaggcagtggctggcacgagatgggtctcctcgacttctcctacagcttcctgctcagagccggctacctgactctttacggaattgaggcgctgccacgcacccatgaaagccaggcccaggaccgcgtccactcagctgatgtcttccacacctttcgccagctcgaccggctgctccccaaactggcccgtggctccctgtcagtgggggacaaggaccacatgtgcagtgtcaaaagtcgcctgtggaagctgctatccccagccaggctggccaggcgggcccaccggagcaaatggctggagagttacctgctgcacctggaggagatgggtgtgtcagaggagatgcaggcacgggccctggtgctgcagctgtgggccacacaggggaatatgggtcccgctgccttctggctcctgctcttccttctcaagaatcctgaagccctggctgctgtccgcggagagctcgagagtatcctttggcaagcggagcagcctgtctcgcagacgaccactctcccacagaaggttctagacagcacacctgtgcttgatagcgtgctgagtgagagcctcaggcttacagctgcccccttcatcacccgcgaggttgtggtggacctggccatgcccatggcagacgggcgagaattcaacctgcgacgtggtgaccgcctcctcctcttccccttcctgagcccccagagagacccagaaatctacacagacccagaggtatttaaatacaaccgattcctgaaccctgacggatcagagaagaaagacttttacaaggatgggaaacggctgaagaattacaacatgccctggggggcggggcacaatcactgcctggggaggagttatgcggtcaacagcatcaaacaatttgtgttccttgtgctggtgcacttggacttggagctgatcaacgcagatgtggagatccctgagtttgacctcagcaggtacggcttcggtctgatgcagccggaacacgacgtgcccgtccgctaccgcatccgcccatgacacagggagcagatggatccacgtgctcgcctctgcccagcctgccccagcctgccccagcctcccagctttctgtgtgcacagttggcccgggtgcaggtgctagcattaccacttccctgcttttctcccagaaggctgggtccaggggagggaaaagctaagagggtgaacaaagaaaagacattgaaagctctatggattatccactgcaaagttttctttccaaaatcaggctttgtctgctcccaattcacctcgttactctcacctcgtgatatccacaaatgctattcagataaggcagaactaggagtcttcactgctctgcccccaactcccggaggtgtcaccttcctagttcttatgagctagcatggcccgggccttatccagtcaaagcggatgctggccacagaaaggccactcaggatgtcctttgtgtccattgatgtcattcagcagtcagtcccccaataatccttaaactagctaaaaccaaaggagtcccttagaagatctgcttccctggggccccatttgccagattgccccattgctcacactacttgagaaaatgcaggagagcttcccccaaggctgatgcattcccggtgcagaacaggggcaccctccaaacactgggctctgaggagtggagttctctgttctagagtgacaggcaccagatgggatgggctttctcagtgtcagcactcaggtagggagctaaggaagacacagcccagacaagatggctggaaggagccagccaggactccttagactgatcaagccaaaaaagaaggtgccgatttcatgcattctagtgcagaagccccaactgtgatcacgatccagtctgcagacgtgttttgtttggacttcacttaaaaaaatgccttagttgttatcatctttgggagagttcattcaaaatgtccagcttctcttgaaaacttggtatatctggccacactgggctcacattcccaagggtaactcttggccagagctgagtggcagccgcctcccttatgcaggacatgtgctctcggcttcaccagggttctgaccgggtctgcttctgcattcacagcgcctcctggacctgaaggcatctgagtgtgagaccctgttctaactcttagaagtgacattgtaagaggtggtggggaccagctaattggtccaacccagcctgagtgcaccaccctttgaacaaatgtatcagtgatgaaaatttgcctttgccccggcttgcctgtaatcccagcactttgggaggccgaggtgggcggatcacttgaggtcgggagttcaagaccagcctggccaacatggcgaaaccccgtctctactaaacataaaaaaattagtcaggtgtggcggtgcgtgcctgtaatcccagctattcaggaggctgaggcaccagaattgcttgaacccaggaggtggaggttgcagtgaactgagactgcgccacggcactccagcctgggcgacagagcaagactctgtctcaataaataaataattaattaaaataaaaaacagcttaaagagaaaaatggcctgcaaaccttttttatgatgctatttttattaatataaagtcctgtttattgagaccctttaaatgcctgcgagagaccctacagacagtatgtctactcctcacagcatctctatgaagagaaggagggttgtgcccacttcatagatgagaaaactgagaggtgaggtgacttgcctggggccacatagctcataagctgtagaactctgcaggcagatttactgtcccaggagcaaatgctggatgagcaactcctgttctttgggctcaaggggactggtgatgggacaattcttctcgacttcaggagctgacagagccagaggcacctaaacttgggtacatcttgtaagacacataatgaggtccctctagctttagctggagggagataaaagaaccccagacctctgaatgtcccagaggctagtctcttctcagagcagcactggggtttgggggcttccctgggcctcagcctccaggcacccccaggattcccagagagacgctgtgattggcaggaggcaggatatccccagggaaacccatcttcacgcctgggtgacccccactgccgcctccttcttaactctgcaggaaatcagagctggcagcctccagtgggaggacagagccggtttccgtggcaaccctcagctgcctcatcgtggctgggaagggaaggaagcaagccggcagaaatagctatggaaggtcttgcgcaggctgcaaccctggtgtgctgggcgaaaacccttatgactccccccttccaaatcaggctgggttgtcactgagactagattctcacctgccttcaaagaagggccaattccctttaaaggtcgcacctccttggaaccacagtcattagtgaattacactcaaggaaaagatgtgctcccaccaggcagctccagctgttacctgagatactgaagtgcagctcaggagacgattatttaaacctgcccttgttttaatcgttatttttctctttaaaaaaaatagaagctataaagaaaagagggagagatgagtgggttagctacctgctatgcgctagttaggaagttacctggatgccattgtatttcttcatcccttgcttaagaatcaaaattactggacatatgttaggaatactctttctttctttctttctttttaagctcagtggcaagaatgaaatactctttttttttttttttttttgagatggagtctcgctctgctgcccaggctagagtgcagtggcgtgatctcggctcactgcaagctctgcctcccgtgttcacaccattctcctgcctcagcctcctgagtagctgggactacaggcacccgccaccacacccggctaatttttggatttttagtagagatgggatttcaccgtattagccaggatggtcttgatctcctgagctcgtgatctgcccgcctcggcctcccaaagtgctgggattacaggtgtgagccaccgcgcccagccaagaataaaatactcttaagttgatctaatgaagtgtttccttaccattgtgattattgttactattatttgctatattttaatattgttgtttaccaaatattctcctttaaacagactcgctttttaaacttttttttttttttttgagacggagtttcacgcttattgcccaggctggagtgcaatggcacgatctcagctcaccacaacctccacctcctgggtttaagcaatgcttctgcctcagcttcccaagtagctgagattacaggcgcacaccaccacgcccaactgatttttgtatttttagtagagacggggtttccccatgttggtcaggctggtctcgaactcctgacctcgtgatttgcctgcctgggcctcccaaagtgctaggattacaggcatgagccaccatgcccggcctaaactttgtttttaaaatgaactttttttccccccaattgctgccaatagtggataacatgtatcactcactgccaaaaatagaaagtgaccatgaaaaataaattcgctggggaagggggctccatgctggtgtggccaaggctgagagctctctcttctctgttacaaaacgagataagcaagtgttagaattgccttaaggccacactggcatctccctgaccttctccagggacagaagcaggagtaagtttctcatcccatgggcgaccagggccatctcctcccaccagtggcccccactcacagggagctggcaatgccctacctgcctgttctccagatggagaaacaggctctgagatttcacaggtcttgcccaaagtcattgattttgatgattaaaaagaataaacacagtgtttcctgagtagcagtgattgttatgccttgctattttaataaagattctattttcgtataacattgtcaagtggaaacatgctgaaatctattaaaccatctttgtttgtggaa

SEQ ID NO: 2260 - DNA, 3245 bp, Homo sapiens
ggaaaacagaaaaagaattgtgtgccactatgtctgaatatatcttctacttgtagataattacatccaagttgcccttttgcctttttatttccgtttttggacacctctttttatcatccagccaactggaatagacaaagcaccgctggtgccctgagcgacagaactctggtagggggctggctgtaaattgacgtggcatggaaattctccgctaagttgtagcagcttgcatgtttctctaagatcaagcccagcctcctggagctgtagcttaatcatgggttcaatgactttacagaaaaatggatagaaaaattcttcaactcctttctttggacccagatggttttttttgggttttttttttttttttggtttttgcttttttttttttttttggttatctatagtttagctgaaaacaaaatcaaagcagttaagtctgtaactttctttttgcagcttaaacaacagaatttgctgctctccctcccctttcctgcaatttaattccttacagattttgccatggggtgcggacttagaaagctagaagaccctgatgatagcagccctggaaaaatattttctaccctgaagagaccgcaagtggaaacaaagacagaatttgcttacgaatatgtattgctggattttactctacaagcttcatcaaacccagaagtcatcaagataaattcaattctggatatagtaacaaaagtggaaaactattatcttaaaggatatattgtcggggctattcatcctgttatacaacctgtggggcagcgaaaacacctacctgcaagttacctatacagagtggtgctattgcgcttgaaattaagcccaaagaattcggcagcacccagtggacaaagacgcccaaggctcgtgattgaggaatgtcccctaacttctgaggcacaaacaaatgacgcagcaaaagaactgatagaaaagattaatgtcgctgctaaaagaggaatgaaatttgttggattcatatcacagcattattctccatctaaattctgcaatggaaccaaccatgatggagatatagaatcgatgctacatgtgagacacggttcagatgaaaactgtagaagttggaatgaagggacgttaagtgggcagtcatctgaaagcggaattgaggaagaacttcatcatgaaagtggacagtatcaaatggaacaaaatggcagccctacttcctctaaatcaagaaagggagaagcctcagataacaaattgtatacagtcttcaatgcttttgatgatgattcaacctcctgggcctatcaggaaggcatcctgtcaatgaaagtaacaagaaaaggatcagtcattagtacacttgatgctgattggctggagttaactaccttttattataaacaaggcttgtctttaattgattcttttgtattctgggaaacatctaaaggggaacatttgcctaaatctttggaaggattttttatctatgaagaagaaggttctggagttccaggttctagtaggaaaggaaatgatgccatcgtagtagaacaatggactgttattgagggatgtgaaatcaaaacagattatggccctctgctgcacactctggctgaattcggatggcttctgacaagcgtgttgcccacacctgtattgagacatgacagtgaagggaatttggctacaaagcagatcgtattccttcagaggccagttatgtggaattcagctgctcaaacaccagataagaaagccagccgccacataaaaggtgaagacaagaataaagccactagtagaagcatcggattagacacaacctcgtcacaacctgcagagagcagacacctgcctgaggagtgccgcctttctccctcccgggaatgctggacaaaggagggaaggctggcacagcacaacagcttctctgggttcagcagcagtgacaacgtcctccgggaattagacgacggacagtttgatcaggaagatggagtgactcaggtcacttgtatgtgagccatgaggtgaagcaaaggaaggccctgtaaataattgttaaaatcattgccaactgaccttattgtattactttctctgcatttatgtaatatttttgaatttttccagacccagcctttcctctaatctatgtaaactttggcacaacctcccagacaaggaagaataaccaacatatttatacatttagaatcatgtttacacttctctcaactaaaacatctggttaaacagatgttccattcggttattacacaataatctatttcagcttctcatgaatgtacaaagtagactttcttacaattcctggtaaggagactgaatatctcaatcagtattttacccaattagagagagttctcaggaagttacagtcttatttaagctgaaaaataacctctctctctctttttttttctctctctctcatacacacacacagctaattagtgcaaataaatatctatttcccaaatataataattaatccacattttgtctttaactatagcatgtatatacaaagcaagcccctatgtgttaaaatattttttgaaaaaaatcttttttatgtatctttgcttttaaagggtcatgtcaccaaccctgtactgattcattgtacataaatgttgttgctcctaaaagcctaaaaatgcagacagcaaagcagcatctcttaaaattcaatatgaaaagaacccataatctcaatacataaataccttagtagagagtaagatttaatttttttttattttaaagtccaaatactatgaagaggaaaaatatcaacttcaatttgaaactgaagtcttttacatctgtctagatttgaattctgcttttattttgacttgttaaatcctgaagaatgttgaaacctagaattttcaatctggcaggagtagaaagatgctcatagcacacgcgatatgtatgataacatattttgtttcatcttgcttttctttccccttctaatagaggtggctttgccttgacccagcctttaacaatctttaaaattctacaaaataaaggattttcatttatctatgaaaggcttactttgaaagatggaacctccaagtgaattacaacttattctatcattgatgaattcagcctattatatatttttattaacattgatgttgacattgtaagatcattttaataataaaacatcattttta

SEQ ID NO: 2261 - DNA, 1435 bp, Homo sapiens; identical to SEQ ID NO: 1129

SEQ ID NO: 2262 - DNA, 3669 bp, Homo sapiens
cctgctgccgcctgggccccgccgagcggagctagcgccgcgcgcagagcacacgctcgcgctccagctcccctcctgcgcggttcatgactgtgtcccctgaccgcagcctctgcgagcccccgccgcaggaccacggcccgctccccgccgccgcgagggccccgagcgaaggaaggaagggaggcgcgctgtgcgccccgcggagcccgcgaaccccgctcgctgccggctgcccagcctggctggcaccatgctgcccgcgcgctgcgcccgcctgctcacgccccacttgctgctggtgttggtgcagctgtcccctgctcgcggccaccgcaccacaggccccaggtttctaataagtgaccgtgacccacagtgcaacctccactgctccaggactcaacccaaacccatctgtgcctctgatggcaggtcctacgagtccatgtgtgagtaccagcgagccaagtgccgagacccgaccctgggcgtggtgcatcgaggtagatgcaaagatgctggccagagcaagtgtcgcctggagcgggctcaagccctggagcaagccaagaagcctcaggaagctgtgtttgtcccagagtgtggcgaggatggctcctttacccaggtgcagtgccatacttacactgggtactgctggtgtgtcaccccggatgggaagcccatcagtggctcttctgtgcagaataaaactcctgtatgttcaggttcagtcaccgacaagcccttgagccagggtaactcaggaaggaaagatgacgggtctaagccgacacccacgatggagacccagccggtgttcgatggagatgaaatcacagccccaactctatggattaaacacttggtgatcaaggactccaaactgaacaacaccaacataagaaattcagagaaagtctattcgtgtgaccaggagaggcagagtgccctggaagaggcccagcagaatccccgtgagggtattgtcatccctgaatgtgcccctgggggactctataagccagtgcaatgccaccagtccactggctactgctggtgtgtgctggtggacacagggcgcccgctgcctgggacctccacacgctacgtgatgcccagttgtgagagcgacgccagggccaagactacagaggcggatgaccccttcaaggacagggagctaccaggctgtccagaagggaagaaaatggagtttatcaccagcctactggatgctctcaccactgacatggttcaggccattaactcagcagcgcccactggaggtgggaggttctcagagccagaccccagccacaccctggaggagcgggtagtgcactggtatttcagccagctggacagcaatagcagcaacgacattaacaagcgggagatgaagcccttcaagcgctacgtgaagaagaaagccaagcccaagaaatgtgcccggcgtttcaccgactactgtgacctgaacaaagacaaggtcatttcactgcctgagctgaagggctgcctgggtgttagcaaagaagtaggacgcctcgtctaaggagcagaaaacccaagggcaggtggagagtccagggaggcaggatggatcaccagacacctaaccttcagcgttgcccatggccctgccacatcccgtgtaacataagtggtgcccaccatgtttgcacttttaataactcttacttgcgtgttttgtttttggtttcattttaaaacaccaatatctaataccacagtgggaaaaggaaagggaagaaagactttattctctctcttattgtaagtttttggatctgctactgacaacttttagagggttttgggggggtgggggagggtgttgttggggctgagaagaaagagatttatatgctgtatataaatatatatgtaaattgtatagttcttttgtacaggcattggcattgctgtttgtttatttctctccctctgcctgctgtgggtggtgggcactctggacacatagtccagctttctaaaatccaggactctatcctgggcctactaaacttctgtttggagactgacccttgtgtataaagacgggagtcctgcaattgtactgcggactccacgagttcttttctggtgggaggactatattgccccatgccattagttgtcaaaattgataagtcacttggctctcggccttgtccagggaggttgggctaaggagagatggaaactgccctgggagaggaagggagtccagatcccatgaatagcccacacaggtaccggctctcagagggtccgtgcattcctgctctccggacccccaaagggcccagcattggtgggtgcaccagtatcttagtgaccctcggagcaaattatccacaaaggatttgcattacgtcactcgaaacgttttcatccatgcttagcatctactctgtataacgcatgagaggggaggcaaagaagaaaaagacacacagaagggcctttaaaaaagtagatatttaatatctaagcaggggaggggacaggacagaaagcctgcactgaggggtgcggtgccaacagggaaactcttcacctccctgcaaacctaccagtgaggctcccagagacgcagctgtctcagtgccaggggcagattgggtgtgacctctccactcctccatctcctgctgttgtcctagtggctatcacaggcctgggtgggtgggttgggggaggtgtcagtcaccttgttggtaacactaaagttgttttgttggttttttaaaaacccaatactgaggttcttcctgttccctcaagttttcttatgggcttccaggctttaagctaattccagaagtaaaactgatcttgggtttcctattctgcctcccctagaagggcaggggtgataacccagctacagggaaatcccggcccagctttccacaggcatcacaggcatcttccgcggattctagggtgggctgcccagccttctggtctgaggcgcagctccctctgcccaggtgctgtgcctattcaagtggccttcaggcagagcagcaagtggcccttagcgccccttcccataagcagctgtggtggcagtgagggaggttgggtagccctggactggtcccctcctcagatcacccttgcaaatctggcctcatcttgtattccaacccgacatccctaaaagtacctccacccgttccgggtctggaaggcgttggcaccacaagcactgtccctgtgggaggagcacaaccttctcgggacaggatctgatggggtcttgggctaaaggaggtccctgctgtcctggagaaagtcctagaggttatctcaggaatgactggtggccctgccccaacgtggaaaggtgggaaggaagccttctcccattagccccaatgagagaactcaacgtgccggagctgagtgggccttgcacgagacactggccccactttcaggcctggaggaagcatgcacacatggagacggcgcctgcctgtagatgtttggatcttcgagatctccccaggcatcttgtctcccacaggatcgtgtgtgtaggtggtgttgtgtggttttcctttgtgaaggagagagggaaactatttgtagcttgttttataaaaaataaaaaatgggtaaatcttg

SEQ ID NO: 2263 - DNA, 3074 bp, Homo sapiens; identical to SEQ ID NO: 1181

SEQ ID NO: 2264 - DNA, 2052 bp, Homo sapiens
acgaggggaagaaaggagttggggcaaaacaggaggcgtttccctacccgcatacatccccgtccccgagacacccaatccccccacccccagcctgcccgcgcctcccgcccccagctcctcgccctggggacagctggcagccccgcgcggaccagacacaaagccgatcaatcccggaggcgtgggggcggagggacgacccgccggggctttcccgggcgctgctctcctcctgctgccccctcgctaggacccggcggacgcctcgtctggttttcacgccctctagcccctacccccacacccccaaaacagaacagacccccatccctgggctggaggacccgcctcttggcagccagctgagaaggcgccccggggagggggaaactgacatcccatctagagccgtccctcctcttcctcccctcccgactctctgctcctttcccgccccagaagttcaagggcccccggcctcctgcgctcctgccgccgggaccctcgacctcctcagagcagccggctgccgccccgggaagatggcgaggaggagccgccaccgcctcctcctgctgctgctgcgctacctggtggtcgccctgggctatcataaggcctatgggttttctgccccaaaagaccaacaagtagtcacagcagtagagtaccaagaggctattttagcctgcaaaaccccaaagaagactgtttcctccagattagagtggaagaaactgggtcggagtgtctcctttgtctactatcaacagactcttcaaggtgattttaaaaatcgagctgagatgatagatttcaatatccggatcaaaaatgtgacaagaagtgatgcggggaaatatcgttgtgaagttagtgccccatctgagcaaggccaaaacctggaagaggatacagtcactctggaagtattagtggctccagcagttccatcatgtgaagtaccctcttctgctctgagtggaactgtggtagagctacgatgtcaagacaaagaagggaatccagctcctgaatacacatggtttaaggatggcatccgtttgctagaaaatcccagacttggctcccaaagcaccaacagctcatacacaatgaatacaaaaactggaactctgcaatttaatactgtttccaaactggacactggagaatattcctgtgaagcccgcaattctgttggatatcgcaggtgtcctgggaaacgaatgcaagtagatgatctcaacataagtggcatcatagcagccgtagtagttgtggccttagtgatttccgtttgtggccttggtgtatgctatgctcagaggaaaggctacttttcaagtaaaagaaacctccttccaatatatgttcatgaagagtaattcttcatctaaagccacgacaatgagtgaaaatgtgcagtggctcacgcctgtaatcccagcactttggaaggccgcggcgggcggatcacgaggtcaggagttctagaccagtctggccaatatggtgaaaccccatctctactaaaatacaaaaattagctgggcatggtggcatgtgcctgcagttccagctgcttgggagacaggagaatcacttgaacccgggaggcggaggttgcagtgagctgagatcacgccactgcagtccagcctgggtaacagagcaagattccatctcaaaaaataaaataaataaataaataaatactggtttttacctgtagaattcttacaataaatatagcttgatattcgatttcaagcacacaaaatcctttataatttaaagactccactttagagatacaccaaagccaccgttgttacacaagttattaaactattataaaactctgctttgtccgacatttgcaaagaggtacacgaggaaatggaattggtatttcattttaattttcatgactactaactcacctgaacttgctattttaaacaaatagttctgtcgacacctaaaatataatctggcttcttgtgtctggactaagttaaaagaattaaaatactttgtaatgtc

SEQ ID NO: 2265 - DNA, 7650 bp, Homo sapiens
cggaccctgcgcgcccccgtcccggctcccggccggctcgggggagaaggcgcccgaggggaggcgccggacagatcgcgtttcggaggcggcgcaggtgctgtaaactgcaaaccataatcctgtcttaatactgcaaacaaatcatagtggaactaaggggaacttaatttactgtttccaggttaactaaggtctcagctgtaaaccaaaagtgagaggagacattaagattttcattcttaccgggttgtcttcttcctgaagagcaatggagccgcttttacttggaagaggactaatcgtatatctaatgttcctcctgttaaaattctcaaaagcaattgaaataccatcttcagttcaacaggttccaacaatcataaaacagtcaaaagtccaagttgcctttcccttcgatgagtattttcaaattgaatgtgaagctaaaggaaatccagaaccaacattttcgtggactaaggatggcaaccctttttatttcactgaccatcggataattccatcgaacaattcaggaacattcaggatcccaaacgaggggcacatatctcactttcaagggaaataccgctgctttgcttcaaataaactgggaatcgctatgtcagaagaaatagaatttatagttccaagtgttccaaaattcccaaaagaaaaaattgaccctcttgaagtggaggagggagatccaattgtcctcccatgcaatcctcccaaaggcctcccacctttacacatttattggatgaatattgaattagaacacatcgaacaagatgaaagagtatacatgagccaaaagggagatctatacttcgcaaacgtggaagaaaaggacagtcgcaatgactactgttgctttgctgcatttccaagattaaggactattgtacagaaaatgccaatgaaactaacagttaacagtttaaagcatgctaatgactcaagttcatccacagaaattggttccaaggcaaattccatcaagcaaagaaaacccaaactgctgttgcctcccactgagagtggcagtgagtcttcaattaccatcctcaaaggggaaatcttgctgcttgagtgttttgctgaaggcttgccaactccacaggttgattggaacaaaattggtggtgacttaccaaaggggagagaaacaaaagaaaattatggcaagactttgaagatagagaatgtctcctaccaggacaaaggaaattatcgctgcacagccagcaatttcttgggaacagccactcacgattttcacgttatagtagaagagcctcctcgctggacaaagaagcctcagagtgctgtgtatagcaccggaagcaatggcatcttgttatgtgaggctgaaggagaacctcaacccacaatcaagtggagagtcaatggctccccagttgacaatcatccatttgctggtgatgttgtcttccccagggaaatcagttttaccaaccttcaaccaaatcatactgctgtgtaccagtgtgaagcctcaaatgtccatggaactatccttgccaatgccaatattgatgttgtggatgtccgtccattgatacaaaccaaagatggagaaaattacgctacagtggttgggtacagtgctttcttacattgcgagttctttgcttcacctgaggcagtcgtgtcctggcagaaggtggaagaagtgaaacccctggagggcaggcggtatcatatctatgaaaatggcacattgcagatcaacagaaccaccgaagaagatgctgggtcttactcatgttgggtagaaaatgctataggaaaaactgcagtcacagccaatttggatattagaaatgctacaaaacttagagtttctcctaagaatcctcgtatccccaaattgcatatgcttgaattacattgtgaaagcaaatgtgactcacatttgaaacacagtttgaagttgtcctggagtaaagatggagaagcctttgaaattaatggcacagaagatggcaggataattattgatggagctaatttgaccatatctaatgtaactttagaggaccaaggtatttactgctgttcagctcatactgctctagacagtgctgccgatataactcaagtaactgttcttgatgttccggatccaccagaaaaccttcacttgtctgaaagacagaacaggagtgttcggctgacctgggaagctggagctgaccacaacagcaatattagcgagtatattgttgaatttgaaggaaacaaagaagagcctggaaggtgggaggaactgaccagagtccaaggaaagaaaaccacagttatcttacctttggctccatttgtgagataccagttcagggtcatagccgtgaacgaagtagggagaagtcagcctagccagccgtcagaccatcatgaaacaccaccagcagctccagataggaatccacaaaacataagggttcaagcctctcaacccaaggaaatgattataaagtgggagcctttgaaatccatggagcagaatggaccaggcctagagtacagagtgacctggaagccacagggagccccagtggagtgggaagaagaaacagtcacaaaccacacattgcgggtgatgacgcctgctgtctatgccccttatgatgtcaaggtccaggctatcaatcaactaggatctgggcctgaccctcagtcagtgactctctattctggagaagactatcctgatacagctccagtgatccatggggtggacgttataaacagtacattagttaaagttacctggtcaacagttccaaaggacagagtacatggacgtctgaaaggctatcagataaattggtggaaaacaaaaagtctgttggatggaagaacacatcccaaagaagtgaacattctaagattttcaggacaaagaaactctggaatggttccttccttagatgcctttagtgaatttcatttaacagtcttagcctataactctaaaggagctggtcctgaaagtgagccttatatatttcaaacaccagaaggagtacctgaacagccaacttttctaaaggtcatcaaagttgataaagacactgccactttatcttggggactacctaagaaattaaatggaaacttaactggctatcttttgcaatatcagataataaatgacacctacgagattggagaattaaatgatattaacattacaactccatcaaagcccagctggcacctctcaaacctgaatgcaactaccaagtacaaattctacttgagggcttgcacttcacagggctgtggaaaaccgatcacggaggaaagctccaccttaggagaagggagtaaaggtatcgggaagatatcaggagtaaatcttactcaaaagactcacccaatagaggtatttgagccgggagctgaacatatagttcgcctaatgactaagaattggggcgataatgatagcatttttcaagatgtaattgagacaagagggagagaatatgctggtttatatgatgacatctccactcaaggctggtttattggactgatgtgtgcgattgctcttctcacactactattattaactgtttgctttgtgaagaggaatagaggtggaaagtactcagttaaagaaaaggaagatttgcatccagacccagaaattcagtcagtaaaagatgaaacctttggtgaatacagtgacagtgatgaaaagcctctcaaaggaagccttcggtcccttaatagggatatgcagcctactgaaagtgctgacagcttagtcgaatacggagagggagaccatggtctcttcagtgaagatggatcatttattggtgcctacgctggatctaaggagaagggatctgttgaaagcaatggaagttctacagcaacttttccccttcgggcataaacacaacatatgtaagcaacgctactggttcaccccaaccttccatatttatctgttcaaaggagcaagaactttcatataggaatagaaacatgctggccgaagatttcatccagaagtcaacatcctgcaattatgttgaaaagagtagtactttcttcaaaatataaaatgccaagcacttcaggcctatgttttgcttatattgttttcaggtgctcaaaatgcaaaacacaaaacaaatcctgcatttagatacacctcaactaaatccaaagtccccattcagtatattccatatttgcctgattttactattcggtgtgtttgcatagatgttgctacttggtgggtttttctccgtatgcacattggtatacagtctctgagaactggcttggtgactttgcttcactacaggttaaaagaccataagcaaactggttatttaaaatgtaaaaaggaatatgaaagtcttattaaaacacttcattgaaaatatacagtctaaatttattatttaaattttactagcaaaagtcttaggtgaacaatcaactagtatttgttgagctcctatttgcccagagatggtcatatttaaacagaagtatacgtttttcagtttcaacatgaatttttttatttctgtcagttatgacatccacaagcatcactttttgtgtctgttttttttttttttcttggactaaattcaactgcatggaagcggtggtcagaaggttgttttatacgagaacaggcagaaagtgcccattgttcaggattctaatagctacatctacttaatatcttcatttctaaattgactgcttttacctttttctcatgtttatataatggtatgcttgcatatatttcatgaatacattgtacatattatgttaatatttacacaatttaaaatatagatgtgttttattttgaagtgagaaaatgaacattaacaggcatgtttgtacagctagaatatattagtaagatactgtttttcgtcattccagagctacaactaataacacgaggttccaaagctgaagactttgtataaagtatttgggttttgttcttgtattgctttctttcaacagtttcaaaataaaatatcatataaatattgagggaaatgttttcatatttttcaaaataggtttttattgttgaatgtacatctaccccagcccctcaaaagaaaaactgtttacatagaaattcctacacatacgtttgcgtatatgttattttaaacatctttgtggtgagaattttttccccgatattctccttctgtcaaagtcagaacaaattcagggaatttattttctggcagttgtgctccagtccttttaaaattgtacatgaacatgttttagaaacaatatggaggatgatgcatacatgtcggtcaagttcagcgctcgacattttatggaaagatttttttaaccttaccacgaaatacttaactactgtttaagtgaattgacttatttcactttagtttttgaactgtgattattggtatactgttatatcctcaacttggatttatggtaaccccttatagttcatggagaccaaaatttggggtatttataatagtcagcgcaggaatgcacatggaatatctacttgtccttttgaacctcacgagtcatccagaatgtatagacaggaaaagcatgtcttatttaaaactgtaatttatgggctcaggatctgaccgcagtcccgggagtaagcatttcaaagggggaaggcagtgtggtccctaccctgtgtgaatgtgaggatgtagacatccatcagtgcaactcgagctccatcctcctccgatttctaaggttccagttttctggagggacagtcatcatgttttgatttatctgggagaaaactgtggtgcacagcttgtgaggagggcaaggttgtgacgttcgagcttagttctggtgttattctgtctcctcttctttgtcatcagccaaaacgtggtttttaaagagagtcatgcaggttagaaataatgtcaaaaatatttaggaatttaataacctttaagtcagaaactaaaacaaatactgaaatattagctcttcctacacttcgtgttcccctttagctgcctgaaaatcaagattgctcctgctcagatcttctgagtggctaaaacttatggatatgaaaaatgagattgaatgatgactatgctttgctatcattgttacctttcctcaatactatttggcaactactgggactcttcagcacaaaaggaatagatctatgattgaccctgattttaattgtgaaattatatgattcatatattttatgaatcagaataaccttcaaataaaataaatctaagtcggttaaaatggatttcatgattttccctcagaaaatgagtaacagagtccacggcgtgcaatggtaattataaattggtgatgcttgtttgcaaattgcccactcgtgataagtcaacagccaatatttaaaactttgttcgttactggctttaccctaactttctctagtctactgtcaatatcattttaatgtaattgattgtatatagtctcaagaatggttggtgggcatgagttcctagagaactgtccaagggttgggaaaatccaaattctcttcctggttccagcactgattttgtacataaacattaggcaggttgcttaacctttttatttcaaactctctcaactctaaagtgctaataataatctcagttaccttatctttgtcacagggtgttcttttttatgaagaaaaatttgaaaatgataaaagctaagatgccttctaacttcataagcaaacctttaactaattatgtatctgaaagtcacccccacataccaactcaacttttttcctgtgaacacataaatatatttttatagaaaaacaaatctacataaaataaatctactgtttagtgagcagtatgatttgtacatgccattgaaaattattaatcagaagaaaattaagcagggtctttgctatacaaaagtgttttccactaattttgcatgcgtatttataagaaaaatgtgaatttggtggttttattctatcggtataaaggcattgatattttagatgcacccgtgtttgtaaaaatgtagagcacaatggaattatgctggaagtctcaaataatatttttttcctattttatactcatggaagagataagctaaagaggggacaataatgagaaatgttggtgtgcttttctaagcatttaaaacataattgccaattgaaaccctaaatatgtttacataccattaagatatgattcatgtaacaatgttaaattaattataatgggattgggtttgttatctgtggtagtatatatcctagtgttcctatagtgaaataagtagggttcagccaaagctttctttgttttgtaccttaaattgttcgattacgtcatcaaaagagatgaaaggtatgtagaacaggttcacgtgattacctttttcttttggcttggattaatattcatagtagaactttataaaacgtgtttgtattgtaggtggtgtttgtattatgcttatgactatgtatggtttgaaaatattttcattatacatgaaattcaactttccaaataaaagttctacttcatgtaatccaaa

SEQ ID NO: 2266 - DNA, 1203 bp, Homo sapiens
agttcgcccgttcctggcctgacccccaccaaggcccataccgcagtaggctcctcgggctgcccctcggttgacaatggtctccaggatggtctctaccatgctatctggcctactgttttggctggcatctggatggactccagcatttgcttacagcccccggacccctgaccgggtctcagaagcagatatccagaggctgcttcatggtgttatggagcaattgggcattgccaggccccgagtggaatatccagctcaccaggccatgaatcttgtgggcccccagagcattgaaggtggagctcatgaaggacttcagcatttgggtccttttggcaacatccccaacatcgtggcagagttgactggagacaacattcctaaggactttagtgaggatcaggggtacccagaccctccaaatccctgtcctgttggaaaaacagcagatgatggatgtctagaaaacacccctgacactgcagagttcagtcgagagttccagttgcaccagcatctctttgatccggaacatgactatccaggcttgggcaagtggaacaagaaactcctttacgagaagatgaagggaggagagagacgaaagcggaggagtgtcaatccatatctacaaggacagagactggataatgttgttgcaaagaagtctgtcccccatttttcagatgaggataaggatccagagtaaagagaagatgctagacgaaaacccacattacctgttaggcctcagcatggcttatgtgcacgtgtaaatggagtccctgtgaatgacagcatgtttcttacatagataattatggatacaaagcagctgtatgtagatagtgtattgtcttcacaccgatgattctgctttttgctaaattagaataagagcttttttgtttcttgggtttttaaaatgtgaatctgcaatgatcataaaaattaaaatgtgaatgtcaacaataaaaagcaagactatgaaaggctcagatttcttgcagtttaaaatggtgtctgaggttgtactattttggccaagtctgtagaaagctgtcatttgattttgattatgtagttcatccagcccttgggcattgttatacaccagtaaagaaggctgtactcaagaggaggagctgacacatttcacttggctgcgtcttaataaacatgaatgcaagcattggc

SEQ ID NO: 2267 - DNA, 1429 bp, Homo sapiens
actcgcgcccttgccgctgccaccgcaccccgccatggagcggccgtcgctgcgcgccctgctcctcggcgccgctgggctgctgctcctgctcctgcccctctcctcttcctcctcttcggacacctgcggcccctgcgagccggcctcctgcccgcccctgcccccgctgggctgcctgctgggcgagacccgcgacgcgtgcggctgctgccctatgtgcgcccgcggcgagggcgagccgtgcgggggtggcggcgccggcagggggtactgcgcgccgggcatggagtgcgtgaagagccgcaagaggcggaagggtaaagccggggcagcagccggcggtccgggtgtaagcggcgtgtgcgtgtgcaagagccgctacccggtgtgcggcagcgacggcaccacctacccgagcggctgccagctgcgcgccgccagccagagggccgagagccgcggggagaaggccatcacccaggtcagcaagggcacctgcgagcaaggtccttccatagtgacgccccccaaggacatctggaatgtcactggtgcccaggtgtacttgagctgtgaggtcatcggaatcccgacacctgtcctcatctggaacaaggtaaaaaggggtcactatggagttcaaaggacagaactcctgcctggtgaccgggacaacctggccattcagacccggggtggcccagaaaagcatgaagtaactggctgggtgctggtatctcctctaagtaaggaagatgctggagaatatgagtgccatgcatccaattcccaaggacaggcttcagcatcagcaaaaattacagtggttgatgccttacatgaaataccagtgaaaaaaggtgtgaaggtgccgagctataaacctccagaatattattagtctgcatggttaaaagtagtcatggataactacattacctgttcttgcctaataagtttcttttaatccaatccactaacactttagttatattcactggttttacacagagaaatacaaaataaagatcacacatcaagactatctacaaaaatttattatatatttacagaagaaaagcatgcatatcattaaacaaataaaatactttttatcacaacacagtacatatttgtcatttttaaaaagccacacaatagaaacaagacaccaagatatttaattatcttgttgactcctgtaaaatagctaaacactcatcattcgcggtgcaatactcatagacataagttcctgaaacaatagtttgcatgcgtaaggcattcgcaccaaagaaatctgaaaagaaaaaacaaatggtaattagcagaattgtattgaagtgaccccacttctctaccccagaaaaagacaaagatctggtactgtagataatgaataaatgagtggagctgagaacacaca

SEQ ID NO: 2268 - DNA, 2779 bp, Homo sapiens
acgcccaaataagaagccacctctaagcaaaatagtatatgtataaacggagggcgaatatatacaagtatatatatatgtatattacagacgcacaggtttacacccggtgaactttttctttttctttttcttttttttttaagaaaaactagtgacattgcagagaaggacgcttcctctctatcttttggcgcattagtgaagggggtattctattttgttaaagcgcccaagggggcgcagggaccttggagagaagagtggggaggaaagaggaagggtgggtggggggcagagggcgagtcggcggcggcgagggcaagctctttcttgcggcacgatgccgtctctgctggtgctcactttctccccgtgcgtactactcggctgggcgttgctggccggcggcaccggtggcggtggcgttggcggcggcggcggtggcgcgggcataggcggcggacgccaggagagagaggcgctgccgccacagaagatcgaggtgctggtgttactgccccaggatgactcgtacttgttttcactcacccgggtgcggccggccatcgagtatgctctgcgcagcgtggagggcaacgggactgggaggcggcttctgccgccgggcactcgcttccaggtggcttacgaggattcagactgtgggaaccgtgcgctcttcagcttggtggaccgcgtggcggcggcgcggggcgccaagccagaccttatcctggggccagtgtgcgagtatgcagcagcgccagtggcccggcttgcatcgcactgggacctgcccatgctgtcggctggggcgctggccgctggcttccagcacaaggactctgagtactcgcacctcacgcgcgtggcgcccgcctacgccaagatgggcgagatgatgctcgccctgttccgccaccaccactggagccgcgctgcactggtctacagcgacgacaagctggagcggaactgctacttcaccctcgagggggtccacgaggtcttccaggaggagggtttgcacacgtccatctacagtttcgacgagaccaaagacttggatctggaagacatcgtgcgcaatatccaggccagtgagagagtggtgatcatgtgtgcgagcagtgacaccatccggagcatcatgctggtggcgcacaggcatggcatgaccagtggagactacgccttcttcaacattgagctcttcaacagctcttcctatggagatggctcatggaagagaggagacaaacacgactttgaagctaagcaagcatactcgtccctccagacagtcactctactgaggacagtgaaacctgagtttgagaagttttccatggaggtgaaaagttcagttgagaaacaagggctcaatatggaggattacgttaacatgtttgttgaaggattccacgatgccatcctcctctacgtcttggctctacatgaagtactcagagctggttacagcaaaaaggatggagggaaaattatacagcagacttggaacagaacatttgaaggtatcgccgggcaggtgtccatagatgccaacggagaccgatatggggatttctctgtgattgccatgactgatgtggaggcgggcacccaggaggttattggtgattattttggaaaagaaggtcgttttgaaatgcggccgaatgtcaaatatccttggggccctttaaaactgagaatagatgaaaaccgaattgtagagcatacaaacagctctccctgcaaatcatcaggtggcctagaagaatcggcagtgacaggaattgtcgtgggggctttactaggagctggcttgctaatggccttctactttttcaggaagaaatacagaataaccattgagaggcgaacccagcaagaagaaagtaaccttggaaaacatcgggaattacgggaagattccatcagatcccatttttcagtagcttaaaggaagccccccactttttttttttctgcctgagattctttaaggagatagacgggttgaaagacatcaatgaaacagaaggggcgttcttgaagaattcataattttaagcagttagtaatttcattttaaaatttctgtagaagctcaggaattatgattaatcaccatctgcctccaggcctttcatctcatgacaaacaaatataataatgatatcgtgtcactctgttaaatgttcatactgtttcaagcccatatgattagatttatgtttttaaaatctgttgtctccatatcttgatggcttttgggagcatttcacacaaggatataaaatgcggttttcttaaatgaaatgttttgtagctagaataaaatcatttttacaagtacagcattcttggaaagaatttaacacccaaaaaggggaaaatgtaatgaaaaatctcaaggttggaaatacagccttactctctctagagctggaggacaggtttgtggttgaggacttctctgtccgatgtctacattcaggttctgacttcatatcttgaaaaaggatttcctccctgtctttttcagtgtctcataaacgctactctggattgttgtaaatattagtgagatgggaggatttacagaagaaaagcaagtcaaaaatatttcctttttgatgtaaaaaaaaaaagccctatttcgcactaacattttattttacaagtattttaatcttatattttggtattagaaaaatttgtctattttttcattttgaagattaaatgttgcttacattttaaaaaaaaa

SEQ ID NO: 2269 - DNA, 865 bp, Homo sapiens
aaaagccagccttcagccggagaaccgtttactcgctgctgtgcccatctatcagcaggctccgggctgaagattgcttctcttctctcctccaaggtctagtgacggagcccgcgcgcggcgccaccatgcggcagaaggcggtatcgcttttcttgtgctacctgctgctcttcacttgcagtggggtggaggcaggtgagaatgcgggtaaggatgcaggtaagaaaaagtgctcggagagctcggacagcggctccgggttctggaaggccctgaccttcatggccgtcggaggaggactcgcagtcgccgggctgcccgcgctgggcttcaccggcgccggcatcgcggccaactcggtggctgcctcgctgatgagctggtctgcgatcctgaatgggggcggcgtgcccgccggggggctagtggccacgctgcagagcctcggggctggtggcagcagcgtcgtcataggtaatattggtgccctgatgggctacgccacccacaagtatctcgatagtgaggaggatgaggagtagccagcagctcccagaacctcttcttccttcttggcctaactcttccagttaggatctagaactttgcctttttttttttttttttttttttgagatgggttctcactatattgtccaggctagagtgcagtggctattcacagatgcgaacatagtacactgcagcctccaactcctagcctcaagtgatcctcctgtctcaacctcccaagtaggattacaagcatgcgccgacgatgcccagaatccagaactttgtctatcactctccccaacaacctagatgtgaaaacagaataaacttcacccagaaaacactt

SEQ ID NO: 2270 - DNA, 2216 bp, Homo sapiens; identical to SEQ ID NO: 516

SEQ ID NO: 2271 - DNA, 933 bp, Homo sapiens
atgggagacaatataacatccatcagagagttcctcctactgggatttcccgttggcccaaggattcagatgctcctctttgggctcttctccctgttctacgtcttcaccctgctggggaacgggaccatactggggctcatctcactggactccagactgcacgcccccatgtacttcttcctctcacacctggcggtcgtcgacatcgcctacgcctgcaacacggtgccccggatgctggtgaacctcctgcatccagccaagcccatctcctttgcgggccgcatgatgcagacctttctgttttccacttttgctgtcacagaatgtctcctcctggtggtgatgtcctatgatctgtacgtggccatctgccaccccctccgatatttggccatcatgacctggagagtctgcatcaccctcgcggtgacttcctggaccactggagtccttttatccttgattcatcttgtgttacttctacctttacccttctgtaggccccagaaaatttatcactttttttgtgaaatcttggctgttctcaaacttgcctgtgcagatacccacatcaatgagaacatggtcttggccggagcaatttctgggctggtgggacccttgtccacaattgtagtttcatatatgtgcatcctctgtgctatccttcagatccaatcaagggaagttcagaggaaagccttccgcacctgcttctcccacctctgtgtgattggactcgtttatggcacagccattatcatgtatgttggacccagatatgggaaccccaaggagcagaagaaatatctcctgctgtttcacagcctctttaatcccatgctcaatccccttatctgtagtcttaggaactcagaagtgaagaatactttgaagagagtgctgggagtagaaagggctttatga

SEQ ID NO: 2272 - DNA, 933 bp, Homo sapiens
atgggggacaatataacatccatcacagagttcctcctactgggatttcccgttggcccaaggattcagatgctcctctttgggctcttctccctgttctacgtcttcaccctgctggggaacgggaccatactggggctcatctcactggactccagactgcacgcccccatgtacttcttcctctcacacctggcggtcgtcgacatcgcctacgcctgcaacacggtgccccggatgctggtgaacctcctgcatccagccaagcccatctcctttgcgggccgcatgatgcagacctttctgttttccacttttgctgtcacagaatgtctcctcctggtggtgatgtcctatgatctgtacgtggccatctgccaccccctccgatatttggccatcatgacctggagagtctgcatcaccctcgcggtgacttcctggaccactggagtccttttatccttgattcatcttgtgttacttctacctttacccttctgtaggccccagaaaatttatcactttttttgtgaaatcttggctgttctcaaacttgcctgtgcagatacccacatcaatgagaacatggtcttggccggagcaatttctgggctggtgggacccttgtccacaattgtagtttcatatatgtgcatcctctgtgctatccttcagatccaatcaagggaagttcagaggaaagccttctgcacctgcttctcccacctctgtgtgattggactcttttatggcacagccattatcatgtatgttggacccagatatgggaaccccaaggagcagaagaaatatctcctgctgtttcacagcctctttaatcccatgctcaatccccttatctgtagtcttaggaactcagaagtgaagaatactttgaagagagtgctgggagtagaaagggctttatga

SEQ ID NO: 2273 - DNA, 2364 bp, Homo sapiens; identical to SEQ ID NO: 147

SEQ ID NO: 2274 - DNA, 2206 bp, Homo sapiens
agaactcccgagccagggagggggtgcacagtcacctggcgggacagaggctggcggagggacgggaacccaggcggggcgagccgcgggagagtggagggcaggcgcctgggctgggggcggggaccaggcggggcagggggcagggagaggagggcggcgggagcctgagccggaatcgcagcgtgagcaggtggagccgcgttgggagcccgccgggtcgagctgagtaaggcggcgggctcggcgggggccatggagctgctaaagctgaaccggagcgtgcagggaaccggacccgggccgggggcttccctgtgccgcccgggggcgcctctcctcaacagcagcagtgtgggcaacctcagctgcgagccccctcgcattcgcggagccgggacacgagaattggagctggccattagaatcactctttacgcagtgatcttcctgatgagcgttggaggaaatatgctcatcatcgtggtcctgggactgagccgccgcctgaggactgtcaccaatgccttcctcctctcactggcagtcagcgacctcctgctggctgtggcttgcatgcccttcaccctcctgcccaatctcatgggcacattcatctttggcaccgtcatctgcaaggcggtttcctacctcatgggggtgtctgtgagtgtgtccacgctaagcctcgtggccatcgcactggagcggtacagcgccatctgccgaccactgcaggcacgagtgtggcagacgcgctcccacgcggctcgcgtgattgtagccacgtggctgctgtccggactactcatggtgccctaccccgtgtacactgtcgtgcaaccagtggggcctcgtgtgctgcagtgcgtgcatcgctggcccagtgcgcgggtccgccagacctggtccgtactgctgcttctgctcttgttcttcatcccgggtgtggttatggccgtggcctacgggcttatctctcgcgagctctacttagggcttcgctttgacggcgacagtgacagcgacagccaaagcagggtccgaaaccaaggcgggctgccaggggctgttcaccagaacgggcgttgccggcctgagactggcgcggttggcgaagacagcgatggctgctacgtgcaacttccacgttcccggcctgccctggagctgacggcgctgacggctcctgggccgggatccggctcccggcccacccaggccaagctgctggctaagaagcgcgtggtgcgaatgttgctggtgatcgttgtgcttttttttctgtgttggttgccagtttatagtgccaacacgtggcgcgcctttgatggcccgggtgcacaccgagcactctcgggtgctcctatctccttcattcacttgctgagctacgcctcggcctgtgtcaaccccctggtctactgcttcatgcaccgtcgctttcgccaggcctgcctggaaacttgcgctcgctgctgcccccggcctccacgagctcgccccagggctcttcccgatgaggaccctcccactccctccattgcttcgctgtccaggcttagctacaccaccatcagcacactgggccctggctgaggagtagaggggccgtgggggttgaggcagggcaaatgacatgcactgacccttccagacatacgaaacacaaaccacaactgacacaggaaaccaacacccaaagcatggactaaccccaacgcacaggaaaaggtagcttacctgacacaagaggaataagaatggagcagtacatgggaaaggaggcatgcctctgatatgggactgagcctggcccatagaaacatgacactgaccttggagagacacagcgtccctagcagtgaactatttctacacagtgggaactctgacaagggctgacctgcctctcacacacatagattaatggcactgattgttttagagactatggagcctggcacaggactgactctgggatgctcctagtttgacctcacagtgacccttcccaatcagcactgaaaataccatcaggcctaatctcatacctctgaccaacaggctgttctgcactgaaaaggttcttcatccctttccagttaaggaccgtggccctgccctctccttccttacccaaactgttcaagaaataataaattgtttggcttcctcctgaaaaaaaaaaaaaaaaaaaaaaaaa

SEQ ID NO: 2275 - DNA, 897 bp, Homo sapiens; identical to SEQ ID NO: 580

SEQ ID NO: 2276 - DNA, 897 bp, Homo sapiens; identical to SEQ ID NO: 580

SEQ ID NO: 2277 - DNA, 2774 bp, Homo sapiens; identical to SEQ ID NO: 122

SEQ ID NO: 2278 - DNA, 6584 bp, Homo sapiens; identical to SEQ ID NO: 562

SEQ ID NO: 2279 - DNA, 8815 bp, Homo sapiens
gcccgcgccggctgtgctgcacagggggaggagagggaaccccaggcgcgagcgggaagaggggacctgcagccacaacttctctggtcctctgcatcccttctgtccctccacccgtccccttccccaccctctggcccccaccttcttggaggcgacaacccccgggaggcattagaagggatttttcccgcaggttgcgaagggaagcaaacttggtggcaacttgcctcccggtgcgggcgtctctcccccaccgtctcaacatgcttaggggtccggggcccgggctgctgctgctggccgtccagtgcctggggacagcggtgccctccacgggagcctcgaagagcaagaggcaggctcagcaaatggttcagccccagtccccggtggctgtcagtcaaagcaagcccggttgttatgacaatggaaaacactatcagataaatcaacagtgggagcggacctacctaggcaatgcgttggtttgtacttgttatggaggaagccgaggttttaactgcgagagtaaacctgaagctgaagagacttgctttgacaagtacactgggaacacttaccgagtgggtgacacttatgagcgtcctaaagactccatgatctgggactgtacctgcatcggggctgggcgagggagaataagctgtaccatcgcaaaccgctgccatgaagggggtcagtcctacaagattggtgacacctggaggagaccacatgagactggtggttacatgttagagtgtgtgtgtcttggtaatggaaaaggagaatggacctgcaagcccatagctgagaagtgttttgatcatgctgctgggacttcctatgtggtcggagaaacgtgggagaagccctaccaaggctggatgatggtagattgtacttgcctgggagaaggcagcggacgcatcacttgcacttctagaaatagatgcaacgatcaggacacaaggacatcctatagaattggagacacctggagcaagaaggataatcgaggaaacctgctccagtgcatctgcacaggcaacggccgaggagagtggaagtgtgagaggcacacctctgtgcagaccacatcgagcggatctggccccttcaccgatgttcgtgcagctgtttaccaaccgcagcctcacccccagcctcctccctatggccactgtgtcacagacagtggtgtggtctactctgtggggatgcagtggctgaagacacaaggaaataagcaaatgctttgcacgtgcctgggcaacggagtcagctgccaagagacagctgtaacccagacttacggtggcaactcaaatggagagccatgtgtcttaccattcacctacaatggcaggacgttctactcctgcaccacagaagggcgacaggacggacatctttggtgcagcacaacttcgaattatgagcaggaccagaaatactctttctgcacagaccacactgttttggttcagactcgaggaggaaattccaatggtgccttgtgccacttccccttcctatacaacaaccacaattacactgattgcacttctgagggcagaagagacaacatgaagtggtgtgggaccacacagaactatgatgccgaccagaagtttgggttctgccccatggctgcccacgaggaaatctgcacaaccaatgaaggggtcatgtaccgcattggagatcagtgggataagcagcatgacatgggtcacatgatgaggtgcacgtgtgttgggaatggtcgtggggaatggacatgcattgcctactcgcagcttcgagatcagtgcattgttgatgacatcacttacaatgtgaacgacacattccacaagcgtcatgaagaggggcacatgctgaactgtacatgcttcggtcagggtcggggcaggtggaagtgtgatcccgtcgaccaatgccaggattcagagactgggacgttttatcaaattggagattcatgggagaagtatgtgcatggtgtcagataccagtgctactgctatggccgtggcattggggagtggcattgccaacctttacagacctatccaagctcaagtggtcctgtcgaagtatttatcactgagactccgagtcagcccaactcccaccccatccagtggaatgcaccacagccatctcacatttccaagtacattctcaggtggagacctaaaaattctgtaggccgttggaaggaagctaccataccaggccacttaaactcctacaccatcaaaggcctgaagcctggtgtggtatacgagggccagctcatcagcatccagcagtacggccaccaagaagtgactcgctttgacttcaccaccaccagcaccagcacacctgtgaccagcaacaccgtgacaggagagacgactcccttttctcctcttgtggccacttctgaatctgtgaccgaaatcacagccagtagctttgtggtctcctgggtctcagcttccgacaccgtgtcgggattccgggtggaatatgagctgagtgaggagggagatgagccacagtacctggatcttccaagcacagccacttctgtgaacatccctgacctgcttcctggccgaaaatacattgtaaatgtctatcagatatctgaggatggggagcagagtttgatcctgtctacttcacaaacaacagcgcctgatgcccctcctgacccgactgtggaccaagttgatgacacctcaattgttgttcgctggagcagaccccaggctcccatcacagggtacagaatagtctattcgccatcagtagaaggtagcagcacagaactcaaccttcctgaaactgcaaactccgtcaccctcagtgacttgcaacctggtgttcagtataacatcactatctatgctgtggaagaaaatcaagaaagtacacctgttgtcattcaacaagaaaccactggcaccccacgctcagatacagtgccctctcccagggacctgcagtttgtggaagtgacagacgtgaaggtcaccatcatgtggacaccgcctgagagtgcagtgaccggctaccgtgtggatgtgatccccgtcaacctgcctggcgagcacgggcagaggctgcccatcagcaggaacacctttgcagaagtcaccgggctgtcccctggggtcacctattacttcaaagtctttgcagtgagccatgggagggagagcaagcctctgactgctcaacagacaaccaaactggatgctcccactaacctccagtttgtcaatgaaactgattctactgtcctggtgagatggactccacctcgggcccagataacaggataccgactgaccgtgggccttacccgaagaggacagcccaggcagtacaatgtgggtccctctgtctccaagtacccactgaggaatctgcagcctgcatctgagtacaccgtatccctcgtggccataaagggcaaccaagagagccccaaagccactggagtctttaccacactgcagcctgggagctctattccaccttacaacaccgaggtgactgagaccaccattgtgatcacatggacgcctgctccaagaattggttttaagctgggtgtacgaccaagccagggaggagaggcaccacgagaagtgacttcagactcaggaagcatcgttgtgtccggcttgactccaggagtagaatacgtctacaccatccaagtcctgagagatggacaggaaagagatgcgccaattgtaaacaaagtggtgacaccattgtctccaccaacaaacttgcatctggaggcaaaccctgacactggagtgctcacagtctcctgggagaggagcaccaccccagacattactggttatagaattaccacaacccctacaaacggccagcagggaaattctttggaagaagtggtccatgctgatcagagctcctgcacttttgataacctgagtcccggcctggagtacaatgtcagtgtttacactgtcaaggatgacaaggaaagtgtccctatctctgataccatcatcccagaggtgccccaactcactgacctaagctttgttgatataaccgattcaagcatcggcctgaggtggaccccgctaaactcttccaccattattgggtaccgcatcacagtagttgcggcaggagaaggtatccctatttttgaagattttgtggactcctcagtaggatactacacagtcacagggctggagccgggcattgactatgatatcagcgttatcactctcattaatggcggcgagagtgcccctactacactgacacaacaaacggctgttcctcctcccactgacctgcgattcaccaacattggtccagacaccatgcgtgtcacctgggctccacccccatccattgatttaaccaacttcctggtgcgttactcacctgtgaaaaatgaggaagatgttgcagagttgtcaatttctccttcagacaatgcagtggtcttaacaaatctcctgcctggtacagaatatgtagtgagtgtctccagtgtctacgaacaacatgagagcacacctcttagaggaagacagaaaacaggtcttgattccccaactggcattgacttttctgatattactgccaactcttttactgtgcactggattgctcctcgagccaccatcactggctacaggatccgccatcatcccgagcacttcagtgggagacctcgagaagatcgggtgccccactctcggaattccatcaccctcaccaacctcactccaggcacagagtatgtggtcagcatcgttgctcttaatggcagagaggaaagtcccttattgattggccaacaatcaacagtttctgatgttccgagggacctggaagttgttgctgcgacccccaccagcctactgatcagctgggatgctcctgctgtcacagtgagatattacaggatcacttacggagagacaggaggaaatagccctgtccaggagttcactgtgcctgggagcaagtctacagctaccatcagcggccttaaacctggagttgattataccatcactgtgtatgctgtcactggccgtggagacagccccgcaagcagcaagccaatttccattaattaccgaacagaaattgacaaaccatcccagatgcaagtgaccgatgttcaggacaacagcattagtgtcaagtggctgccttcaagttcccctgttactggttacagagtaaccaccactcccaaaaatggaccaggaccaacaaaaactaaaactgcaggtccagatcaaacagaaatgactattgaaggcttgcagcccacagtggagtatgtggttagtgtctatgctcagaatccaagcggagagagtcagcctctggttcagactgcagtaaccaacattgatcgccctaaaggactggcattcactgatgtggatgtcgattccatcaaaattgcttgggaaagcccacaggggcaagtttccaggtacagggtgacctactcgagccctgaggatggaatccatgagctattccctgcacctgatggtgaagaagacactgcagagctgcaaggcctcagaccgggttctgagtacacagtcagtgtggttgccttgcacgatgatatggagagccagcccctgattggaacccagtccacagctattcctgcaccaactgacctgaagttcactcaggtcacacccacaagcctgagcgcccagtggacaccacccaatgttcagctcactggatatcgagtgcgggtgacccccaaggagaagaccggaccaatgaaagaaatcaaccttgctcctgacagctcatccgtggttgtatcaggacttatggtggccaccaaatatgaagtgagtgtctatgctcttaaggacactttgacaagcagaccagctcagggagttgtcaccactctggagaatgtcagcccaccaagaagggctcgtgtgacagatgctactgagaccaccatcaccattagctggagaaccaagactgagacgatcactggcttccaagttgatgccgttccagccaatggccagactccaatccagagaaccatcaagccagatgtcagaagctacaccatcacaggtttacaaccaggcactgactacaagatctacctgtacaccttgaatgacaatgctcggagctcccctgtggtcatcgacgcctccactgccattgatgcaccatccaacctgcgtttcctggccaccacacccaattccttgctggtatcatggcagccgccacgtgccaggattaccggctacatcatcaagtatgagaagcctgggtctcctcccagagaagtggtccctcggccccgccctggtgtcacagaggctactattactggcctggaaccgggaaccgaatatacaatttatgtcattgccctgaagaataatcagaagagcgagcccctgattggaaggaaaaagacagacgagcttccccaactggtaacccttccacaccccaatcttcatggaccagagatcttggatgttccttccacagttcaaaagacccctttcgtcacccaccctgggtatgacactggaaatggtattcagcttcctggcacttctggtcagcaacccagtgttgggcaacaaatgatctttgaggaacatggttttaggcggaccacaccgcccacaacggccacccccataaggcataggccaagaccatacccgccgaatgtaggtgaggaaatccaaattggtcacatccccagggaagatgtagactatcacctgtacccacacggtccgggactcaatccaaatgcctctacaggacaagaagctctctctcagacaaccatctcatgggccccattccaggacacttctgagtacatcatttcatgtcatcctgttggcactgatgaagaacccttacagttcagggttcctggaacttctaccagtgccactctgacaggcctcaccagaggtgccacctacaacatcatagtggaggcactgaaagaccagcagaggcataaggttcgggaagaggttgttaccgtgggcaactctgtcaacgaaggcttgaaccaacctacggatgactcgtgctttgacccctacacagtttcccattatgccgttggagatgagtgggaacgaatgtctgaatcaggctttaaactgttgtgccagtgcttaggctttggaagtggtcatttcagatgtgattcatctagatggtgccatgacaatggtgtgaactacaagattggagagaagtgggaccgtcagggagaaaatggccagatgatgagctgcacatgtcttgggaacggaaaaggagaattcaagtgtgaccctcatgaggcaacgtgttatgatgatgggaagacataccacgtaggagaacagtggcagaaggaatatctcggtgccatttgctcctgcacatgctttggaggccagcggggctggcgctgtgacaactgccgcagacctgggggtgaacccagtcccgaaggcactactggccagtcctacaaccagtattctcagagataccatcagagaacaaacactaatgttaattgcccaattgagtgcttcatgcctttagatgtacaggctgacagagaagattcccgagagtaaatcatctttccaatccagaggaacaagcatgtctctctgccaagatccatctaaactggagtgatgttagcagacccagcttagagttcttctttctttcttaagccctttgctctggaggaagttctccagcttcagctcaactcacagcttctccaagcatcaccctgggagtttcctgagggttttctcataaatgagggctgcacattgcctgttctgcttcgaagtattcaataccgctcagtattttaaatgaagtgattctaagatttggtttgggatcaataggaaagcatatgcagccaaccaagatgcaaatgttttgaaatgatatgaccaaaattttaagtaggaaagtcacccaaacacttctgctttcacttaagtgtctggcccgcaatactgtaggaacaagcatgatcttgttactgtgatattttaaatatccacagtactcactttttccaaatgatcctagtaattgcctagaaatatctttctcttacctgttatttatcaatttttcccagtatttttatacggaaaaaattgtattgaaaacacttagtatgcagttgataagaggaatttggtataattatggtgggtgattattttttatactgtatgtgccaaagctttactactgtggaaagacaactgttttaataaaagatttacattccacaacttgaagttcatctatttgatataagacaccttcgggggaaataattcctgtgaatattctttttcaattcagcaaacatttgaaaatctatgatgtgcaagtctaattgttgatttcagtacaagattttctaaatcagttgctacaaaaactgattggtttttgtcacttcatctcttcactaatggagatagctttacactttctgctttaatagatttaagtggaccccaatatttattaaaattgctagtttaccgttcagaagtataatagaaataatctttagttgctcttttctaaccattgtaattcttcccttcttccctccacctttccttcattgaataaacctctgttcaaagagattgcctgcaagggaaataaaaatgactaagatattaaaaaaaaaaaaaaaaaa

SEQ ID NO: 2280 - DNA, 3150 bp, Homo sapiens; identical to SEQ ID NO: 569

SEQ ID NO: 2281 - DNA, 7335 bp, Homo sapiens; identical to SEQ ID NO: 558

SEQ ID NO: 2282 - DNA, 3913 bp, Homo sapiens
ctttcactggcaagagacggagtcctgggtttcagttccagttgcctgcggtgggctgtgtgagtttgccaaagtcccctgccctctctgggtctcggttccctcgcctgtccacgtgaggttggaggagctgaacgccgacgtcatttttagctaagagggagcagggtccccgagtcgccggcccagggtctgcgcatccgaggccgcgcgccctttcccctcccccacggctcctccgggccccgcactctgcgccccggctgccgcccagcgccctacaccgccctcagggggccctcgcgggctccccccggccgggatgccagtgccccgcgccacgcgcgcctgctcccgcgccgcctgccctgcagcctgcccgcggcgcctttatacccagcgggctcggcgctcactaatgtttaactcggggccgaaacttgccagcggcgagtgactccaccgcccggagcagcggtgcaggacgcgcgtctccgccgcccgcggtgacttctgcctgcgctccttctctgaacgctcacttccgaggagacgccgacgatgaagacaccgtggaaggttcttctgggactgctgggtgctgctgcgcttgtcaccatcatcaccgtgcccgtggttctgctgaacaaaggcacagatgatgctacagctgacagtcgcaaaacttacactctaactgattacttaaaaaatacttatagactgaagttatactccttaagatggatttcagatcatgaatatctctacaaacaagaaaataatatcttggtattcaatgctgaatatggaaacagctcagttttcttggagaacagtacatttgatgagtttggacattctatcaatgattattcaatatctcctgatgggcagtttattctcttagaatacaactacgtgaagcaatggaggcattcctacacagcttcatatgacatttatgatttaaataaaaggcagctgattacagaagagaggattccaaacaacacacagtgggtcacatggtcaccagtgggtcataaattggcatatgtttggaacaatgacatttatgttaaaattgaaccaaatttaccaagttacagaatcacatggacggggaaagaagatataatatataatggaataactgactgggtttatgaagaggaagtcttcagtgcctactctgctctgtggtggtctccaaacggcacttttttagcatatgcccaatttaacgacacagaagtcccacttattgaatactccttctactctgatgagtcactgcagtacccaaagactgtacgggttccatatccaaaggcaggagctgtgaatccaactgtaaagttctttgttgtaaatacagactctctcagctcagtcaccaatgcaacttccatacaaatcactgctcctgcttctatgttgataggggatcactacttgtgtgatgtgacatgggcaacacaagaaagaatttctttgcagtggctcaggaggattcagaactattcggtcatggatatttgtgactatgatgaatccagtggaagatggaactgcttagtggcacggcaacacattgaaatgagtactactggctgggttggaagatttaggccttcagaacctcattttacccttgatggtaatagcttctacaagatcatcagcaatgaagaaggttacagacacatttgctatttccaaatagataaaaaagactgcacatttattacaaaaggcacctgggaagtcatcgggatagaagctctaaccagtgattatctatactacattagtaatgaatataaaggaatgccaggaggaaggaatctttataaaatccaacttagtgactatacaaaagtgacatgcctcagttgtgagctgaatccggaaaggtgtcagtactattctgtgtcattcagtaaagaggcgaagtattatcagctgagatgttccggtcctggtctgcccctctatactctacacagcagcgtgaatgataaagggctgagagtcctggaagacaattcagctttggataaaatgctgcagaatgtccagatgccctccaaaaaactggacttcattattttgaatgaaacaaaattttggtatcagatgatcttgcctcctcattttgataaatccaagaaatatcctctactattagatgtgtatgcaggcccatgtagtcaaaaagcagacactgtcttcagactgaactgggccacttaccttgcaagcacagaaaacattatagtagctagctttgatggcagaggaagtggttaccaaggagataagatcatgcatgcaatcaacagaagactgggaacatttgaagttgaagatcaaattgaagcagccagacaattttcaaaaatgggatttgtggacaacaaacgaattgcaatttggggctggtcatatggagggtacgtaacctcaatggtcctgggatcgggaagtggcgtgttcaagtgtggaatagccgtggcgcctgtatcccggtgggagtactatgactcagtgtacacagaacgttacatgggtctcccaactccagaagacaaccttgaccattacagaaattcaacagtcatgagcagagctgaaaattttaaacaagttgagtacctccttattcatggaacagcagatgataacgttcactttcagcagtcagctcagatctccaaagccctggtcgatgttggagtggatttccaggcaatgtggtatactgatgaagaccatggaatagctagcagcacagcacaccaacatatatatacccacatgagccacttcataaaacaatgtttctctttaccttagcacctcaaaataccatgccatttaaagcttattaaaactcatttttgttttcattatctcaaaactgcactgtcaagatgatgatgatctttaaaatacacactcaaatcaagaaacttaaggttacctttgttcccaaatttcatacctatcatcttaagtagggacttctgtcttcacaacagattattaccttacagaagtttgaattatccggtcgggttttattgtttaaaatcatttctgcatcagctgctgaaacaacaaataggaattgtttttatggaggctttgcatagattccctgagcaggattttaatctttttctaactggactggttcaaatgttgttctcttctttaaagggatggcaagatgtgggcagtgatgtcactagggcagggacaggataagagggattagggagagaagatagcagggcatggctgggaacccaagtccaagcataccaacacgagcaggctactgtcagctcccctcggagaagagctgttcacagccagactggcacagttttctgagaaagactattcaaacagtctcaggaaatcaaatatgcaaagcactgacttctaagtaaaaccacagcagttgaaaagactccaaagaaatgtaagggaaactgccagcaacgcaggcccccaggtgccagttatggctataggtgctacaaaaacacagcaagggtgatgggaaagcattgtaaatgtgcttttaaaaaaaaatactgatgttcctagtgaaagaggcagcttgaaactgagatgtgaacacatcagcttgccctgttaaaagatgaaaatatttgtatcacaaatcttaacttgaaggagtccttgcatcaatttttcttatttcatttctttgagtgtcttaattaaaagaatattttaacttccttggactcattttaaaaaatggaacataaaatacaatgttatgtattattattcccattctacatactatggaatttctcccagtcatttaataaatgtgccttcattttttcagaaaaaaaaaaaaaaa

SEQ ID NO: 2283 - DNA, 3655 bp, Homo sapiens; identical to SEQ ID NO: 1961

SEQ ID NO: 2284 - DNA, 3134 bp, Homo sapiens; identical to SEQ ID NO: 112

SEQ ID NO: 2285 - DNA, 4099 bp, Homo sapiens; identical to SEQ ID NO: 134

SEQ ID NO: 2286 - DNA, 3157 bp, Homo sapiens; identical to SEQ ID NO: 118

SEQ ID NO: 2287 - DNA, 6333 bp, Homo sapiens; identical to SEQ ID NO: 546

SEQ ID NO: 2288 - DNA, 10107 bp, Homo sapiens
aaatcctaaccctctctcccagaacgtgtctctgctgcaaggcaccgggccctttcgctctgcagaactgcacttgcaagaccattatcaactcctaatcccagctcagaaagggagcctctgcgactcattcatcgccctccaggactgactgcattgcacagatgatggatatttacgtatgtttgaaacgaccatcctggatggtggacaataaaagaatgaggactgcttcaaatttccagtggctgttatcaacatttattcttctatatctaatgaatcaagtaaatagccagaaaaagggggctcctcatgatttgaagtgtgtaactaacaatttgcaagtgtggaactgttcttggaaagcaccctctggaacaggccgtggtactgattatgaagtttgcattgaaaacaggtcccgttcttgttatcagttggagaaaaccagtattaaaattccagctctttcacatggtgattatgaaataacaataaattctctacatgattttggaagttctacaagtaaattcacactaaatgaacaaaacgtttccttaattccagatactccagagatcttgaatttgtctgctgatttctcaacctctacattatacctaaagtggaacgacaggggttcagtttttccacaccgctcaaatgttatctgggaaattaaagttctacgtaaagagagtatggagctcgtaaaattagtgacccacaacacaactctgaatggcaaagatacacttcatcactggagttgggcctcagatatgcccttggaatgtgccattcattttgtggaaattagatgctacattgacaatcttcatttttctggtctcgaagagtggagtgactggagccctgtgaagaacatttcttggatacctgattctcagactaaggtttttcctcaagataaagtgatacttgtaggctcagacataacattttgttgtgtgagtcaagaaaaagtgttatcagcactgattggccatacaaactgccccttgatccatcttgatggggaaaatgttgcaatcaagattcgtaatatttctgtttctgcaagtagtggaacaaatgtagtttttacaaccgaagataacatatttggaaccgttatttttgctggatatccaccagatactcctcaacaactgaattgtgagacacatgatttaaaagaaattatatgtagttggaatccaggaagggtgacagcgttggtgggcccacgtgctacaagctacactttagttgaaagtttttcaggaaaatatgttagacttaaaagagctgaagcacctacaaacgaaagctatcaattattatttcaaatgcttccaaatcaagaaatatataattttactttgaatgctcacaatccgctgggtcgatcacaatcaacaattttagttaatataactgaaaaagtttatccccatactcctacttcattcaaagtgaaggatattaattcaacagctgttaaactttcttggcatttaccaggcaactttgcaaagattaattttttatgtgaaattgaaattaagaaatctaattcagtacaagagcagcggaatgtcacaatcaaaggagtagaaaattcaagttatcttgttgctctggacaagttaaatccatacactctatatacttttcggattcgttgttctactgaaactttctggaaatggagcaaatggagcaataaaaaacaacatttaacaacagaagccagtccttcaaaggggcctgatacttggagagagtggagttctgatggaaaaaatttaataatctattggaagcctttacccattaatgaagctaatggaaaaatactttcctacaatgtatcgtgttcatcagatgaggaaacacagtccctttctgaaatccctgatcctcagcacaaagcagagatacgacttgataagaatgactacatcatcagcgtagtggctaaaaattctgtgggctcatcaccaccttccaaaatagcgagtatggaaattccaaatgatgatctcaaaatagaacaagttgttgggatgggaaaggggattctcctcacctggcattacgaccccaacatgacttgcgactacgtcattaagtggtgtaactcgtctcggtcggaaccatgccttatggactggagaaaagttccctcaaacagcactgaaactgtaatagaatctgatgagtttcgaccaggtataagatataattttttcctgtatggatgcagaaatcaaggatatcaattattacgctccatgattggatatatagaagaattggctcccattgttgcaccaaattttactgttgaggatacttctgcagattcgatattagtaaaatgggaagacattcctgtggaagaacttagaggctttttaagaggatatttgttttactttggaaaaggagaaagagacacatctaagatgagggttttagaatcaggtcgttctgacataaaagttaagaatattactgacatatcccagaagacactgagaattgctgatcttcaaggtaaaacaagttaccacctggtcttgcgagcctatacagatggtggagtgggcccggagaagagtatgtatgtggtgacaaaggaaaattctgtgggattaattattgccattctcatcccagtggcagtggctgtcattgttggagtggtgacaagtatcctttgctatcggaaacgagaatggattaaagaaaccttctaccctgatattccaaatccagaaaactgtaaagcattacagtttcaaaagagtgtctgtgagggaagcagtgctcttaaaacattggaaatgaatccttgtaccccaaataatgttgaggttctggaaactcgatcagcatttcctaaaatagaagatacagaaataatttccccagtagctgagcgtcctgaagatcgctctgatgcagagcctgaaaaccatgtggttgtgtcctattgtccacccatcattgaggaagaaataccaaacccagccgcagatgaagctggagggactgcacaggttatttacattgatgttcagtcgatgtatcagcctcaagcaaaaccagaagaagaacaagaaaatgaccctgtaggaggggcaggctataagccacagatgcacctccccattaattctactgtggaagatatagctgcagaagaggacttagataaaactgcgggttacagacctcaggccaatgtaaatacatggaatttagtgtctccagactctcctagatccatagacagcaacagtgagattgtctcatttggaagtccatgctccattaattcccgacaatttttgattcctcctaaagatgaagactctcctaaatctaatggaggagggtggtcctttacaaacttttttcagaacaaaccaaacgattaacagtgtcaccgtgtcacttcagtcagccatctcaataagctcttactgctagtgttgctacatcagcactgggcattcttggagggatcctgtgaagtattgttaggaggtgaacttcactacatgttaagttacactgaaagtgttcatgtgcttttaatgtagtctaaaagccaaagtatagtgactcagaatcctcaatccacaaaactcaagattgggagctctttgtgatcaagccaaagaattctcatgtactctaccttcaagaagcatttcaaggctaatacctacttgtacgtacatgtaaaacaaatcccgccgcaactgttttctgttctgttgtttgtggttttctcatgtgtatacttggtggaattgtaagtggatttgcaggccagggagaaaatgtccaagtaacaggtgaagtttatttgcctgacgtttactcctttctagatgaaaaccaagcacagattttaaaacttctaagattattctcctctatccacagcattcacaaaaattaatataatttttaatgtagtgacagcgatttagtgttttgtttgataaagtatgcttatttctgtgcctactgtataatggttatcaaacagttgtctcaggggtacaaactttgaaaacaagtgtgacactgaccagcccaaatcataatcatgttttcttgctgtgataggttttgcaagccttttcattattttttagcttttatgcttgcttccattatttcagttggttgccctaatatttaaaatttacacttctaagactagagacccacattttttaaaaatcattttattttgtgatacagtgacagctttatatgagcaaattcaatattattcataagcatgtaattccagtgacttactatgtgagatgactactaagcaatatctagcagcgttagctgtccatatagttctgattggatttcgttcctcctgaggagaccatgccgttgagcttggctacccaggcagtggtgatctttgacaccttctggtggatgttcctcccactcatgagtcttttcatcatgccacattatctgatccagtcctcacatttttaaatataaaactaaagagagaatgcttcttacaggaacagttacccaagggctgtttcttagtaactgtcataaactgatctgaatccatgggcatacctgtgttgcaggtgcagcaattgcttggtgagctgtgcagaattgattgccttcagcacagcatcctctgcccacccttgtttctcataagcgatgtctggagtgattgtggttcttggaaaagcagaaggaaaaactaaaaagtgtatcttgtattttccctgccctcaggttgcctatgtattttaccttttcatatttaaggcaaaagtacttgaaaattttaagtgtccgaataagatatgtcttttttgtttgttttttttggttgtttgtttgttttttatcatctgagattctgtaatgtatttgcaaataatggatcaattaattttttttgaagctcatattgtatctttttaaaaaccatgttgtggaaaaaagccagagtgacaagtgacaaaatctatttaggttctctgtgtatgaatcctgattttaactgctaggattcagctaaatttctgagctttatgatctgtggaaatttggaatgaaatgcaattcattttgtacatacatagtatattaaaactatataatagttcatagaaatgttcagtaatgaaaaatatatccaatcagagccatccctaaagagtgttctcttgtcttcctttgtatcctctttggctccttcccttagcttccaccccagacatcagacctggggctgccttctctccctgccaaagcttgctgttagcattgtctgcttgccctcaactcctgccttgttccctgttgaaatgtatcaatcccgtactttatctctccaggacaaggataagtgtggctacagtaaaagtttattgctctaaacggcgctaacctgagataatgagaaaaggccagaagagattgtttgatctctgtctgtcaatatatatgcatttcaactgtgaccatctggatccagggccctttctaacctatataacgactcatttgtttggttaatgatgaatatcactggggctcttaagtcctttcgttctatccaagacttcattgtttttttctgtatgaaaaaagtgcagaatatcactcacctttcccctacttttggatcccctacacgaggatcactagcttaatgagaagcagagtaacgctattaagtctgggcaagctccttataagttgctgtgtgcttaaaagaatgtgatttatgtctggggccaaagcagttttccttcttttccctcattgaattcaagacagctagacccttgtgtagatcccaggatattacctctactccccccaacctgtgtgtgtagggagagtaacaacacgggaagaggggagggaagttggaaggagattggtcacatgttcagttgtctgagatactggtaaatgtgcgctgtttgtcaatgaaggttgcatgcctgcatttacaaggtggtctcatactgattgtgctctgtccagttagattcgtggcttctcccttggaagctacaattaaggactagttagaagcagaggctagatgtgttctctccagcccttactaactgggaaaataattgagaaatccctcttttcctcagtgaaagcccagtcattggttagaaaaatctaattgtcaaactagcattatgttccatcatatctgtgggatagtaattcatgtaagacacatttttacctctcttacaagtcaattcacttacaagccagtttcaaatcaagcttcccttgcgaggaatggagatcattatggggcttattatgactacatttcttttatgagtgaccattttaaataattaatattttatttaatattaaattattaaagacttagctagacttttaacattagatgaaccttgtgaatcatatattgcatagattagcacatgtatgcaatctaggtcatcaatttgttgaatttatacagccctagatttgagattgtggccctgagtatctggatagttgagttgtgtgtttatgtgcttatatgatagaggtgctttgttcctgcagcttagaaacagaagcagccattcactgagaagcttaagagaggaagtatcaacctcattttccaaaccagcattactttcaccgctcgtggatctgaaagattacatttagaacatttagtactattacactctcagaaactgtggtaaaaagtcacattttcaaaacttcatgcatattgtattcttgttggaaataagtcctatagtttcttaattgtcttcatgccgtccatatttaacaaacattgcaagtcctttttatatttgggtaattatttgtaatttagtgaaggagactaggggatgttttcttccaaagggaatttaaaatcaattttatggtattttgaaagtaaaatactccttaacgtgtcaatatttttaaaatgttatctcgaagttttctattgctcaggtatataatctaataaaattttttgtttgctctaaggttatttttgctattctctattttgaattatgttaaaatttgtgtgcattttatgaaatgccttttttcttattttgaaagtgtaaaattgggcatctcagagtaaaatgtgggattattagctacaaagactaggcacatcgtgaaagctcagtaactaattttcttgactgagtcctatcccagagtgtcacagattcaacagaattttcctgaagggtgatacacaccaaaatctagcttgtgtggatctgagactattgactcaaagattcaaatctacttcggaagtgactccacggtttgagtgaaaactgaggaaggactcatgcctgtatatcactagatatcttatttctccataattttaagtgttcataatttcttcttctttgatgggtgtgcaactggggcatgtttgtaccagccagcatgtgttctgcccaacagtgtgtccgtgtgtgaggttaactgattcagaactcattctcttgataaactatttcttgaaagcatttattttaagtctttatttcctgctgaaatgaagtttcatgctgtcatgcccatcttatttattctagaagaaaattttcatagaagaaaatgatttatggccaaagttacagaacattcatcttttagacttagccttagaatatcattggaaattacttggcttgaatttggttcgtttttatctttatggattatgtaccagggctattaataatacttaaaccccttattttgctatggtggttagatttttttattccttttcaattagtgctattaattattacatggtcgtattcatgcttattacagatgaactatttttagtgccagtgtaaaggattaagaataacattcaattagttggctatttcaggctttattgtacatggtaatgtttcagggagtgtgatttggtctagaatatatccagatccttgtaattatgatattgggttatgacaggattctattatttttagctatgaatggtgcttatttttccctatattaggaatgttaatatttggattatcagagtccatgttataaacagaatttacctatgcaagacaaattctaactgtgcaacattttcatgagaattaaaagttgtgtgttaaggggaaaaccctctgaatgtttttatgtgtaagtgcctaaagaaccgtagaaacagtacatcaaaagctcttataaaagaaaaactgattgaacattagccagaaacaaaatatgatttacatttttttttttggttgctgggactgaataccctaaaaactaagagatgtgagtggggaaaatgtctaattgataagaaagttgatttatattatatttacatgcatcttctaagattgcctttacagtagccaatcagaactttaaaaaaaaaaaagctaacaacatagatcctatgtgttgcccttaagactaaaatactttgcacacgtgattgaatggctcacttaagttgttgaatttccttatacatttaaagtgtacttccgttaagaattattccattttaaatgggtaactttcagcttccgaactattttcctaaacattccagttgtgtattataaaagatcaaaatatctctaggtggtagtacaattttcatttataacgtggaaaagttaactgttaggtttaacattagtattagtgtttttgcaattgctcatagaaaagaacactgaataatggttttcatacaatttttgtaaaacattcttctcccagtttgattccaaatgcttttccccaaattgtctaatatatcataagctagtgtttccttgtatttaatttttccttccaacacaatatttaggaaaaatatgaataacattgtgagtagcgggagacaacacgaaaaagaaacctttcattgttgtggaggggtaggtgttatgtgattgatgcccttcctggcgtttgttttatcctgttattttctcaaaaaagagcacggctttttcttaaatacatttaaattcagaattgcttgcaaaagattggcctggatagatagacatcctagatttaagatagtaccatcttaaaagtatgttgaaaggtaaaataaatcatttcaaaatacttaactttcctaataaggatgttaggttttcttctctttcattagctggccataagtcaaggtccttataacactaggaaattacctttttttactttcaaaattgcattatagtgaattactgtttacaaaatacacatactgtgaacagatataagtttctgtcttttataaggtttgtagaatgaatgtttttttaaagtgagtattatatgttaaatattttaagttttttataaatactagtaactgtttactaatttttgtttggtcaaatgcttgtaaatgtagctgaaagaagatagggagaaactgcggatcccaaactgttccctttttcatttcttgaaatgttaccactacagacatttttttaaggtgaataaacagttgtgatgtgctgtacctaaaatcatgtttaatcgtataaggaaacatttcaatacacttatacaggaagaaaactatagatgaagtacatgtgtgtgattcagtctgattcacagaattctgagagtaatatggaataaaacaactccacttagatgataactgaagcatttcctgccttgtgaaaatttggattttaaattgctgttagaatgggaaatttggacactttatatcattgtataatttcagaatttagtttctgtatcttttggaaaacatgattatagcaaaaacatagaaaataatctattactaaaacaccataaatgtaaaactagtatgcttggctgttaactctaaagatgttacttatgtctgtttttaaaacatgcatgtatttaacaattttatcatagtattgtcatggaaaaaataaatatattttcttacatcttaaaaaaaaaaaaaaaaaa

SEQ ID NO: 2289 - DNA, 7394 bp, Homo sapiens; identical to SEQ ID NO: 573

SEQ ID NO: 2290 - DNA, 4267 bp, Homo sapiens; identical to SEQ ID NO: 126

SEQ ID NO: 2291 - DNA, 3897 bp, Homo sapiens; identical to SEQ ID NO: 549

SEQ ID NO: 2292 - DNA, 3493 bp, Homo sapiens
tcaatcgccttttatctctggccctgggacctttgcctattttctgattgataggctttgttttgtctttacctccttctttctggggaaaacttcagttttatcgcacgttccccttttccatatcttcatcttccctctacccagattgtgaagatggaaagggtccaacccctggaagagaatgtgggaaatgcagccaggccaagattcgagaggaacaagctattgctggtggcctctgtaattcagggactggggctgctcctgtgcttcacctacatctgcctgcacttctctgctcttcaggtatcacatcggtatcctcgaattcaaagtatcaaagtacaatttaccgaatataagaaggagaaaggtttcatcctcacttcccaaaaggaggatgaaatcatgaaggtgcagaacaactcagtcatcatcaactgtgatgggttttatctcatctccctgaagggctacttctcccaggaagtcaacattagccttcattaccagaaggatgaggagcccctcttccaactgaagaaggtcaggtctgtcaactccttgatggtggcctctctgacttacaaagacaaagtctacttgaatgtgaccactgacaatacctccctggatgacttccatgtgaatggcggagaactgattcttatccatcaaaatcctggtgaattctgtgtcctttgaggggctgatggcaatatctaaaaccaggcaccagcatgaacaccaagctgggggtggacagggcatggattcttcattgcaagtgaaggagcctcccagctcagccacgtgggatgtgacaagaagcagatcctggccctcccgcccccacccctcagggatatttaaaacttattttatataccagttaatcttatttatccttatattttctaaattgcctagccgtcacaccccaagattgccttgagcctactaggcacctttgtgagaaagaaaaaatagatgcctcttcttcaagatgcattgtttctattggtcaggcaattgtcataataaacttatgtcattgaaaacggtacctgactaccatttgctggaaatttgacatgtgtgtggcattatcaaaatgaagaggagcaaggagtgaaggagtggggttatgaatctgccaaaggtggtatgaaccaacccctggaagccaaagcggcctctccaaggttaaattgattgcagtttgcatattgcctaaatttaaactttctcatttggtgggggttcaaaagaagaatcagcttgtgaaaaatcaggacttgaagagagccgtctaagaaataccacgtgctttttttctttaccattttgctttcccagcctccaaacatagttaatagaaatttcccttcaaagaactgtctggggatgtgatgctttgaaaaatctaatcagtgacttaagagagattttcttgtatacagggagagtgagataacttattgtgaagggttagctttactgtacaggatagcagggaactggacatctcagggtaaaagtcagtacggattttaatagcctggggaggaaaacacattctttgccacagacaggcaaagcaacacatgctcatcctcctgcctatgctgagatacgcactcagctccatgtcttgtacacacagaaacattgctggtttcaagaaatgaggtgatcctattatcaaattcaatctgatgtcaaatagcactaagaagttattgtgccttatgaaaaataatgatctctgtctagaaataccatagaccatatatagtctcacattgataattgaaactagaagggtctataatcagcctatgccagggcttcaatggaatagtatccccttatgtttagttgaaatgtccccttaacttgatataatgtgttatgcttatggcgctgtggacaatctgatttttcatgtcaactttccagatgatttgtaacttctctgtgccaaaccttttataaacataaatttttgagatatgtattttaaaattgtagcacatgtttccctgacattttcaatagaggatacaacatcacagaatctttctggatgattctgtgttatcaaggaattgtactgtgctacaattatctctagaatctccagaaaggtggagggctgttcgcccttacactaaatggtctcagttggatttttttttcctgttttctatttcctcttaagtacaccttcaactatattcccatccctctattttaatctgttatgaaggaaggtaaataaaaatgctaaatagaagaaattgtaggtaaggtaagaggaatcaagttctgagtggctgccaaggcactcacagaatcataatcatggctaaatatttatggagggcctactgtggaccaggcactgggctaaatacttacatttacaagaatcattctgagacagatattcaatgatatctggcttcactactcagaagattgtgtgtgtgtttgtgtgtgtgtgtgtgtgtgtatttcactttttgttattgaccatgttctgcaaaattgcagttactcagtgagtgatatccgaaaaagtaaacgtttatgactataggtaatatttaagaaaatgcatggttcatttttaagtttggaatttttatctatatttctcacagatgtgcagtgcacatgcaggcctaagtatatgttgtgtgtgttgtttgtctttgatgtcatggtcccctctcttaggtgctcactcgctttgggtgcacctggcctgctcttcccatgttggcctctgcaaccacacagggatatttctgctatgcaccagcctcactccaccttccttccatcaaaaatatgtgtgtgtgtctcagtccctgtaagtcatgtccttcacagggagaattaacccttcgatatacatggcagagttttgtgggaaaagaattgaatgaaaagtcaggagatcagaattttaaatttgacttagccactaactagccatgtaaccttgggaaagtcatttcccatttctgggtcttgcttttctttctgttaaatgagaggaatgttaaatatctaacagtttagaatcttatgcttacagtgttatctgtgaatgcacatattaaatgtctatgttcttgttgctatgagtcaaggagtgtaaccttctcctttactatgttgaatgtatttttttctggacaagcttacatcttcctcagccatctttgtgagtccttcaagagcagttatcaattgttagttagatattttctatttagagaatgcttaagggattccaatcccgatccaaatcataatttgttcttaagtatactgggcaggtcccctattttaagtcataattttgtatttagtgctttcctggctctcagagagtattaatattgatattaataatatagttaatagtaatattgctatttacatggaaacaaataaaagatctcagaattcacta

SEQ ID NO: 2293 - DNA, 2364 bp, Homo sapiens; identical to SEQ ID NO: 147

SEQ ID NO: 2294 - DNA, 2074 bp, Homo sapiens
atcagcccaccaggagacctcgcccgccgctcccccgggctccccggccatgtctcccgcccggctccggccccgactgcacttctgcctggtcctgttgctgctgctggtggtgccggcggcatggggctgcgggccgggtcgggtggtgggcagccgccggcgaccgccacgcaaactcgtgccgctcgcctacaagcagttcagccccaatgtgcccgagaagaccctgggcgccagcggacgctatgaaggcaagatcgctcgcagctccgagcgcttcaaggagctcacccccaattacaatccagacatcatcttcaaggacgaggagaacacaggcgccgaccgcctcatgacccagcgctgcaaggaccgcctgaactcgctggctatctcggtgatgaaccagtggcccggtgtgaagctgcgggtgaccgagggctgggacgaggacggccaccactcagaggagtccctgcattatgagggccgcgcggtggacatcaccacatcagaccgcgaccgcaataagtatggactgctggcgcgcttggcagtggaggccggctttgactgggtgtattacgagtcaaaggcccacgtgcattgctccgtcaagtccgagcactcggccgcagccaagacgggcggctgcttccctgccggagcccaggtacgcctggagagtggggcgcgtgtggccttgtcagccgtgaggccgggagaccgtgtgctggccatgggggaggatgggagccccaccttcagcgatgtgctcattttcctggaccgcgagcctcacaggctgagagccttccaggtcatcgagactcaggaccccccacgccgcctggcactcacacccgctcacctgctctttacggctgacaatcacacggagccggcagcccgcttccgggccacatttgccagccacgtgcagcctggccagtacgtgctggtggctggggtgccaggcctgcagcctgcccgcgtggcagctgtctctacacacgtggccctcggggcctacgccccgctcacaaagcatgggacactggtggtggaggatgtggtggcatcctgcttcgcggccgtggctgaccaccacctggctcagttggccttctggcccctgagactctttcacagcttggcatggggcagctggaccccgggggagggtgtgcattggtacccccagctgctctaccgcctggggcgtctcctgctagaagagggcagcttccacccactgggcatgtccggggcagggagctgaaaggactccaccgctgccctcctggaactgctgtactgggtccagaagcctctcagccaggagggagctggccctggaagggacctgagctgggggacactggctcctgccatctcctctgccatgaagatacaccattgagacttgactgggcaacaccagcgtcccccacccccgtcgtggtgtagtcatagagctgcaagctgagctggcgaggggatggttgttgacccctctctcctagagaccttgaggctggcacggcgactcccaactcagcctgctctcactacgagttttcatactctgcctcccccattggggagggcccattccatccatcttaggcccctttgggtgggcttgcgcctcagttgatgctgctaaattccctgggagccagcatggatctggctggacccgatgctgtccagaactgggaaggccacaggggtggggcagccatcccggccattctgaggtatgacattcctccccggccacactcctcaagacacatccagagactgttgctgtctgtgggcagagttctgtgttctggccaatgtgaccgtagtgccggggactgggggaggtgggttggatgtgcttgccacccccccggctaagctcccccttctgctgaaccatgatccccaccccctccgccggtcagtctcccataccttatttattggagtggagggggaagcccatgggagaattttggggatgttttggtcttttcttccttttgtaataaaaattatttaagttgttagagccaaa

SEQ ID NO: 2295 - DNA, 2366 bp, Homo sapiens
gaaagcagaaagctgtttattttctgtgacatcacttcactttgccttcgaaggctggtctgtgctcagtgttttcgtggtgatgcaagtcggctctctcctccagcagttggatccctcccatctcacagtacctcacaggtctcttcccccgagcagtgcattgctggagcgaggagaagctcacgaatcagctgcaggtctctgttttgaaaaagcagagatacagaggcagaggaaaagggtggactcctatgtgacctgttcttagagcaagacaatcaccatctgaattccagaagccctgttcatggttggggatattttctcgactgcatggaatcagaaagaagcaaaaggatgggaaatgcctgcattcccctgaaaagaattgcttatttcctatgtctcttatctgcgcttttgctgactgaggggaagaaaccagcgaagccaaaatgccctgccgtgtgtacttgtaccaaagataatgctttatgtgagaatgccagatccattccacgcaccgttcctcctgatgttatctcattatcctttgtgagatctggttttactgaaatctcagaagggagttttttattcacgccatcgctgcagctcttgttattcacatcgaactcctttgatgtgatcagtgatgatgcttttattggtcttccacatctagagtatttattcatagaaaacaacaacatcaagtcaatttcaagacatactttccggggactaaagtcattaattcacttgagccttgcaaacaacaatctccagacactcccaaaagatattttcaaaggcctggattctttaacaaatgtggacctgaggggtaattcatttaattgtgactgtaaactgaaatggctagtggaatggcttggccacaccaatgcaactgttgaagacatctactgcgaaggccccccagaatacaagaagcgcaaaatcaatagtctctcctcgaaggatttcgattgcatcattacagaatttgcaaagtctcaagacctgccttatcaatcattgtccatagacactttttcttatttgaatgatgagtatgtagtcatcgctcagccttttactggaaaatgcattttccttgaatgggaccatgtggaaaagaccttccggaattatgacaacattacaggcacatccactgtagtatgcaagcctatagtcattgaaactcagctctatgttattgtggcccagctgtttggtggctctcacatctataagcgagacagttttgcaaataaattcataaaaatccaggatattgaaattctcaaaatccgaaaacccaatgacattgaaacattcaagattgaaaacaactggtactttgttgttgctgacagttcaaaagctggttttactaccatttacaaatggaacggaaacggattctactcccatcaatccttacacgcgtggtacagggacactgatgtggaatatctagaaatagtcagaacacctcagacactcagaacgcctcatttaattctgtctagtagttcccagcgtcctgtaatttatcagtggaacaaagcaacacaattattcactaaccaaactgacattcctaacatggaggatgtgtacgcagtgaagcacttctcagtgaaaggggacgtgtacatttgcttgacaagattcattggtgattccaaagtcatgaaatggggaggctcctcgttccaggatattcagaggatgccatcgcgaggatccatggtgttccagcctcttcaaataaataattaccaatatgcaattcttggaagtgattactcctttactcaagtgtataactgggatgcagagaaagccaaatttgtgaaatttcaggaattaaatgttcaggcaccaagatcattcacacatgtgtccattaataagcgtaattttctttttgcttccagttttaagggaaatacacagatttacaaacatgtcatagttgacttaagcgcatgagacaccaaattctgtggctgccatcagaaattttctacagtacatgacccggatgaactcaatgcatgatgactcttcttatcacacttgcaaatgaatgcctttcaaacattgagactgctagaaccaagcactaccagtatctccatccttaactgtccagtccagtgatgtgggaagttaccttttataagacaaaatttaattgtgtaactgttctttgcagtgaagatgtgtaaataagcgtttaatggtatctgttactccaaaaagaaatattaatatgtacttttccatttatttattcatgtgtacagaaacaactgccaaataaaatgtttacattttctttcata

SEQ ID NO: 2296 - DNA, 1817 bp, Homo sapiens
gggccgggacggagggggcggcccccgcgctcggggcgctcggctacagctgcggggcccgaggtctccgcgcactcgctcccggcccatgctggaggcgcggaaccgcggggacctaggacggaggcggcgggcgctggggcggcccccggcacgctgagctcgggatgcggacgctgctgcctcccgcgctgctgacctgctggctgctcgcccccgtgaacagcattcacccagaatgccgatttcatctggaaatacaggaggaagaaacaaaatgtgcagagcttctgaggtctcaaacagaaaaacacaaagcctgcagtggcgtctgggacaacatcacgtgctggcggcctgctaatgtgggagagaccgtcacggtgccctgcccaaaagtcttcagcaatttttacagcaaagcaggaaacataagcaaaaactgtacgagtgatggatggtcagagacgttcccagatttcgtcgatgcctgtggctatagcgacccggaggatgagagcaagatcacgttttatattctggtgaaggccatttataccctgggctacagtgtctctctgatgtctcttgcaacaggaagcataattctgtgcctcttcaggaagctgcactgcaccaggaattacatccacctgaacctgttcctgtccttcatcctgagagccatctcagtgctggtcaaggacgacgttctctactccagctctggcacgttgcactgccctgaccagccatcctcctgggtgggctgcaagctgagcctggtcttcctgcagtactgcatcatggccaacttcttctggctgctggtggaggggctctacctccacaccctcctggtggccatgctcccccctagaaggtgcttcctggcctacctcctgatcggatggggcctccccaccgtctgcatcggtgcatggactgcggccaggctctacttagaagacaccggttgctgggatacaaacgaccacagtgtgccctggtgggtcatacgaataccgattttaatttccatcatcgtcaattttgtccttttcattagtattatacgaattttgctgcagaagttaacatccccagatgtcggcggcaacgaccagtctcagtacaagaggctggccaagtccacgctcctgcttatcccgctgttcggcgtccactacatggtgtttgccgtgtttcccatcagcatctcctccaaataccagatactgtttgagctgtgcctcgggtcgttccagggcctggtggtggccgtcctctactgtttcctgaacagtgaggtgcagtgcgagctgaagcgaaaatggcgaagccggtgcccgaccccgtccgcgagccgggattacagggtctgcggttcctccttctcccacaacggctcggagggcgccctgcagttccaccgcgcgtcccgagcccagtccttcctccaaacggagacctcggtcatctagccccacccctgcctgtcggacgcggcgggaggcccacggttcggggcttctgcggggctgagacgccggcttcctccttccagatgcccgagcaccgtgtcgggctggtcagcgcggtcctgactccgtcaagctggttgtccactaaaccccatacctggaattggagtcgtgttgtcattgactcaacttaaactccagcaccacgaccctgctgctatctcgcacctgaaacaagctaacatgactaacacccttaattccatccaccctcctctccctaggaggcctgcgcccgctaaccggctttttcgcaaatgggccattatcgaa

SEQ ID NO: 2297 - DNA, 3687 bp, Homo sapiens; identical to SEQ ID NO: 1581

SEQ ID NO: 2298 - DNA, 3409 bp, Homo sapiens
atcttaatgcttacagctgagaagcaggtcagtcaggttcctgggcgctctgttacacaagcaagatacagccagccccacctaattttgtttccctggcaccctcctgctcagtgcgacattgtcacacttaacccatctgttttctctaatgcacgacagattcctttcagacaggacaactgtgatatttcagttcctgattgtaaatacctcctaagcctgaagcttctgttactagccattgtgagcttcagtttcttcatctgcaaaatgggcataatacaatctattcttgccacatcaagggattgttattcctttaaaaaaaaaccaataccaaagaagcctacaatgttggccttagccaaaattctgttgatttcaacgttgttttattcacttctatcggggagccatggaaaagaaaatcaagacataaacacaacacagaacattgcagaagtttttaaaacaatggaaaataaacctatttctttggaaagtgaagcaaacttaaactcagataaagaaaatataaccacctcaaatctcaaggcgagtcattcccctcctttgaatctacccaacaacagccacggaataacagatttctccagtaactcatcagcagagcattctttgggcagtctaaaacccacatctaccatttccacaagccctcccttgatccatagctttgtttctaaagtgccttggaatgcacctatagcagatgaagatcttttgcccatctcagcacatcccaatgctacacctgctctgtcttcagaaaacttcacttggtctttggtcaatgacaccgtgaaaactcctgataacagttccattacagttagcatcctctcttcagaaccaacttctccatctgtgacccccttgatagtggaaccaagtggatggcttaccacaaacagtgatagcttcactgggtttaccccttatcaagaaaaaacaactctacagcctaccttaaaattcaccaataattcaaaactctttccaaatacgtcagatccccaaaaagaaaatagaaatacaggaatagtattcggggccattttaggtgctattctgggtgtctcattgcttactcttgtgggctacttgttgtgtggaaaaaggaaaacggattcattttcccatcggcgactttatgacgacagaaatgaaccagttctgcgattagacaatgcaccggaaccttatgatgtgagttttgggaattctagctactacaatccaactttgaatgattcagccatgccagaaagtgaagaaaatgcacgtgatggcattcctatggatgacatacctccacttcgtacttctgtatagaactaacagcaaaaaggcgttaaacagcaagtgtcatctacatcctagccttttgacaaattcatctttcaaaaggttacacaaaattactgtcacgtggattttgtcaaggagaatcataaaagcaggagaccagtagcagaaatgtagacaggatgtatcatccaaaggttttctttcttacaatttttggccatcctgaggcatttactaagtagccttaatttgtattttagtagtattttcttagtagaaaatatttgtggaatcagataaaactaaaagatttcaccattacagccctgcctcataactaaataataaaaattattccaccaaaaaattctaaaacaatgaagatgactctttactgctctgcctgaagccctagtaccataattcaagattgcattttcttaaatgaaaattgaaagggtgctttttaaagaaaatttgacttaaagctaaaaagaggacatagcccagagtttctgttattgggaaattgaggcaatagaaatgacagacctgtattctagtacgttataattttctagatcagcacacacatgatcagcccactgagttatgaagctgacaatgactgcattcaacggggccatggcaggaaagctgaccctacccaggaaagtaatagcttctttaaaagtcttcaaaggttttgggaattttaacttgtcttaatatatcttaggcttcaattatttgggtgccttaaaaactcaatgagaatcatggtaaaaaaaaaaagttaaccaaagaatatacctgtacataatttgtacagttttaagttgttagataggaactggatttcttatgtattagacattattgctcaatcataatggaatagattctgcatccctaaatgtatgaaccataaggttaaaaaagatgaatggaaatatcaaacaactttttactgagcatcagtttcataatcaataatataagaagattaatttggattctagtatgtttcagtttgtttttaattaccaccttcctttggtagaaaaaatatgttccttgatgtaggaaagtctaggttttagagattagaggatgagatcaagagttaaattcctaaagaagcactgaatatatgaagagagcaaacaaatcaagtaccaacctagaggctttatttttgaattgattcatggtgtgtgtgtgtgtgtgtgtgtgtgtgtgtgtgtgtgtgtaacacagaaacagcttcagaaaataagggatagaaagtaatgaagaaagtacttaccccatattgccataaaaatagcaaagaagactgtccctccattatcgaacaaatatgtcacctgagtagaaaacaaacagaaatattagtcatgcaaattgattataataagccagtgaatactgtttgcactcaggtactatgattttttctcaaatagaatcatattattttatagtacagaaatattatatatgaattcctttcatgggtcttgcaacaatttcacatgatttttctcatggggagaggtgaagaaacaacattagccctcttctctcctctcttgattccctttataccccaccatcatttctgattataaataattctaccattctatggaagtatttgtgggtcacagattgtcaaactacttaatgaaagttgtatgaaattagtttttcaggtgaggcattcctagttgcaattcctgttagcaaaacttctaggagtggggaagttggaaaatgcaggattcttccagtgagccagcatttcccatagctaaccctattctcttagtctttcaaaatgtagaatgggtccaataatggctataagatgtaataaatcccatcttaatttgttttaaaagtttcataaatcactgaacacttatgaaacaaagtgttttttaatcagatatcaactgaaacttcataaaggatgcatagttttataatgttattgaatcaaattttaaggcttgtattgtttgattttaataaagtataaattcaatttaaaaaaaaaaaaaaaaaa

SEQ ID NO: 2299 - DNA, 16737 bp, Homo sapiens
atgctggtgatctggattctgacgctggctctccggctctgcgcgtccgttactacagtgacaccagagggctctgctgttcacaaagccatttcccagcagggcacattgtggactggtgaggttttggagaagcagacagtcgagcaagggaagagcactctgagaaggcagaaaaatcatttccacaggtctgcaggggagctacggtgcaggaatgccctgaaagatgagggggcatctgctggatggagcgtgatgtttgctggggagagtgtggtggtgctggtgcatttgtggatgacaggagcacgagtgaagaacctgggcttggtggagtttgctagcccaggggacgacggggatggcagagccgagggctttagcctggggctcccacttagtgagcaggcaagggctgcaggagccagagagaaggagcgtcaggagacagtcataaatcatagcactttctctggtttctctcaaatcacaggctcaacagtaaacaccagtattggaggtaatacaacttctgcatccacacccagttcaagcgacccttttaccacctttagtgactatggggtgtcagtcacatttatcacgggctcaactgcaacaaaacacttccttgacagctccacaaactcaggccacagtgaggaatcaacagtatcccacagcggcccaggtgcaactggaacaacactcttcccttcccactctgcaacctcagtttttgttggagaacctaaaacctcacccatcacttcagcctcaatggaaacaacagcgttacctggcagtaccacaacagcaggcctgagtgagaaatctaccaccttctacagtagccccagatcaccagacagaacactctcacctgcccgcacgacaagctcaggcgtcagtgaaaaatcaaccacctcccacagccgaccaggcccaacgcacacaatagcgttccctgacagtaccaccatgccaggcgtcagtcaggaatctacagcttcccacagcatccccggctccacagacacaacactgtcccctggcactaccacaccatcatcccttggtccagaatctactaccttccacagcagcccaggctacactaaaacaacacgcttacctgacaacaccacaacctcaggcctccttgaagcatctacgcccgtccacagcagcactggatcgccacacacaacactgtccccttccagctctacaacccatgagggagaacctaccaccttccagagctggccaagctcaaaggacacttcgcctgcaccttctggtaccacatcagcctttgttaaactatctacaacttatcacagcagcccgagctcaactccaacaacccacttttctgccagctccacaaccttgggccatagtgaggaatcgacaccagtccacagcagcccagttgcaactgcaacaacacccccacctgcccgctccgcgacctcaggccatgttgaagaatctacagcctaccacaggagcccgggctcaactcaaacaatgcacttccctgaaagctccacaacttcaggccatagtgaagaatcagcaactttccacggcagcacaacacacacaaaatcttcaactcctagcaccacagctgccctagcacatacaagctaccacagcagcctgggctcaactgaaacaacacacttccgtgatagctccacaatctcaggccgtagtgaggaatcaaaagcatcccacagcagcccagatgcaatggcaacaacagtcttacctgccggctctacaccctcagttcttgttggagactcgacgccctcacccatcagttcaggctcaatggaaaccacagcgttacccggcagtaccacaaaaccaggcctcagtgagaaatctaccactttctacagtagccccagatcaccagacacaacacacttacctgccagcatgacaagctcaggcgtcagtgaagaatccaccacctcccacagccgaccaggctcaacacacacaacagcattccctggcagtaccaccatgccaggcctcagtcaggaatctacagcttcccacagcagcccaggccccacagacacaacattgtcccctggcagtaccacagcatcatcccttggtccagaatatactaccttccacagccgcccaggctccactgaaacaacactcttacctgacaacaccacagcctcaggactccttgaagcatctatgcccgtccacagcagcaccagatcgccacacacaacactgtcccctgccggctctacaacccgtcagggagaatctaccacattccatagctggccaagctcaaaggacactaggcctgcacctcctactaccacatcagcctttgttgagccatctacaacctcccacggcagcccgagctcaattccaacaacccacatttctgcccgctccacaacctcaggcctcgttgaagaatctacgacctaccacagcagcccgggctcaactcaaacaatgcacttccctgaaagcgacacaacttcaggccgtggtgaagaatcaacaacttcccacagcagcacaacacacacaatatcttcagctcctagcaccacatctgcccttgttgaagaacctaccagctaccacagcagcccgggctcaactgcaacaacacacttccctgacagctccacaacctcaggccgtagtgaggaatcaacagcatcgcacagcagccaagacgcaacgggaacaatagtcctacctgcccgctccacaacctcagttcttcttggagaatctacgacctcacccatcagttcaggctcaatggaaacgacagcgttacccggcagtaccacaacgccaggcctcagtgagagatctaccactttccatagtagccccagatcaccagccacaacactctcacctgccagcacgacaagctcaggcgtcagtgaagaatccaccacctcccgcagccgaccaggctcaacgcacacaacagcattccctgacagcaccaccacgccaggcctcagtcggcattctacaacttcccacagcagcccaggctcaacggatacaacactgttacctgccagcaccaccacctcaggccccagtcaggaatcaacaacttcccacagcagctcaggttcaactgacacagcactgtcccctggcagtaccacagccttatcctttggtcaagaatctacaaccttccacagcaacccaggctccactcacacaacactcttccctgacagcaccacaagctcaggcatcgttgaagcatctacacgcgtccacagcagcactggctcaccacgcacaacactgtcccctgccagctccacaagccctggacttcagggagaatctactgccttccagacccacccagcctcaactcacacaacgccttcacctcctagcaccgcaacagcccctgttgaagaatctacaacctaccaccgcagcccaggctcgactccaacaacacacttccctgccagctccacaacttcgggccacagtgagaaatcaacaatattccacagcagcccagatgcaagtggaacaacaccctcatctgcccactccacaacctcaggtcgtggagaatctacaacctcacgcatcagtccaggctcaactgaaataacaacgttacctggcagtaccacaacaccaggcctcagtgaggcatctaccaccttctacagcagccccagatcaccaaccacaacactctcacctgccagcatgacaagcctgggcgtcggtgaagaatccaccacctcccgtagccaaccaggttctactcactcaacagtgtcacctgccagcaccaccacgccaggcctcagtgaggaatctaccaccgtctacagcagcagccgaggctcaactgaaaccacagtgttccctcacagcaccacaacctcagttcatggtgaagagcctacaaccttccacagccggccagcctcaactcacacaacactgttcactgaggacagcaccacctcgggcctcactgaagaatctacagccttccccggcagcccagcctccacccaaacagggttacctgccacactcacaaccgcagacctcggtgaggaatcaactacctttcccagcagctcaggctcaactggaacaaaactctcacctgcccgctccaccacctctggcctcgttggagaatccacaccctcacgcctcagtccaagctcaaccgaaacaacaactttacctggcagtcccacaacaccaagcctcagtgagaaatcaaccaccttctacactagccccagatcaccagatgcaacactctcacctgcaaccacaacaagctcaggcgtcagcgaagaatccagcacatcccacagtcaaccaggctcaacgcacacaacagcattccctgacagcaccaccacctcagacctcagtcaggaacctacaacttcccacagcagccaaggctcaacagaggcaacactgtcccctggcagtaccacagcctcatcccttggtcaacaatctacaaccttccacagcagcccaggcgacactgaaaccacactcttacctgacgacaccataacctcaggcctcgtggaggcatctacacccacccacagcagcactggctcgctacacacaacactgacccctgccagctccacaagcgctggccttcaggaagaatctaccactttccagagctggccaagctcaagtgacacaacaccttcacctcccggcaccacagcagcccctgttgaagtatccacaacctaccacagccgcccgagctcaactccaacaacacacttttctgccagttccacaaccttgggccgtagtgaggaatcaacaacagtccacagcagcccaggtgcaactggaacagcactcttccctacccgctctgcaacctcagttcttgttggagaacctacaacgtcacccatcagttcaggctcaacggaaacaacagcgttacctggcagtaccacaacagcaggcctgagtgagaaatctaccaccttctacagtagccccagatcaccggacacaacactctcacctgccagcacgacaagctcaggcgtcagtgaagaatccaccacctcccacagccgaccaggctcaacgcacacaacagcattccctggcagtaccaccatgccaggcgtcagtcaggaatctacagcttcccacagcagcccaggctccacagacacaacattgtcccctggcagtaccacagcatcatcccttggtccagaatctactactttccacagcagcccaggctccactgaaacaacactcttacctgacaacaccacagcctcaggcctccttgaagcatctacgcccgtccacagcagcactggatcgccacacacaacactgtcccctgccggctctacaacacgtcagggagaatctaccaccttccagagctggccaagctcaaaggacactatgcctgcacctcctactaccacatcagcctttgttgagctatctacaacctcccacggcagcccgagctcaactccaacaacccacttttctgccagctccacaaccttgggccgtagtgaggaatcgacaacagtccacagcagcccagttgcaactgcaacaacaccctcgcctgcccgctccacaacctcaggcctcgttgaagaatctacggcgtaccacagcagcccgggctcaactcaaacaatgcacttccctgaaagctccacagcttcaggtcgtagtgaagaatcaagaacttcccacagcagcacaacacacacaatatcttcacctcctagcaccacatctgcccttgttgaagaacctaccagctaccacagcagcccgggctcaactgcaacaacacacttccctgacagctccacaacctcaggccgtagtgaggaatcaacagcatcccacagcagccaagacgcaacgggaacaatagtcctacctgcccgctccacaacctcagttcttcttggagaatctacgacctcacccatcagttcaggctcaatggaaacgacagcgttacccggcagtaccacaacgccaggcctcagtgagaaatctaccactttccacagtagccccagatcaccagccacaacactctcacctgccagcacgacaagctcaggcgtcagtgaagaatccaccacctcccacagccgaccaggctcaacgcacacaacagcattccctgacagcaccaccacgccaggcctcagtcggcattctacaacttcccacagcagcccaggctcaacggatacaacactgttacctgccagcaccaccacctcaggccccagtcaggaatcaacaacttcccacagcagcccaggttcaactgacacagcactgtcccctggcagtaccacagccttatcctttggtcaagaatctacaaccttccacagcagcccaggctccactcacacaacgctcttccctgacagcaccacaagctcaggcatcgttgaagcatctacacgcgtccacagcagcactggctcaccacgcacaacactgtcccctgccagctccacaagccctggacttcagggagaatctaccgccttccagacccacccagcctcaactcacacgacgccttcacctcctagcaccgcaacagcccctgttgaagaatctacaacctaccaccgcagcccaggctcgactccaacaacacacttccctgccagctccacaacttcgggccacagtgagaaatcaacaatattccacagcagcccagatgcaagtggaacaacaccctcatctgcccactccacaacctcaggtcgtggagaatctacaacctcacgcatcagtccaggctcaactgaaataacaacgttacctggcagtaccacaacaccaggcctcagtgaggcatctaccaccttctacagcagccccagatcaccaaccacaacactctcacctgccagtatgacaagcctaggcgtcggtgaagaatccaccacctcccgtagccaaccaggttctactcactcaacagtgtcacctgccagcaccaccacgccaggcctcagtgaggaatctaccaccgtctacagcagcagcccaggctcaactgaaaccacagtgttccctcgcacccccacaacctcagttcgtggtgaagagcctacaaccttccacagccggccagcctcaactcacacaacactgttcactgaggacagcaccacctcgggcctcactgaagaatctacagccttccccggcagcccagcctccacccaaacagggttacctgccacactcacaaccgcagacctcggtgaggaatcaactacctttcccagcagctcaggctcaactggaacaacactctcacctgcccgctccaccacctctggcctcgttggagaatccacaccctcacgcctcagtccaagctcaaccgaaacaacaactttacccggcagtcccacaacaccaagcctcagtgagaaatcaaccaccttctacactagccccagatcaccagatgcaacactctcacctgcaaccacaacaagctcaggcgtcagtgaagaatccagcacatcccacagtcaaccaggctcaacgcacacaacagcattccctgacagcaccaccacgccaggcctcagtcggcattctacaacttcccacagcagcccaggctcaacggatacaacactgttacctgccagcaccaccacctcaggccccagtcaggaatcaacaacttcccacagcagcccaggttcaactgacacagcactgtcccctggcagtaccacagccttatcctttggtcaagaatctacaaccttccacagcagcccaggctccactcacacaacactcttccctgacagcaccacaagctcaggcatcgttgaagcatctacacgcgtccacagcagcactggctcaccacgcacaacactgtcccctgccagctccacaagccctggacttcagggagaatctaccaccttccagacccacccagcctcaactcacacgacgccttcacctcctagcaccgcaacagcccctgttgaagaatctacaacctaccaccgcagcccaggctcgactccaacaacacacttccctgccagctccacaacttcgggccacagtgagaaatcaacaatattccacagcagcccagatgcaagtggaacaacaccctcatctgcccactccacaacctcaggtcgtggagaatctacaacctcacgcatcagtccaggctcaactgaaataacaacgttacctggcagtaccacaacaccaggcctcagtgaggcatctaccaccttctacagcagccccagatcaccaaccacaacactctcacctgccagtatgacaagcctaggcgtcggtgaagaatccaccacctcccgtagccaaccaggttctactcactcaacagtgtcacctgccagcaccaccacgccaggcctcagtgaggaatctaccaccgtctacagcagcagcccaggctcaactgaaaccacagtgttccctcgcagcaccacaacctcagttcgtggtgaagagcctacaaccttccacagccggccagcctcaactcacacaacactgttcactgaggacagcaccacctcgggcctcactgaagaatctacagccttccccggcagcccagcctccacccaaacagggttacctgccacactcacaaccgcagacctcggtgaggaatcaactacctttcccagcagctcaggctcaactggaacaacactctcacctgcccgctccaccacctctggcctcgttggagaatccacaccctcacgcctcagtccaagctcaaccgaaacaacaactttacccggcagtcccacaacaccaagcctcagtgagaaatcaaccaccttctacactagccccagatcaccagatgcaacactctcacctgcaaccacaacaagctcaggcgtcagtgaagaatccagcacatcccacagtcaaccaggctcaacgcacacaacagcgttccctgacagcaccaccacctcaggcctcagtcaggaacctacagcttcccacagcagccaaggctcaacagaggcaacactgtcccctggcagtaccacagcctcatcccttggtcaacaatctacaaccttccacagcagcccaggcgacactgaaaccacactcttacctgacgacaccataacctcaggcctcgtggaggcatctacacccacccacagcagcactggctcgctacacacaacactgacccctgccagctccacaagcgctggccttcaggaagaatctaccactttccagagctggccaagctcaagtgacacaacaccttcacctcccggcaccacagcagcccctgttgaagtatccacaacctaccacagccgcccgagctcaactccaacaacacacttttctgccagttccacaaccttgggccgtagtgaggaatcaacaacagtccacagcagcccaggtgcaactggaacagcactcttccctacccgctctgcaacctcagttcttgttggagaacctacaacgtcacccatcagttcaggctcaacggaaacaacagcgttacctggcagtaccacaacagcaggcctgagtgagaaatctaccaccttctacagtagccccagatcaccggacacaacactctcacctgccagcacgacaagctcaggcgtcagtgaagaatccaccacctcccacagccgaccaggctcaacgcacacaacagcattccctggcagtaccaccatgccaggcgtcagtcaggaatctacagcttcccacagcagcccaggctccacagacacaacactgtcccctggcagtaccacagcatcatcccttggtccagaatctactaccttccacagcggcccaggctccactgaaacaacactcttacctgacaacaccacagcctcaggcctccttgaagcatctacgcccgtccacagcagcactggatcgccacacacaacactgtcccctgccggctctacaacccgtcagggagaatctaccaccttccagagctggcctaactcgaaggacactacccctgcacctcctactaccacatcagcctttgttgagctatctacaacctcccacggcagcccgagctcaactccaacaacccacttttctgccagctccacaaccttgggccgtagtgaggaatcgacaacagtccacagcagcccagttgcaactgcaacaacaccctcgcctgcccgctccacaacctcaggcctcgttgaagaatctacgacctaccacagcagcccgggctcaactcaaacaatgcacttccctgaaagcgacacaacttcaggccgtggtgaagaatcaacaacttcccacagcagcacaacacacacaatatcttcagctcctagcaccacatctgcccttgttgaagaacctaccagctaccacagcagcccgggctcaactgcaacaacacacttccctgacagctccacaacctcaggccgtagtgaggaatcaacagcatcccacagcagccaagacgcaacgggaacaatagtcctacctgcccgctccacaacctcagttcttcttggagaatctacgacctcacccatcagttcaggctcaatggaaacgacagcgttacccggcagtaccacaacgccaggcctcagtgagaaatctaccactttccacagtagccccagatcaccagccacaacactctcacctgccagcacgacaagctcaggcgtcagtgaagaatccaccacctcccacagccgaccaggctcaacgcacacaacagcattccctgacagcaccaccacgccaggcctcagtcggcattctacaacttcccacagcagcccaggctcaacggatacaacactgttacctgccagcaccaccacctcaggctccagtcaggaatcaacaacttcccacagcagctcaggttcaactgacacagcactgtcccctggcagtaccacagccttatcctttggtcaagaatctacaaccttccacagcagcccaggctccactcacacaacactcttccctgacagcaccacaagctcaggcatcgttgaagcatctacacgcgtccacagcagcactggctcaccacgcacaacactgtcccctgccagctccacaagccctggacttcagggagaatctaccgccttccagacccacccagcctcaactcacacgacgccttcacctcctagcaccgcaacagcccctgttgaagaatctacaacctaccaccgcagcccaggctcgactccaacaacacacttccctgccagctccacaacttcgggccacagtgagaaatcaacaatattccacagcagcccagatgcaagtggaacaacaccctcatctgcccactccacaacctcaggtcgtggagaatctacaacctcacgcatcagtccaggctcaactgaaataacaacgttacctggcagtaccacaacaccaggcctcagtgaggcatctaccaccttctacagcagccccagatcaccaaccacaacactctcacctgccagtatgacaagcctaggcgtcggtgaagaatccaccacctcccgtagccaaccaggttctactcactcaacagtgtcacctgccagcaccaccacgccaggcctcagtgaggaatctaccaccgtctacagcagcagcccaggctcaactgaaaccacagtgttccctcgcagcaccacaacctcagttcgtcgtgaagagcctacaaccttccacagccggccagcctcaactcacacaacactgttcactgaggacagcaccacctcgggcctcactgaagaatctacagccttccccggcagcccagcctccacccaaacagggttacctgccacactcacaaccgcagacctcggtgaggaatcaactacctttcccagcagctcaggctcaactggaacaaaactctcacctgcccgctccaccacctctggcctcgttggagaatccacaccctcacgcctcagtccaagctcaaccgaaacaacaactttacccggcagtcccacaacaccaagcctcagtgagaaatcaaccaccttctacactagccccagatcaccagatgcaacactctcacctgcaaccacaacaagctcaggcgtcagcgaagaatccagcacatcccacagtcaaccaggctcaacgcacacaacagcgttccctgacagcaccaccacctcaggcctcagtcaggaacctacaacttcccacagcagccaaggctcaacagaggcaacactgtcccctggcagtaccacagcctcatcccttggtcaacaatctacaaccttccacagcagcccaggcgacactgaaaccacactcttacctgacgacaccataacctcaggcctcgtggaggcatctacacccacccacagcagcactggctcgctacacacaacactgacccctgccagctccacaagcactggccttcaggaagaatctaccactttccagagctggccaagctcaagtgacacaacaccttcacctcccagcaccacagcagtccctgttgaagtatccacaacctaccacagccgcccgagctcaactccaacaacacacttttctgccagttccacaaccttgggccgtagtgaggaatcaacaacagtccacagcagcccaggtgcaactggaacagcactcttccctacccgctctgcaacctcagttcttgttggagaacctacaacgtcacccatcagttcaggctcaacggaaacaacagcgttacctggcagtaccacaacagcaggcctgagtgagaaatctaccaccttctacagtagccccagatcaccggacacaacactttcacctgccagcacgacaagctcaggcgtcagtgaagaatccaccacctcccacagccgaccaggctcaatgcacacaacagcattccctagcagtaccaccatgccaggcgtcagtcaggaatctacagcttcccacagcagcccaggctccacagacacaacactgtcccctggcagtaccacagcatcatcccttggtccagaatctactaccttccacagcagcccaggctccactgaaacaacactcttacctgacaacaccacagcctcaggcctccttgaagcatctacacccgtccacagcagcactggatcgccacacacaacactgtcccctgccggctctacaacccgtcagggagaatctaccaccttccagagctggccaaactcgaaggacactacccctgcacctcctactaccacatcagcctttgttgagctatctacaacctcccacggcagcccgagctcaactccaacaacccacttttctgccagctccacaacattgggccgtagtgaggaatcgacaacagtccacagcagcccagttgcaactgcaacaacaccctcgcctgcccgctccacaacctcaggcctcgttgaagaatctacgacctaccacagcagcccgggctcaactcaaacaatgcacttccctgaaagcaacacaacttcaggccgtggtgaagaatcaacaacttcccacagcagcacaacacacacaatatcttcagctcctagcaccacatctgcccttgttgaagaacctaccagctaccacagcagcccgggctcaactgcaacaacacacttccctgacagctccacaacctcaggccgtagtgaggaatcaacagcatcccacagcagccaagacgcaacgggaacaatagtcctacctgcccgctccacaacctcagttcttcttggagaatctacgacctcacccatcagttcaggctcaatggaaacgacagcgttacccggcagtaccacaacgccaggcctcagtgagaaatctaccactttccacagtagcccgagctcaactccaacaacccacttttctgccagctccacaaccttgggccgtagtgaggaatcgacaacagtccacagcagcccagttgcaactgcaacaacaccctcgcctgcccgctccacaacctcaggcctcgttgaagaatctacggcgtaccacagcagcccgggctcaactcaaacaatgcacttccctgaaagctccacagcttcaggtcgtagtgaagaatcaagaacttcccacagcagcacaacacacacaatatcttcacctcctagcaccacatctgcccttgttgaagaacctaccagctaccacagcagcccgggctcaattgcaacaacacactttcctgagagctccacaacctccggccgtagtgaggaatcaacagcatcccacagcagcccagatacaaatggaatcacacccttacctgcccattttactacctcaggccgcattgcagaatctaccaccttctatatctctccaggctcaatggaaacaacattagccagcactgccacaacaccaggcctcagtgcaaaatctaccatcctttacagtagctccagatcaccagaccaaacactctcacctgccagcatgacaagctccagcatcagtggagaacccaccagcttgtatagccaagcagagtcaacacacacaacagcgttccctgccagcaccaccacctcaggcctcagtcaggaatcaacaactttccacagtaagccaggctcaactgagacaacactgtcccctggcagcatcacaacttcatcttttgctcaagaatttaccacccctcatagccaaccaggctcagctctgtcaacagtgtcacctgccagcaccacagtgccaggccttagtgaggaatctaccaccttctacagcagcccaggctcaactgaaaccacagcgttttctcacagcaacacaatgtccattcatagtcaacaatctacacccttccctgacagcccaggcttcactcacacagtgttacctgccaccctcacaaccacagacattggtcaggaatcaacagccttccacagcagctcagacgcaactggaacaacacccttacctgcccgctccacagcctcagaccttgttggagaacctacaactttctacatcagcccatcccctacttacacaacactctttcctgcgagttccagcacatcaggcctcactgaggaatctaccaccttccacaccagtccaagcttcacttctacaattgtgtctactgaaagcctggaaaccttagcaccagggttgtgccaggaaggacaaatttggaatggaaaacaatgcgtctgtccccaaggctacgttggttaccagtgcttgtcccctctggaatccttccctgtagaaaccccggaaaaactcaacgccactttaggtatgacagtgaaagtgacttacagaaatttcacagaaaagatgaatgacgcatcctcccaggaataccagaacttcagtaccctcttcaagaatcggatggatgtcgttttgaagggcgacaatcttcctcagtatagaggggtgaacattcggagattgctcaacggtagcatcgtggtcaagaacgatgtcatcctggaggcagactacactttagagtatgaggaactgtttgaaaacctggcagagattgtaaaggccaagattatgaatgaaactagaacaactcttcttgatcctgattcctgcagaaaggccatactgtgctatagtgaagaggacactttcgtggattcatcggtgactccgggctttgacttccaggagcaatgcacccagaaggctgccgaaggatatacccagttctactatgtggatgtcttggatgggaagctggcctgtgtgaacaagtgcaccaaaggaacgaagtcgcaaatgaactgtaacctgggcacatgtcagctgcaacgcagtggcccccgctgcctgtgcccaaatacgaacacacactggtactggggagagacctgtgaattcaacatcgccaagagcctcgtgtatgggatcgtgggggctgtgatggcggtgctgctgctcgcattgatcatcctaatcatcttattcagcctatcccagagaaaacggcacagggaacagtatgatgtgcctcaagagtggcgaaaggaaggcacccctggcatcttccagaagacggccatctgggaagaccagaatctgagggagagcagattcggccttgagaacgcctacaacaacttccggcccaccctggagactgttgactctggcacagagctccacatccagaggccggagatggtagcatccactgtgtgagccaacgggggcctcccaccctcatctagctctgttcaggagagctgcaaacacagagcccaccacaagcctccggggcgggtcaagaggagaccgaagtcaggccctgaagccggtcctgctctgagctgacagacttggccagtcccctgcctgtgctcctgctggggaaggctgggggctgtaagcctctccatccgggagcttccagactcccagaagcctcggcacccctgtctcctcctgggtggctccccactctggaatttccctaccaataaaagcaaatctgaaagctca

SEQ ID NO: 2300 - DNA, 6141 bp, Homo sapiens
gtttcagatttgggatattggtgtttctgttttggagaaattattctttttctttttaatttgaagaaaaatcatcagtcttggaatacagaagagaaactagaaatatacgtattttgtttcacatttgaacagtcattcttgaggaatactccatacctgagtagacagccatgtggccatcgcagctactaattttcatgatgctcttagctccaataattcatgctttcagccgtgccccaattccaatggctgtggtccgcagagagctatcctgtgagagctatcctatagagcttcgctgtccaggaacagacgtcatcatgatagaaagtgccaactatggcaggactgatgacaaaatttgtgactctgaccctgctcagatggagaatatccgatgttatctgccagatgcctataagattatgtctcaaagatgcaataacagaacccagtgtgcagtggtggcaggtcctgatgtttttccagacccgtgtccaggaacctataaataccttgaagtgcagtatgaatgtgtcccttacaaagtggaacaaaaagtttttctttgtcctggactactaaaaggagtataccagagtgaacatttgtttgagtccgaccaccaatctggggcgtggtgcaaagaccctctgcaggcatctgacaagatttattatatgccctggactccctacagaactgataccctgactgagtattcatccaaggatgacttcattgctggaagaccaactacaacctacaagctccctcacagggtggatggcacaggatttgtagtgtatgatggagctttgttcttcaacaaagagcgcaccaggaacatagtaaagtttgatttgcggactaggataaagagtggagaggctatcatagcaaatgccaattaccatgatacctccccttaccgatggggaggcaaatctgacatagacctggcagtagatgagaatgggctatgggtaatctatgcaacagaacaaaacaatggtaaaattgtcattagtcaattgaacccttacaccctacggatcgaaggaacatgggatactgcatatgataaaaggtcagcttccaatgcctttatgatttgtggaattctgtatgtggtcaaatctgtatatgaggatgatgacaatgaggctactggaaataagattgactacatttacaacactgaccaaagcaaggatagtttggtggatgtaccctttcctaattcataccagtacattgcagctgtggattacaaccccagggacaacctactttatgtatggaataactatcacgtcgtgaaatattctttggattttggacctctggatagtagatcagggcaggcacatcatggacaagtttcatacatttctccgccaattcaccttgactctgagctagaaagaccctctgttaaagatatctctaccacaggacctcttggcatgggaagcactaccaccagtaccacccttcggaccacaactttgagcccaggaaggagtaccaccccgtcagtgtcaggaagaagaaaccggagtactagtaccccatctccagctgtcgaggtacttgatgacatgaccacacaccttccatcagcatcgtcccaaatcccagctctcgaagagagctgtgaggctgtggaagcccgagaaatcatgtggtttaagactcgtcaaggacagatagcaaagcagccatgccctgcaggaactataggtgtatcaacttatctatgccttgctcctgatggaatttgggatccccaaggtccagatctcagcaactgttcttctccttgggtcaatcatataacacagaagttgaaatctggtgaaacagctgccaacattgctagagagctggctgaacagacaagaaatcacttgaatgctggggacatcacctactctgtccgggccatggaccagctggtaggcctcctagatgtacagcttcggaacttgaccccaggtggaaaagatagtgctgcccggagtttgaacaagcttcagaaaagagagcgctcttgcagagcctatgtccaggcaatggtcgagacagttaacaacctccttcagccacaagctttgaatgcatggagagacctgactacgagtgatcagctgcgtgcggccaccatgttgcttcatactgtggaggaaagtgcttttgtgctggctgataaccttttgaagactgacattgtcagggagaatacagacaatattaaattggaagttgcaagactgagcacagaaggaaacttagaagacctaaaatttccagaaaacatgggccatggaagcactatccagctgtctgcaaataccttaaagcaaaatggccgaaatggagagatcagagtggcctttgtcctgtataacaacttgggtccttatttatccacggagaatgccagtatgaagttgggaacggaagctttgtccacaaatcattctgttattgtcaattcccctgttattacggcagcaataaacaaagagttcagtaacaaggtttatttggctgatcctgtggtatttactgttaaacatatcaagcagtcagaggaaaatttcaaccctaactgttcattttggagctactccaagcgtacaatgacaggttattggtcaacacaaggctgtcggctcctgacaacaaataagacacatactacatgctcttgtaaccacctaacaaattttgcagtactgatggcacatgtggaagttaagcacagtgatgcggtccatgacctccttctggatgtgatcacgtgggttggaattttgctgtcccttgtttgtctcctgatttgcatcttcacattttgctttttccgggggctccagagtgaccgtaacaccatccacaagaacctctgcatcagtctctttgtagcagagctgctcttcctgattgggatcaaccgaactgaccaaccaattgcctgtgctgttttcgctgccctgttacatttcttcttcttggctgccttcacctggatgttcctggagggggtgcagctttatatcatgctggtggaggtttttgagagtgaacattcacgtaggaaatacttttatctggtcggctatgggatgcctgcactcattgtggctgtgtcagctgcagtagactacaggagttatggaacagataaagtatgttggctccgacttgacacctacttcatttggagttttataggaccagcaactttgataattatgcttaatgtaatcttccttgggattgctttatataaaatgtttcatcatactgctatactgaaacctgaatcaggctgtcttgataacatcaactatgaggataacagacccttcatcaagtcatgggttataggtgcaatagctcttctctgcctattaggattgacctgggcctttggactcatgtatattaatgaaagcacagtcatcatggcctatctcttcaccattttcaattctctacagggaatgtttatatttattttccattgtgtcctacagaagaaggtacgaaaagagtatgggaaatgcctgcgaacacattgctgtagtggcaaaagtacagagagttccattggttcagggaaaacatctggttctcgaactcctggacgctactccacaggctcacagagccgaatccgtagaatgtggaatgacacggttcgaaagcagtcagagtcttcctttattactggagacataaacagttcagcgtcactcaacagagaggggcttctgaacaatgccagggatacaagtgtcatggatactctaccactgaatggtaaccatggcaatagttacagcattgccagcggcgaatacctgagcaactgtgtgcaaatcatagaccgtggctataaccataacgagaccgccctagagaaaaagattctgaaggaactcacttccaactatatcccttcttacctgaacaaccatgagcgctccagtgaacagaacaggaatctgatgaacaagctggtgaataaccttggcagtggaagggaagatgatgccattgtcctggatgatgccacctcgtttaaccacgaggagagtttgggcctggaactcattcatgaggaatctgatgctcctttgctgcccccaagagtatactccaccgagaaccaccagccacaccattataccagaaggcggatcccccaagaccacagtgagagctttttccctttgctaaccaacgagcacacagaagatctccagtcaccccatagagactctctctataccagcatgccgacactggctggtgtggccgccacagagagtgttaccaccagcacccagaccgaacccccaccggccaaatgtggtgatgccgaagatgtttactacaaaagcatgccaaacctaggctccagaaaccacgtccatcagctgcatacttactaccagctaggtcgcggcagcagtgatggatttatagttcctccaaacaaagatgggacccctcccgagggaagttcaaaaggaccggctcatttggtcactagtctatagaagatgacacagaaattggaaccaacaaaactgctaacaccttgttgactgttctgagttgatataagcagtggtaataatgtgtgtactcctaaatctttatgctgtcctctaaagacaaacacaaactctcagacttttttttttttaatgggatttttaggtcagcccaggggagaaagataactgctaaaattcccctgtaccccatcctttcttgtcctttccccttcagatggagacttcattatgttaatgaacaagatatgaagaaaatggcactcattgtggccttgttgaattatgttgtgtatgttttaacatctctgatgctgtgttactaaaattacaaggacctgctttttaaaaggccagaacaattgtctgaaattagtaacaatgctgcatctagattggagtgctgcacaaacaaacataagagcaaagcaaaactgtatcacatagggtttttggtcactcacaacctgaattcaccacagctggaatagctgtggaaaacaaaataaaacaacaaaattaataatgaaatggaggggaattctagaattatatgctaaatgcatattttatgatttgctgtattaactgatgataaaactaatggcagaaaaagaagttgagcaatttctatgtaatgtacagatactagcattgcacatatagtctgctttctgttcctccagaatttgagtcctgttaatgtagtagaaaaaaaaaaaagaaattttctttttcttttgtgctggtcttgcaagtttgtctaccagtaagagagcaaagtttccttcctttcttctctttcttcattttctttttttcttttttgccttttattcctttaaaatttcgcctggcaaaaaataaataaatggaactatcactttataagaatcattttctagtaatgcaaacaaattattttttacaaaaaaacaaaataaataaaattagacttccttccctcactatatatctttatgcagtcagaatatttccaacagtgttttttgcaaattagagcaggacaaacttttatgtttacagggcacgtctgttgtaatgcaaagcatatttggcaagcagttcatcaccaggacactagctatgattctagaagtcaaaaggtgtctatagaactagtggggcttctgcatgtgaaaaacggttttccataggcattaaagtgctgaatgctcagtctgatcaacaagtgggcacctgcactaccactttttagaggaaattcactccctcgtaagcattggaaggtcaaattattttgaagtgatttttttaaaaaaaagtcttctgtttattaacaggaaaatttatttatttgacaggattttgagtaatgtaggaatacaaaaggtaaattagcagcacatataatttttttttaatttatgatccattttgtatggtctcaaagttggatgacctcattactaatatttgttgtaaaagtgaaacttgtttgccaaccaataaacaactgattgagatttagaagatattgtaaaaaaaaaaaaaaaaa

SEQ ID NO: 2301 - DNA, 43815 bp, Homo sapiens
aagcgttgcacaattcccccaacctccatacatacggcagctcttctagacacaggttttcccaggtcaaatgcggggaccccagccatatctcccaccctgagaaattttggagtttcagggagctcagaagctctgcagaggccaccctctctgaggggattcttcttagacctccatccagaggcaaatgttgacctgtccatgctgaaaccctcaggccttcctgggtcatcttctcccacccgctccttgatgacagggagcaggagcactaaagccacaccagaaatggattcaggactgacaggagccaccttgtcacctaagacatctacaggtgcaatcgtggtgacagaacatactctgccctttacttccccagataagaccttggccagtcctacatcttcggttgtgggaagaaccacccagtctttgggggtgatgtcctctgctctccctgagtcaacctctagaggaatgacacactccgagcaaagaaccagcccatcgctgagtccccaggtcaatggaactccctctaggaactaccctgctacaagcatggtttcaggattgagttccccaaggaccaggaccagttccacagaaggaaattttaccaaagaagcatctacatacacactcactgtagagaccacaagtggcccagtcactgagaagtacacagtccccactgagacctcaacaactgaaggtgacagcacagagaccccctgggacacaagatatattcctgtaaaaatcacatctccaatgaaaacatttgcagattcaactgcatccaaggaaaatgccccagtgtctatgactccagctgagaccacagttactgactcacatactccaggaaggacaaacccatcatttgggacactttattcttccttccttgacctatcacctaaagggaccccaaattccagaggtgaaacaagcctggaactgattctatcaaccactggatatcccttctcctctcctgaacctggctctgcaggacacagcagaataagtaccagtgcgcctttgtcatcatctgcttcagttctcgataataaaatatcagagaccagcatattctcaggccagagtctcacctcccctctgtctcctggggtgcccgaggccagagccagcacaatgcccaactcagctatccctttttccatgacactaagcaatgcagaaacaagtgccgaaagggtcagaagcacaatttcctctctggggactccatcaatatccacaaagcagacagcagagactatccttaccttccatgccttcgctgagaccatggatatacccagcacccacatagccaagactttggcttcagaatggttgggaagtccaggtacccttggtggcaccagcacttcagcgctgacaaccacatctccatctaccactttagtctcagaggagaccaacacccatcactccacgagtggaaaggaaacagaaggaactttgaatacatctatgactccacttgagacctctgctcctggagaagagtccgaaatgactgccaccttggtccccactctaggttttacaactcttgacagcaagatcagaagtccatctcaggtctcttcatcccacccaacaagagagctcagaaccacaggcagcacctctgggaggcagagttccagcacagctgcccacgggagctctgacatcctgagggcaaccacttccagcacctcaaaagcatcatcatggaccagtgaaagcacagctcagcaatttagtgaaccccagcacacacagtgggtggagacaagtcctagcatgaaaacagagagacccccagcatcaaccagtgtggcagcccctatcaccacttctgttccctcagtggtctctggcttcaccaccctgaagaccagctccacaaaagggatttggcttgaagaaacatctgcagacacactcatcggagaatccacagctggcccaaccacccatcagtttgctgttcccactgggatttcaatgacaggaggcagcagcaccaggggaagccagggcacaacccacctactcaccagagccacagcatcatctgagacatccgcagatttgactctggccacgaacggtgtcccagtctccgtgtctccagcagtgagcaagacggctgctggctcaagtcctccaggagggacaaagccatcatatacaatggtttcttctgtcatccctgagacatcatctctacagtcctcagctttcagggaaggaaccagcctgggactgactccattaaacactagacatcccttctcttcccctgaaccagactctgcaggacacaccaagataagcaccagcattcctctgttgtcatctgcttcagttcttgaggataaagtgtcagcgaccagcacattctcacaccacaaagccacctcatctattaccacagggactcctgaaatctcaacaaagacaaagcccagctcagccgttctttcctccatgaccctaagcaatgcagcaacaagtcctgaaagagtcagaaatgcaacttcccctctgactcatccatctccatcaggggaagagacagcagggagtgtcctcactctcagcacctctgctgagactacagactcacctaacatccacccaactgggacactgacttcagaatcgtcagagagtcctagcactctcagcctcccaagtgtctctggagtcaaaaccacattttcttcatctactccttccactcatctatttactagtggagaagaaacagaggaaacttcgaatccatctgtgtctcaacctgagacttctgtttccagagtaaggaccaccttggccagcacctctgtccctaccccagtattccccaccatggacacctggcctacacgttcagctcagttctcttcatcccacctagtgagtgagctcagagctacgagcagtacctcagttacaaactcaactggttcagctcttcctaaaatatctcacctcactgggacggcaacaatgtcacagaccaatagagacacgtttaatgactctgctgcaccccaaagcacaacttggccagagactagtcccagattcaagacagggttaccttcagcaacaaccactgtttcaacctctgccacttctctctctgctactgtaatggtctctaaattcacttctccagcaactagttccatggaagcaacttctatcagggaaccatcaacaaccatcctcacaacagagaccacgaatggcccaggctctatggctgtggcttctaccaacatcccaattggaaagggctacattactgaaggaagattggacacaagccatctgcccattggaaccacagcttcctctgagacatctatggattttaccatggccaaagaaagtgtctcaatgtcagtatctccatctcagtccatggatgctgctggctcaagcactccaggaaggacaagccaattcgttgacacattttctgatgatgtctatcatttaacatccagagaaattacaatacctagagatggaacaagctcagctctgactccacaaatgactgcaactcaccctccatctcctgatcctggctctgctagaagcacctggcttggcatcttgtcctcatctccttcttctcctactcccaaagtcacaatgagctccacattttcaactcagagagtcaccacaagcatgataatggacacagttgaaactagtcggtggaacatgcccaacttaccttccacgacttccttgacaccaagtaatattccaacaagtggtgccataggaaaaagcaccctggttcccttggacactccatctccagccacatcattggaggcatcagaagggggacttccaaccctcagcacctaccctgaatcaacaaacacacccagcatccacctcggagcacacgctagttcagaaagtccaagcaccatcaaacttaccatggcttcagtagtaaaacctggctcttacacacctctcaccttcccctcaatagagacccacattcatgtatcaacagccagaatggcttactcttctgggtcttcacctgagatgacagctcctggagagactaacactggtagtacctgggaccccaccacctacatcaccactacggatcctaaggatacaagttcagctcaggtctctacaccccactcagtgaggacactcagaaccacagaaaaccatccaaagacagagtccgccaccccagctgcttactctggaagtcctaaaatctcaagttcacccaatctcaccagtccggccacaaaagcatggaccatcacagacacaactgaacactccactcaattacattacacaaaattggcagaaaaatcatctggatttgagacacagtcagctccaggacctgtctctgtagtaatccctacctcccctaccattggaagcagcacattggaactaacttctgatgtcccaggggaacccctggtccttgctcccagtgagcagaccacaatcactctccccatggcaacatggctgagtaccagtttgacagaggaaatggcttcaacagaccttgatatttcaagtccaagttcacccatgagtacatttgctatttttccacctatgtccacaccttctcatgaactttcaaagtcagaggcagataccagtgccattagaaatacagattcaacaacgttggatcagcacctaggaatcaggagtttgggcagaactggggacttaacaactgttcctatcaccccactgacaaccacgtggaccagtgtgattgaacactcaacacaagcacaggacaccctttctgcaacgatgagtcctactcacgtgacacagtcactcaaagatcaaacatctataccagcctcagcatccccttcccatcttactgaagtctaccctgagctcgggacacaagggagaagctcctctgaggcaaccactttttggaaaccatctacagacacactgtccagagagattgagactggcccaacaaacattcaatccactccacccatggacaacacaacaacagggagcagtagtagtggagtcaccctgggcatagcccaccttcccataggaacatcctccccagctgagacatccacaaacatggcactggaaagaagaagttctacagccactgtctctatggctgggacaatgggactccttgttactagtgctccaggaagaagcatcagccagtcattaggaagagtttcctctgtcctttctgagtcaactactgaaggagtcacagattctagtaagggaagcagcccaaggctgaacacacagggaaatacagctctctcctcctctcttgaacccagctatgctgaaggaagccagatgagcacaagcatccctctaacctcatctcctacaactcctgatgtggaattcatagggggcagcacattttggaccaaggaggtcaccacagttatgacctcagacatctccaagtcttcagcaaggacagagtccagctcagctacccttatgtccacagctttgggaagcactgaaaatacaggaaaagaaaaactcagaactgcctctatggatcttccatctccaactccatcaatggaggtgacaccatggatttctctcactctcagtaatgcccccaataccacagattcacttgacctcagccatggggtgcacaccagctctgcagggactttggccactgacaggtcattgaatactggtgtcactagagcctccagattggaaaacggctctgatacctcttctaagtccctgtctatgggaaacagcactcacacttccatgacttacacagagaagagtgaagtgtcttcttcaatccatccccgacctgagacctcagctcctggagcagagaccactttgacttccactcctggaaacagggccataagcttaacattgcctttttcatccattccagtggaagaagtcatttctacaggcataacctcaggaccagacatcaactcagcacccatgacacattctcccatcaccccaccaacaattgtatggaccagtacaggcacaattgaacagtccactcaaccactacatgcagtttcttcagaaaaagtttctgtgcagacacagtcaactccatatgtcaactctgtggcagtgtctgcttcccctacccatgagaattcagtctcttctggaagcagcacatcctctccatattcctcagcctcacttgaatccttggattccacaatcagtaggaggaatgcaatcacttcctggctatgggacctcactacatctctccccactacaacttggccaagtactagtttatctgaggcactgtcctcaggccattctggggtttcaaacccaagttcaactacgactgaatttccactcttttcagctgcatccacatctgctgctaagcaaagaaatccagaaacagagacccatggtccccagaatacagccgcgagtactttgaacactgatgcatcctcggtcacaggtctttctgagactcctgtgggggcaagtatcagctctgaagtccctcttccaatggccataacttctagatcagatgtttctggccttacatctgagagtactgctaacccgagtttaggcacagcctcttcagcagggaccaaattaactaggacaatatccctgcccacttcagagtctttggtttcctttagaatgaacaaggatccatggacagtgtcaatccctttggggtcccatccaactactaatacagaaacaagcatcccagtaaacagcgcaggtccacctggcttgtccacagtagcatcagatgtaattgacacaccttcagatggggctgagagtattcccactgtctccttttccccctcccctgatactgaagtgacaactatctcacatttcccagaaaagacaactcattcatttagaaccatttcatctctcactcatgagttgacttcaagagtgacacctattcctggggattggatgagttcagctatgtctacaaagcccacaggagccagtccctccattacactgggagagagaaggacaatcacctctgctgctccaaccacttcccccatagttctcactgctagtttcacagagaccagcacagtttcactggataatgaaactacagtaaaaacctcagatatccttgacgcacggaaaacaaatgagctcccctcagatagcagttcttcttctgatctgatcaacacctccatagcttcttcaactatggatgtcactaaaacagcctccatcagtcccactagcatctcaggaatgacagcaagttcctccccatctctcttctcttcagatagaccccaggttcccacatctacaacagagacaaatacagccacctctccatctgtttccagtaacacctattctcttgatgggggctccaatgtgggtggcactccatccactttaccaccctttacaatcacccaccctgtcgagacaagctcggccctattagcctggtctagaccagtaagaactttcagcaccatggtcagcactgacactgcctccggagaaaatcctacctctagcaattctgtggtgacttctgttccagcaccaggtacatggaccagtgtaggcagtactactgacttacctgccatgggctttctcaagacaagtcctgcaggagaggcacactcacttctagcatcaactattgaaccagccactgccttcactccccatctctcagcagcagtggtcactggatccagtgctacatcagaagccagtcttctcactacgagtgaaagcaaagccattcattcttcaccacagaccccaactacacccacctctggagcaaactgggaaacttcagctactcctgagagccttttggtagtcactgagacttcagacacaacacttacctcaaagattttggtcacagataccatcttgttttcaactgtgtccacgccaccttctaaatttccaagtacggggactctgtctggagcttccttccctactttactcccggacactccagccatccctctcactgccactgagccaacaagttcattagctacatcctttgattccaccccactggtgactatagcttcggatagtcttggcacagtcccagagactaccctgaccatgtcagagacctcaaatggtgatgcactggttcttaagacagtaagtaacccagataggagcatccctggaatcactatccaaggagtaacagaaagtccactccatccttcttccacttccccctctaagattgttgctccacggaatacaacctatgaaggttcgatcacagtggcactttctactttgcctgcgggaactactggttcccttgtattcagtcagagttctgaaaactcagagacaacggctttggtagactcatcagctgggcttgagagggcatctgtgatgccactaaccacaggaagccagggtatggctagctctggaggaatcagaagtgggtccactcactcaactggaaccaaaacattttcttctctccctctgaccatgaacccaggtgaggttacagccatgtctgaaatcaccacgaacagactgacagctactcaatcaacagcacccaaagggatacctgtgaagcccaccagtgctgagtcaggcctcctaacacctgtctctgcctcctcaagcccatcaaaggcctttgcctcactgactacagctcccccaacttgggggatcccacagtctaccttgacatttgagttttctgaggtcccaagtttggatactaagtccgcttctttaccaactcctggacagtccctgaacaccattccagactcagatgcaagcacagcatcttcctcactgtccaagtctccagaaaaaaacccaagggcaaggatgatgacttccacaaaggccataagtgcaagctcatttcaatcaacaggttttactgaaacccctgagggatctgcctccccttctatggcagggcatgaacccagagtccccacttcaggaacaggggaccctagatatgcctcagagagcatgtcttatccagacccaagcaaggcatcatcagctatgacatcgacctctcttgcatcaaaactcacaactctcttcagcacaggtcaagcagcaaggtctggttctagttcctctcccataagcctatccactgagaaagaaacaagcttcctttcccccactgcatccacctccagaaagacttcactatttcttgggccttccatggcaaggcagcccaacatattggtgcatcttcagacttcagctctgacactttctccaacatccactctaaatatgtcccaggaggagcctcctgagttaacctcaagccagaccattgcagaagaagagggaacaacagctgaaacacagacgttaaccttcacaccatctgagaccccaacatccttgttacctgtctcttctcccacagaacccacagccagaagaaagagttctccagaaacatgggcaagctctatttcagttcctgccaagacctccttggttgaaacaactgatggaacgctagtgaccaccataaagatgtcaagccaggcagcacaaggaaattccacgtggcctgccccagcagaggagacggggagcagtccagcaggcacatccccaggaagcccagaaatgtctaccactctcaaaatcatgagctccaaggaacccagcatcagcccagagatcaggtccactgtgagaaattctccttggaagactccagaaacaactgttcccatggagaccacagtggaaccagtcacccttcagtccacagccctaggaagtggcagcaccagcatctctcacctgcccacaggaaccacatcaccaaccaagtcaccaacagaaaatatgttggctacagaaagggtctccctctccccatccccacctgaggcttggaccaacctttattctggaactccaggagggaccaggcagtcactggccacaatgtcctctgtctccctagagtcaccaactgctagaagcatcacagggactggtcagcaaagcagtccagaactggtttcaaagacaactggaatggaattctctatgtggcatggctctactggagggaccacaggggacacacatgtctctctgagcacatcttccaatatccttgaagaccctgtaaccagcccaaactctgtgagctcattgacagataaatccaaacataaaaccgagacatgggtaagcaccacagccattccctccactgtcctgaataataagataatggcagctgaacaacagacaagtcgatctgtggatgaggcttattcatcaactagttcttggtcagatcagacatctgggagtgacatcacccttggtgcatctcctgatgtcacaaacacattatacatcacctccacagcacaaaccacctcactagtgtctctgccctctggagaccaaggcattacaagcctcaccaatccctcaggaggaaaaacaagctctgcgtcatctgtcacatctccttcaatagggcttgagactctgagggccaatgtaagtgcagtgaaaagtgacattgcccctactgctgggcatctatctcagacttcatctcctgcggaagtgagcatcctggacgtaaccacagctcctactccaggtatctccaccaccatcaccaccatgggaaccaactcaatctcaactaccacacccaacccagaagtgggtatgagtaccatggacagcaccccggccacagagaggcgcacaacttctacagaacacccttccacctggtcttccacagctgcatcagattcctggactgtcacagacatgacttcaaacttgaaagttgcaagatctcctggaacaatttccacaatgcatacaacttcattcttagcctcaagcactgaattagactccatgtctactccccatggccgtataactgtcattggaaccagcctggtcactccatcctctgatgcttcagctgtaaagacagagaccagtacaagtgaaagaacattgagtccttcagacacaactgcatctactcccatctcaactttttctcgtgtccagaggatgagcatctcagttcctgacattttaagtacaagttggactcccagtagtacagaagcagaagatgtgcctgtttcaatggtttctacagatcatgctagtacaaagactgacccaaatacgcccctgtccacttttctgtttgattctctgtccactcttgactgggacactgggagatctctgtcatcagccacagccactacctcagctcctcagggggccacaactccccaggaactcactttggaaaccatgatcagcccagctacctcacagttgcccttctctatagggcacattacaagtgcagtcacaccagctgcaatggcaaggagctctggagttactttttcaagaccagatcccacaagcaaaaaggcagagcagacttccactcagcttcccaccaccacttctgcacatccagggcaggtgcccagatcagcagcaacaactctggatgtgatcccacacacagcaaaaactccagatgcaacttttcagagacaagggcagacagctcttacaacagaggcaagagctacatctgactcctggaatgagaaagaaaaatcaaccccaagtgcaccttggatcactgagatgatgaattctgtctcagaagataccatcaaggaggttaccagctcctccagtgtattaaggaccctgaatacgctggacataaacttggaatctgggacgacttcatccccaagttggaaaagcagcccatatgagagaattgccccttctgagtccaccacagacaaagaggcaattcacccttctacaaacacagtagagaccacaggctgggtcacaagttccgaacatgcttctcattccactatcccagcccactcagcgtcatccaaactcacatctccagtggttacaacctccaccagggaacaagcaatagtttctatgtcaacaaccacatggccagagtctacaagggctagaacagagcctaattccttcttgactattgaactgagggacgtcagcccttacatggacaccagctcaaccacacaaacaagtattatctcttccccaggttccactgcgatcaccaaggggcctagaacagaaattacctcctctaagagaatatccagctcattccttgcccagtctatgaggtcgtcagacagcccctcagaagccatcaccaggctgtctaactttcctgccatgacagaatctggaggaatgatccttgctatgcaaacaagtccacctggcgctacatcactaagtgcacctactttggatacatcagccacagcctcctggacagggactccactggctacgactcagagatttacatactcagagaagaccactctctttagcaaaggtcctgaggatacatcacagccaagccctccctctgtggaagaaaccagctcttcctcttccctggtacctatccatgctacaacctcgccttccaatattttgttgacatcacaagggcacagtccctcctctactccacctgtgacctcagttttcttgtctgagacctctggcctggggaagaccacagacatgtcgaggataagcttggaacctggcacaagtttacctcccaatttgagcagtacagcaggtgaggcgttatccacttatgaagcctccagagatacaaaggcaattcatcattctgcagacacagcagtgacgaatatggaggcaaccagttctgaatattctcctatcccaggccatacaaagccatccaaagccacatctccattggttacctcccacatcatgggggacatcacttcttccacatcagtatttggctcctccgagaccacagagattgagacagtgtcctctgtgaaccagggacttcaggagagaagcacatcccaggtggccagctctgctacagagacaagcactgtcattacccatgtgtctagtggtgatgctactactcatgtcaccaagacacaagccactttctctagcggaacatccatctcaagccctcatcagtttataacttctaccaacacatttacagatgtgagcaccaacccctccacctctctgataatgacagaatcttcaggagtgaccatcaccacccaaacaggtcctactggagctgcaacacagggtccatatctcttggacacatcaaccatgccttacttgacagagactccattagctgtgactccagattttatgcaatcagagaagaccactctcataagcaaaggtcccaaggatgtgtcctggacaagccctccctctgtggcagaaaccagctatccctcttccctgacacctttcttggtcacaaccatacctcctgccacttccacgttacaagggcaacatacatcctctcctgtttctgcgacttcagttcttacctctggactggtgaagaccacagatatgttgaacacaagcatggaacctgtgaccaattcacctcaaaatttgaacaatccatcaaatgagatactggccactttggcagccaccacagatatagagactattcatccttccataaacaaagcagtgaccaatatggggactgccagttcagcacatgtactgcattccactctcccagtcagctcagaaccatctacagccacatctccaatggttcctgcctccagcatgggggacgctcttgcttctatatcaatacctggttctgagaccacagacattgagggagagccaacatcctccctgactgctggacgaaaagagaacagcaccctccaggagatgaactcaactacagagtcaaacatcatcctctccaatgtgtctgtgggggctattactgaagccacaaaaatggaagtcccctcttttgatgcaacattcataccaactcctgctcagtcaacaaagttcccagatattttctcagtagccagcagtagactttcaaactctcctcccatgacaatatctacccacatgaccaccacccagacagggtcttctggagctacatcaaagattccacttgccttagacacatcaaccttggaaacctcagcagggactccatcagtggtgactgaggggtttgcccactcaaaaataaccactgcaatgaacaatgatgtcaaggacgtgtcacagacaaaccctccctttcaggatgaagccagctctccctcttctcaagcacctgtccttgtcacaaccttaccttcttctgttgctttcacaccgcaatggcacagtacctcctctcctgtttctatgtcctcagttcttacttcttcactggtaaagaccgcaggcaaggtggatacaagcttagaaacagtgaccagttcacctcaaagtatgagcaacactttggatgacatatcggtcacttcagcagccaccacagatatagagacaacgcatccttccataaacacagtagttaccaatgtggggaccaccggttcagcatttgaatcacattctactgtctcagcttacccagagccatctaaagtcacatctccaaatgttaccacctccaccatggaagacaccacaatttccagatcaatacctaaatcctctaagactacaagaactgagactgagacaacttcctccctgactcctaaactgagggagaccagcatctcccaggagatcacctcgtccacagagacaagcactgttccttacaaagagctcactggtgccactaccgaggtatccaggacagatgtcacttcctctagcagtacatccttccctggccctgatcagtccacagtgtcactagacatctccacagaaaccaacaccaggctgtctacctccccaataatgacagaatctgcagaaataaccatcaccacccaaacaggtcctcatggggctacatcacaggatacttttaccatggacccatcaaatacaaccccccaggcagggatccactcagctatgactcatggattttcacaattggatgtgaccactcttatgagcagaattccacaggatgtatcatggacaagtcctccctctgtggataaaaccagctccccctcttcctttctgtcctcacctgcaatgaccacaccttccctgatttcttctaccttaccagaggataagctctcctctcctatgacttcacttctcacctctggcctagtgaagattacagacatattacgtacacgcttggaacctgtgaccagctcacttccaaatttcagcagcacctcagataagatactggccacttctaaagacagtaaagacacaaaggaaatttttccttctataaacacagaagagaccaatgtgaaagccaacaactctggacatgaatcccattcccctgcactggctgactcagagacacccaaagccacaactcaaatggttatcaccaccactgtgggagatccagctccttccacatcaatgccagtgcatggttcctctgagactacaaacattaagagagagccaacatatttcttgactcctagactgagagagaccagtacctctcaggagtccagctttcccacggacacaagttttctactttccaaagtccccactggtactattactgaggtctccagtacaggggtcaactcttctagcaaaatttccaccccagaccatgataagtccacagtgccacctgacaccttcacaggagagatccccagggtcttcacctcctctattaagacaaaatctgcagaaatgacgatcaccacccaagcaagtcctcctgagtctgcatcgcacagtacccttcccttggacacatcaaccacactttcccagggagggactcattcaactgtgactcagggattcccatactcagaggtgaccactctcatgggcatgggtcctgggaatgtgtcatggatgacaactccccctgtggaagaaaccagctctgtgtcttccctgatgtcttcacctgccatgacatccccttctcctgtttcctccacatcaccacagagcatcccctcctctcctcttcctgtgactgcacttcctacttctgttctggtgacaaccacagatgtgttgggcacaacaagcccagagtctgtaaccagttcacctccaaatttgagcagcatcactcatgagagaccggccacttacaaagacactgcacacacagaagccgccatgcatcattccacaaacaccgcagtgaccaatgtagggacttccgggtctggacataaatcacaatcctctgtcctagctgactcagagacatcgaaagccacacctctgatgagtaccacctccaccctgggggacacaagtgtttccacatcaactcctaatatctctcagactaaccaaattcaaacagagccaacagcatccctgagccctagactgagggagagcagcacgtctgagaagaccagctcaacaacagagacaaatactgccttttcttatgtgcccacaggtgctattactcaggcctccagaacagaaatctcctctagcagaacatccatctcagaccttgatcggcccacaatagcacccgacatctccacaggaatgatcaccaggctcttcacctcccccatcatgacaaaatctgcagaaatgaccgtcaccactcaaacaactactcctggggctacatcacagggtatccttccctgggacacatcaaccacacttttccagggagggactcattcaaccgtgtctcagggattcccacactcagagataaccactcttcggagcagaacccctggagatgtgtcatggatgacaactccccctgtggaagaaaccagctctgggttttccctgatgtcaccttccatgacatccccttctcctgtttcctccacatcaccagagagcatcccctcctctcctctccctgtgactgcacttcttacttctgttctggtgacaaccacaaatgtattgggcacaacaagcccagagcccgtaacgagttcacctccaaatttaagcagccccacacaggagagactgaccacttacaaagacactgcgcacacagaagccatgcatgcttccatgcatacaaacactgcagtggccaacgtggggacctccatttctggacatgaatcacaatcttctgtcccagctgattcacacacatccaaagccacatctccaatgggtatcaccttcgccatgggggatacaagtgtttctacatcaactcctgccttctttgagactagaattcagactgaatcaacatcctctttgattcctggattaagggacaccaggacgtctgaggagatcaacactgtgacagagaccagcactgtcctttcagaagtgcccactactactactactgaggtctccaggacagaagttatcacttccagcagaacaaccatctcagggcctgatcattccaaaatgtcaccctacatctccacagaaaccatcaccaggctctccacttttccttttgtaacaggatccacagaaatggccatcaccaaccaaacaggtcctatagggactatctcacaggctacccttaccctggacacatcaagcacagcttcctgggaagggactcactcacctgtgactcagagatttccacactcagaggagaccactactatgagcagaagtactaagggcgtgtcatggcaaagccctccctctgtggaagaaaccagttctccttcttccccagtgcctttacctgcaataacctcacattcatctctttattccgcagtatcaggaagtagccccacttctgctctccctgtgacttcccttctcacctctggcaggaggaagaccatagacatgttggacacacactcagaacttgtgaccagctccttaccaagtgcaagtagcttctcaggtgagatactcacttctgaagcctccacaaatacagagacaattcacttttcagagaacacagcagaaaccaatatggggaccaccaattctatgcataaactacattcctctgtctcaatccactcccagccatccggacacacacctccaaaggttactggatctatgatggaggacgctattgtttccacatcaacacctggttctcctgagactaaaaatgttgacagagactcaacatcccctctgactcctgaactgaaagaggacagcaccgccctggtgatgaactcaactacagagtcaaacactgttttctccagtgtgtccctggatgctgctactgaggtctccagggcagaagtcacctactatgatcctacattcatgccagcttctgctcagtcaacaaagtccccagacatttcacctgaagccagcagcagtcattctaactctcctcccttgacaatatctacacacaagaccatcgccacacaaacaggtccttctggggtgacatctcttggccaactgaccctggacacatcaaccatagccacctcagcaggaactccatcagccagaactcaggattttgtagattcagaaacaaccagtgtcatgaacaatgatctcaatgatgtgttgaagacaagccctttctctgcagaagaagccaactctctctcttctcaggcacctctccttgtgacaacctcaccttctcctgtaacttccacattgcaagagcacagtacctcctctcttgtttctgtgacctcagtacccacccctacactggcgaagatcacagacatggacacaaacttagaacctgtgactcgttcacctcaaaatttaaggaacaccttggccacttcagaagccaccacagatacacacacaatgcatccttctataaacacagcagtggccaatgtggggaccaccagttcaccaaatgaattctattttactgtctcacctgactcagacccatataaagccacatccgcagtagttatcacttccacctcgggggactcaatagtttccacatcaatgcctagatcctctgcgatgaaaaagattgagtctgagacaactttctccctgatatttagactgagggagactagcacctcccagaaaattggctcatcctcagacacaagcacggtctttgacaaagcattcactgctgctactactgaggtctccagaacagaactcacctcctctagcagaacatccatccaaggcactgaaaagcccacaatgtcaccggacacctccacaagatctgtcaccatgctttctacttttgctggcctgacaaaatccgaagaaaggaccattgccacccaaacaggtcctcatagggcgacatcacagggtacccttacctgggacacatcaatcacaacctcacaggcagggacccactcagctatgactcatggattttcacaattagatttgtccactcttacgagtagagttcctgagtacatatcagggacaagcccaccctctgtggaaaaaaccagctcttcctcttcccttctgtctttaccagcaataacctcaccgtcccctgtacctactacattaccagaaagtaggccgtcttctcctgttcatctgacttcactccccacctctggcctagtgaagaccacagatatgctggcatctgtggccagtttacctccaaacttgggcagcacctcacataagataccgactacttcagaagacattaaagatacagagaaaatgtatccttccacaaacatagcagtaaccaatgtggggaccaccacttctgaaaaggaatcttattcgtctgtcccagcctactcagaaccacccaaagtcacctctccaatggttacctctttcaacataagggacaccattgtttccacatccatgcctggctcctctgagattacaaggattgagatggagtcaacattctccctggctcatgggctgaagggaaccagcacctcccaggaccccatcgtatccacagagaaaagtgctgtccttcacaagttgaccactggtgctactgagacctctaggacagaagttgcctcttctagaagaacatccattccaggccctgatcattccacagagtcaccagacatctccactgaagtgatccccagcctgcctatctcccttggcattacagaatcttcaaatatgaccatcatcactcgaacaggtcctcctcttggctctacatcacagggcacatttaccttggacacaccaactacatcctccagggcaggaacacactcgatggcgactcaggaatttccacactcagaaatgaccactgtcatgaacaaggaccctgagattctatcatggacaatccctccttctatagagaaaaccagcttctcctcttccctgatgccttcaccagccatgacttcacctcctgtttcctcaacattaccaaagaccattcacaccactccttctcctatgacctcactgctcacccctagcctagtgatgaccacagacacattgggcacaagcccagaacctacaaccagttcacctccaaatttgagcagtacctcacatgagatactgacaacagatgaagacaccacagctatagaagccatgcatccttccacaagcacagcagcgactaatgtggaaaccaccagttctggacatgggtcacaatcctctgtcctagctgactcagaaaaaaccaaggccacagctccaatggataccacctccaccatggggcatacaactgtttccacatcaatgtctgtttcctctgagactacaaaaattaagagagagtcaacatattccttgactcctggactgagagagaccagcatttcccaaaatgccagcttttccactgacacaagtattgttctttcagaagtccccactggtactactgctgaggtctccaggacagaagtcacctcctctggtagaacatccatccctggcccttctcagtccacagttttgccagaaatatccacaagaacaatgacaaggctctttgcctcgcccaccatgacagaatcagcagaaatgaccatccccactcaaacaggtccttctgggtctacctcacaggatacccttaccttggacacatccaccacaaagtcccaggcaaagactcattcaactttgactcagagatttccacactcagagatgaccactctcatgagcagaggtcctggagatatgtcatggcaaagctctccctctctggaaaatcccagctctctcccttccctgctgtctttacctgccacaacctcacctcctcccatttcctccacattaccagtgactatctcctcctctcctcttcctgtgacttcacttctcacctctagcccggtaacgaccacagacatgttacacacaagcccagaacttgtaaccagttcacctccaaagctgagccacacttcagatgagagactgaccactggcaaggacaccacaaatacagaagctgtgcatccttccacaaacacagcagcgtccaatgtggagattcccagctctggacatgaatccccttcctctgccttagctgactcagagacatccaaagccacatcaccaatgtttattacctccacccaggaggatacaactgttgccatatcaacccctcacttcttggagactagcagaattcagaaagagtcaatttcctccctgagccctaaattgagggagacaggcagttctgtggagacaagctcagccatagagacaagtgctgtcctttctgaagtgtccattggtgctactactgagatctccaggacagaagtcacctcctctagcagaacatccatctctggttctgctgagtccacaatgttgccagaaatatccaccacaagaaaaatcattaagttccctacttcccccatcctggcagaatcatcagaaatgaccatcaagacccaaacaagtcctcctgggtctacatcagagagtacctttacattagacacatcaaccactccctccttggtaataacccattcgactatgactcagagattgccacactcagagataaccactcttgtgagtagaggtgctggggatgtgccacggcccagctctctccctgtggaagaaacaagccctccatcttcccagctgtctttatctgccatgatctcaccttctcctgtttcttccacattaccagcaagtagccactcctcttctgcttctgtgacttcacttctcacaccaggccaagtgaagactactgaggtgttggacgcaagtgcagaacctgaaaccagttcacctccaagtttgagcagcacctcagttgaaatactggccacctctgaagtcaccacagatacggagaaaattcatcctttctcaaacacggcagtaaccaaagttggaacttccagttctggacatgaatccccttcctctgtcctacctgactcagagacaaccaaagccacatcggcaatgggtaccatctccattatgggggatacaagtgtttctacattaactcctgccttatctaacactaggaaaattcagtcagagccagcttcctcactgaccaccagattgagggagaccagcacctctgaagagaccagcttagccacagaagcaaacactgttctttctaaagtgtccactggtgctactactgaggtctccaggacagaagccatctcctttagcagaacatccatgtcaggccctgagcagtccacaatgtcacaagacatctccataggaaccatccccaggatttctgcctcctctgtcctgacagaatctgcaaaaatgaccatcacaacccaaacaggtccttcggagtctacactagaaagtacccttaatttgaacacagcaaccacaccctcttgggtggaaacccactctatagtaattcagggatttccacacccagagatgaccacttccatgggcagaggtcctggaggtgtgtcatggcctagccctccctttgtgaaagaaaccagccctccatcctccccgctgtctttacctgccgtgacctcacctcatcctgtttccaccacattcctagcacatatccccccctctccccttcctgtgacttcacttctcacctctggcccggcgacaaccacagatatcttgggtacaagcacagaacctggaaccagttcatcttcaagtttgagcaccacctcccatgagagactgaccacttacaaagacactgcacatacagaagccgtgcatccttccacaaacacaggagggaccaatgtggcaaccaccagctctggatataaatcacagtcctctgtcctagctgactcatctccaatgtgtaccacctccaccatgggggatacaagtgttctcacatcaactcctgccttccttgagactaggaggattcagacagagctagcttcctccctgacccctggattgagggagtccagcggctctgaagggaccagctcaggcaccaagatgagcactgtcctctctaaagtgcccactggtgctactactgagatctccaaggaagacgtcacctccatcccaggtcccgctcaatccacaatatcaccagacatctccacaagaaccgtcagctggttctctacatcccctgtcatgacagaatcagcagaaataaccatgaacacccatacaagtcctttaggggccacaacacaaggcaccagtactttggacacgtcaagcacaacctctttgacaatgacacactcaactatatctcaaggattttcacactcacagatgagcactcttatgaggaggggtcctgaggatgtatcatggatgagccctccccttctggaaaaaactagaccttccttttctctgatgtcttcaccagccacaacttcaccttctcctgtttcctccacattaccagagagcatctcttcctctcctcttcctgtgacttcactcctcacgtctggcttggcaaaaactacagatatgttgcacaaaagctcagaacctgtaaccaactcacctgcaaatttgagcagcacctcagttgaaatactggccacctctgaagtcaccacagatacagagaaaactcatccttcttcaaacagaacagtgaccgatgtggggacctccagttctggacatgaatccacttcctttgtcctagctgactcacagacatccaaagtcacatctccaatggttattacctccaccatggaggatacgagtgtctccacatcaactcctggcttttttgagactagcagaattcagacagaaccaacatcctccctgacccttggactgagaaagaccagcagctctgaggggaccagcttagccacagagatgagcactgtcctttctggagtgcccactggtgccactgctgaagtctccaggacagaagtcacctcctctagcagaacatccatctcaggctttgctcagctcacagtgtcaccagagacttccacagaaaccatcaccagactccctacctccagcataatgacagaatcagcagaaatgatgatcaagacacaaacagatcctcctgggtctacaccagagagtactcatactgtggacatatcaacaacacccaactgggtagaaacccactcgactgtgactcagagattttcacactcagagatgaccactcttgtgagcagaagccctggtgatatgttatggcctagtcaatcctctgtggaagaaaccagctctgcctcttccctgctgtctctgcctgccacgacctcaccttctcctgtttcctctacattagtagaggatttcccttccgcttctcttcctgtgacttctcttctcaaccctggcctggtgataaccacagacaggatgggcataagcagagaacctggaaccagttccacttcaaatttgagcagcacctcccatgagagactgaccactttggaagacactgtagatacagaagacatgcagccttccacacacacagcagtgaccaacgtgaggacctccatttctggacatgaatcacaatcttctgtcctatctgactcagagacacccaaagccacatctccaatgggtaccacctacaccatgggggaaacgagtgtttccatatccacttctgacttctttgagaccagcagaattcagatagaaccaacatcctccctgacttctggattgagggagaccagcagctctgagaggatcagctcagccacagagggaagcactgtcctttctgaagtgcccagtggtgctaccactgaggtctccaggacagaagtgatatcctctaggggaacatccatgtcagggcctgatcagttcaccatatcaccagacatctctactgaagcgatcaccaggctttctacttcccccattatgacagaatcagcagaaagtgccatcactattgagacaggttctcctggggctacatcagagggtaccctcaccttggacacctcaacaacaaccttttggtcagggacccactcaactgcatctccaggattttcacactcagagatgaccactcttatgagtagaactcctggagatgtgccatggccgagccttccctctgtggaagaagccagctctgtctcttcctcactgtcttcacctgccatgacctcaacttcttttttctccacattaccagagagcatctcctcctctcctcatcctgtgactgcacttctcacccttggcccagtgaagaccacagacatgttgcgcacaagctcagaacctgaaaccagttcacctccaaatttgagcagcacctcagctgaaatattagccacgtctgaagtcaccaaagatagagagaaaattcatccctcctcaaacacacctgtagtcaatgtagggactgtgatttataaacatctatccccttcctctgttttggctgacttagtgacaacaaaacccacatctccaatggctaccacctccactctggggaatacaagtgtttccacatcaactcctgccttcccagaaactatgatgacacagccaacttcctccctgacttctggattaagggagatcagtacctctcaagagaccagctcagcaacagagagaagtgcttctctttctggaatgcccactggtgctactactaaggtctccagaacagaagccctctccttaggcagaacatccaccccaggtcctgctcaatccacaatatcaccagaaatctccacggaaaccatcactagaatttctactcccctcaccacgacaggatcagcagaaatgaccatcacccccaaaacaggtcattctggggcatcctcacaaggtacctttaccttggacacatcaagcagagcctcctggccaggaactcactcagctgcaactcacagatctccacactcagggatgaccactcctatgagcagaggtcctgaggatgtgtcatggccaagccgcccatcagtggaaaaaactagccctccatcttccctggtgtctttatctgcagtaacctcaccttcgccactttattccacaccatctgagagtagccactcatctcctctccgggtgacttctcttttcacccctgtcatgatgaagaccacagacatgttggacacaagcttggaacctgtgaccacttcacctcccagtatgaatatcacctcagatgagagtctggccacttctaaagccaccatggagacagaggcaattcagctttcagaaaacacagctgtgactcagatgggcaccatcagcgctagacaagaattctattcctcttatccaggcctcccagagccatccaaagtgacatctccagtggtcacctcttccaccataaaagacattgtttctacaaccatacctgcttcctctgagataacaagaattgagatggagtcaacatccaccctgacccccacaccaagggagaccagcacctcccaggagatccactcagccacaaagccaagcactgttccttacaaggcactcactagtgccacgattgaggactccatgacacaagtcatgtcctctagcagaggacctagccctgatcagtccacaatgtcacaagacatatccactgaagtgatcaccaggctctctacctcccccatcaagacagaatctacagaaatgaccattaccacccaaacaggttctcctggggctacatcaaggggtacccttaccttggacacttcaacaacttttatgtcagggacccactcaactgcatctcaaggattttcacactcacagatgaccgctcttatgagtagaactcctggagatgtgccatggctaagccatccctctgtggaagaagccagctctgcctctttctcactgtcttcacctgtcatgacctcatcttctcccgtttcttccacattaccagacagcatccactcttcttcgcttcctgtgacatcacttctcacctcagggctggtgaagaccacagagctgttgggcacaagctcagaacctgaaaccagttcacccccaaatttgagcagcacctcagctgaaatactggccatcactgaagtcactacagatacagagaaactggagatgaccaatgtggtaacctcaggttatacacatgaatctccttcctctgtcctagctgactcagtgacaacaaaggccacatcttcaatgggtatcacctaccccacaggagatacaaatgttctcacatcaacccctgccttctctgacaccagtaggattcaaacaaagtcaaagctctcactgactcctgggttgatggagaccagcatctctgaagagaccagctctgccacagaaaaaagcactgtcctttctagtgtgcccactggtgctactactgaggtctccaggacagaagccatctcttctagcagaacatccatcccaggccctgctcaatccacaatgtcatcagacacctccatggaaaccatcactagaatttctacccccctcacaaggaaagaatcaacagacatggccatcacccccaaaacaggtccttctggggctacctcgcagggtacctttaccttggactcatcaagcacagcctcctggccaggaactcactcagctacaactcagagatttccacagtcagtggtgacaactcctatgagcagaggtcctgaggatgtgtcatggccaagcccgctgtctgtggaaaaaaacagccctccatcttccctggtatcttcatcttcagtaacctcaccttcgccactttattccacaccatctgggagtagccactcctctcctgtccctgtcacttctcttttcacctctatcatgatgaaggccacagacatgttggatgcaagtttggaacctgagaccacttcagctcccaatatgaatatcacctcagatgagagtctggccgcttctaaagccaccacggagacagaggcaattcacgtttttgaaaatacagcagcgtcccatgtggaaaccaccagtgctacagaggaactctattcctcttccccaggcttctcagagccaacaaaagtgatatctccagtggtcacctcttcctctataagagacaacatggtttccacaacaatgcctggctcctctggcattacaaggattgagatagagtcaatgtcatctctgacccctggactgagggagaccagaacctcccaggacatcacctcatccacagagacaagcactgtcctttacaagatgccctctggtgccactcctgaggtctccaggacagaagttatgccctctagcagaacatccattcctggccctgctcagtccacaatgtcactagacatctccgatgaagttgtcaccaggctgtctacctctcccatcatgacagaatctgcagaaataaccatcaccacccaaacaggttattctctggctacatcccaggttacccttcccttgggcacctcaatgacctttttgtcagggacccactcaactatgtctcaaggactttcacactcagagatgaccaatcttatgagcaggggtcctgaaagtctgtcatggacgagccctcgctttgtggaaacaactagatcttcctcttctctgacatcattacctctcacgacctcactttctcctgtgtcctccacattactagacagtagcccctcctctcctcttcctgtgacttcacttatcctcccaggcctggtgaagactacagaagtgttggatacaagctcagagcctaaaaccagttcatctccaaatttgagcagcacctcagttgaaataccggccacctctgaaatcatgacagatacagagaaaattcatccttcctcaaacacagcggtggccaaagtgaggacctccagttctgttcatgaatctcattcctctgtcctagctgactcagaaacaaccataaccataccttcaatgggtatcacctccgctgtggacgataccactgttttcacatcaaatcctgccttctctgagactaggaggattccgacagagccaacattctcattgactcctggattcagggagactagcacctctgaagagaccacctcaatcacagaaacaagtgcagtcctttatggagtgcccactagtgctactactgaagtctccatgacagaaatcatgtcctctaatagaatacacatccctgactctgatcagtccacgatgtctccagacatcatcactgaagtgatcaccaggctctcttcctcatccatgatgtcagaatcaacacaaatgaccatcaccacccaaaaaagttctcctggggctacagcacagagtactcttaccttggccacaacaacagcccccttggcaaggacccactcaactgttcctcctagatttttacactcagagatgacaactcttatgagtaggagtcctgaaaatccatcatggaagagctctctctttgtggaaaaaactagctcttcatcttctctgttgtccttacctgtcacgacctcaccttctgtttcttccacattaccgcagagtatcccttcctcctctttttctgtgacttcactcctcaccccaggcatggtgaagactacagacacaagcacagaacctggaaccagtttatctccaaatctgagtggcacctcagttgaaatactggctgcctctgaagtcaccacagatacagagaaaattcatccttcttcaagcatggcagtgaccaatgtgggaaccaccagttctggacatgaactatattcctctgtttcaatccactcggagccatccaaggctacatacccagtgggtactccctcttccatggctgaaacctctatttccacatcaatgcctgctaattttgagaccacaggatttgaggctgagccattttctcatttgacttctggatttaggaagacaaacatgtccctggacaccagctcagtcacaccaacaaatacaccttcttctcctgggtccactcaccttttacagagttccaagactgatttcacctcttctgcaaaaacatcatccccagactggcctccagcctcacagtatactgaaattccagtggacataatcaccccctttaatgcttctccatctattacggagtccactgggataacctccttcccagaatccaggtttactatgtctgtaacagaaagtactcatcatctgagtacagatttgctgccttcagctgagactatttccactggcacagtgatgccttctctatcagaggccatgacttcatttgccaccactggagttccacgagccatctcaggttcaggtagtccattctctaggacagagtcaggccctggggatgctactctgtccaccattgcagagagcctgccttcatccactcctgtgccattctcctcttcaaccttcactaccactgattcttcaaccatcccagccctccatgagataacttcctcttcagctaccccatatagagtggacaccagtcttgggacagagagcagcactactgaaggacgcttggttatggtcagtactttggacacttcaagccaaccaggcaggacatcttcatcacccattttggataccagaatgacagagagcgttgagctgggaacagtgacaagtgcttatcaagttccttcactctcaacacggttgacaagaactgatggcattatggaacacatcacaaaaatacccaatgaagcagcacacagaggtaccataagaccagtcaaaggccctcagacatccacttcgcctgccagtcctaaaggactacacacaggagggacaaaaagaatggagaccaccaccacagctctgaagaccaccaccacagctctgaagaccacttccagagccaccttgaccaccagtgtctatactcccactttgggaacactgactcccctcaatgcatcaatgcaaatggccagcacaatccccacagaaatgatgatcacaaccccatatgttttccctgatgttccagaaacgacatcctcattggctaccagcctgggagcagaaaccagcacagctcttcccaggacaaccccatctgttttcaatagagaatcagagaccacagcctcactggtctctcgttctggggcagagagaagtccggttattcaaactctagatgtttcttctagtgagccagatacaacagcttcatgggttatccatcctgcagagaccatcccaactgtttccaagacaacccccaattttttccacagtgaattagacactgtatcttccacagccaccagtcatggggcagacgtcagctcagccattccaacaaatatctcacctagtgaactagatgcactgaccccactggtcactatttcggggacagatactagtacaacattcccaacactgactaagtccccacatgaaacagagacaagaaccacatggctcactcatcctgcagagaccagctcaactattcccagaacaatccccaatttttctcatcatgaatcagatgccacaccttcaatagccaccagtcctggggcagaaaccagttcagctattccaattatgactgtctcacctggtgcagaagatctggtgacctcacaggtcactagttctgggacagacagaaatatgactattccaactttgactctttctcctggtgaaccaaagacgatagcctcattagtcacccatcctgaagcacagacaagttcggccattccaacttcaactatctcgcctgctgtatcacggttggtgacctcaatggtcaccagtttggcggcaaagacaagtacaactaatcgagctctgacaaactcccctggtgaaccagctacaacagtttcattggtcacgcatcctgcacagaccagcccaacagttccctggacaacttccatttttttccatagtaaatcagacaccacaccttcatgaccaccagtcatggggcagaatccagttcagctgttccaactccaactgtttcaactgaggtaccaggagtagtgacccctttggtcaccagttctagggcagtgatcagtacaactattccaattctgactctttctcctggtgaaccagagaccacaccttcaatggccaccagtcatggggaagaagccagttctgctattccaactccaactgtttcacctggggtaccaggagtggtgacctctctggtcactagttctagggcagtgactagtacaactattccaattctgactttttctcttggtgaaccagagaccacaccttcaatggccaccagtcatgggacagaagctggctcagctgttccaactgttttacctgaggtaccaggaatggtgacctctctggttgctagttctagggcagtaaccagtacaactcttccaactctgactctttctcctggtgaaccagagaccacaccttcaatggccaccagtcatggggcagaagccagctcaactgttccaactgtttcacctgaggtaccaggagtggtgacctctctggtcactagttctagtggagtaaacagtacaagtattccaactctgattctttctcctggtgaactagaaaccacaccttcaatggccaccagtcatggggcagaagccagctcagctgttccaactccaactgtttcacctggggtatcaggagtggtgacccctctggtcactagttccagggcagtgaccagtacaactattccaattctaactctttcttctagtgagccagagaccacaccttcaatggccaccagtcatggggtagaagccagctcagctgttctaactgtttcacctgaggtaccaggaatggtgacctctctggtcactagttctagagcagtaaccagtacaactattccaactctgactatttcttctgatgaaccagagaccacaacttcattggtcacccattctgaggcaaagatgatttcagccattccaactttagctgtctcccctactgtacaagggctggtgacttcactggtcactagttctgggtcagagaccagtgcgttttcaaatctaactgttgcctcaagtcaaccagagaccatagactcatgggtcgctcatcctgggacagaagcaagttctgttgttccaactttgactgtctccactggtgagccgtttacaaatatctcattggtcacccatcctgcagagagtagctcaactcttcccaggacaacctcaaggttttcccacagtgaattagacactatgccttctacagtcaccagtcctgaggcagaatccagctcagccatttcaacaactatttcacctggtataccaggtgtgctgacatcactggtcactagctctgggagagacatcagtgcaacttttccaacagtgcctgagtccccacatgaatcagaggcaacagcctcatgggttactcatcctgcagtcaccagcacaacagttcccaggacaacccctaattattctcatagtgaaccagacaccacaccatcaatagccaccagtcctggggcagaagccacttcagattttccaacaataactgtctcacctgatgtaccagatatggtaacctcacaggtcactagttctgggacagacaccagtataactattccaactctgactctttcttctggtgagccagagaccacaacctcatttatcacctattctgagacacacacaagttcagccattccaactctccctgtctcccctggtgcatcaaagatgctgacctcactggtcatcagttctgggacagacagcactacaactttcccaacactgacggagaccccatatgaaccagagacaacagccatacagctcattcatcctgcagagaccaacacaatggttcccaggacaactcccaagttttcccatagtaagtcagacaccacactcccagtagccatcaccagtcctgggccagaagccagttcagctgtttcaacgacaactatctcacctgatatgtcagatctggtgacctcactggtccctagttctgggacagacaccagtacaaccttcccaacattgagtgagaccccatatgaaccagagactacagccacgtggctcactcatcctgcagaaaccagcacaacggtttctgggacaattcccaacttttcccataggggatcagacactgcaccctcaatggtcaccagtcctggagtagacacgaggtcaggtgttccaactacaaccatcccacccagtataccaggggtagtgacctcacaggtcactagttctgcaacagacactagtacagctattccaactttgactccttctcctggtgaaccagagaccacagcctcatcagctacccatcctgggacacagactggcttcactgttccaattcggactgttccctctagtgagccagatacaatggcttcctgggtcactcatcctccacagaccagcacacctgtttccagaacaacctccagtttttcccatagtagtccagatgccacacctgtaatggccaccagtcctaggacagaagccagttcagctgtactgacaacaatctcacctggtgcaccagagatggtgacttcacagatcactagttctggggcagcaaccagtacaactgttccaactttgactcattctcctggtatgccagagaccacagccttattgagcacccatcccagaacagagacaagtaaaacatttcctgcttcaactgtgtttcctcaagtatcagagaccacagcctcactcaccattagacctggtgcagagactagcacagctctcccaactcagacaacatcctctctcttcaccctacttgtaactggaaccagcagagttgatctaagtccaactgcttcacctggtgtttctgcaaaaacagccccactttccacccatccagggacagaaaccagcacaatgattccaacttcaactctttcccttggtttactagagactacaggcttactggccaccagctcttcagcagagaccagcacgagtactctaactctgactgtttcccctgctgtctctgggctttccagtgcctctataacaactgataagccccaaactgtgacctcctggaacacagaaacctcaccatctgtaacttcagttggacccccagaattttccaggactgtcacaggcaccactatgaccttgataccatcagagatgccaacaccacctaaaaccagtcatggagaaggagtgagtccaaccactatcttgagaactacaatggttgaagccactaatttagctaccacaggttccagtcccactgtggccaagacaacaaccaccttcaatacactggctggaagcctctttactcctctgaccacacctgggatgtccaccttggcctctgagagtgtgacctcaagaacaagttataaccatcggtcctggatctccaccaccagcagttataaccgtcggtactggacccctgccaccagcactccagtgacttctacattctccccagggatttccacatcctccatccccagctccacagcagccacagtcccattcatggtgccattcaccctcaacttcaccatcaccaacctgcagtacgaggaggacatgcggcaccctggttccaggaagttcaacgccacagagagagaactgcagggtctgctcaaacccttgttcaggaatagcagtctggaatacctctattcaggctgcagactagcctcactcaggccagagaaggatagctcagccacggcagtggatgccatctgcacacatcgccctgaccctgaagacctcggactggacagagagcgactgtactgggagctgagcaatctgacaaatggcatccaggagctgggcccctacaccctggaccggaacagtctctatgtcaatggtttcacccatcgaagctctatgcccaccaccagcactcctgggacctccacagtggatgtgggaacctcagggactccatcctccagccccagccccacgactgctggccctctcctgatgccgttcaccctcaacttcaccatcaccaacctgcagtacgaggaggacatgcgtcgcactggctccaggaagttcaacaccatggagagtgtcctgcagggtctgctcaagcccttgttcaagaacaccagtgttggccctctgtactctggctgcagattgaccttgctcaggcccgagaaagatggggcagccactggagtggatgccatctgcacccaccgccttgaccccaaaagccctggactcaacagggagcagctgtactgggagctaagcaaactgaccaatgacattgaagagctgggcccctacaccctggacaggaacagtctctatgtcaatggtttcacccatcagagctctgtgtccaccaccagcactcctgggacctccacagtggatctcagaacctcagggactccatcctccctctccagccccacaattatggctgctggccctctcctggtaccattcaccctcaacttcaccatcaccaacctgcagtatggggaggacatgggtcaccctggctccaggaagttcaacaccacagagagggtcctgcagggtctgcttggtcccatattcaagaacaccagtgttggccctctgtactctggctgcagactgacctctctcaggtctgagaaggatggagcagccactggagtggatgccatctgcatccatcatcttgaccccaaaagccctggactcaacagagagcggctgtactgggagctgagccaactgaccaatggcatcaaagagctgggcccctacaccctggacaggaacagtctctatgtcaatggtttcacccatcggacctctgtgcccaccagcagcactcctgggacctccacagtggaccttggaacctcagggactccattctccctcccaagccccgcaactgctggccctctcctggtgctgttcaccctcaacttcaccatcaccaacctgaagtatgaggaggacatgcatcgccctggctccaggaagttcaacaccactgagagggtcctgcagactctgcttggtcctatgttcaagaacaccagtgttggccttctgtactctggctgcagactgaccttgctcaggtccgagaaggatggagcagccactggagtggatgccatctgcacccaccgtcttgaccccaaaagccctggagtggacagggagcagctatactgggagctgagccagctgaccaatggcatcaaagagctgggcccctacaccctggacaggaacagtctctatgtcaatggtttcacccattggatccctgtgcccaccagcagcactcctgggacctccacagtggaccttgggtcagggactccatcctccctccccagccccacaactgctggccctctcctggtgccgttcaccctcaacttcaccatcaccaacctgaagtacgaggaggacatgcattgccctggctccaggaagttcaacaccacagagagagtcctgcagagtctgcttggtcccatgttcaagaacaccagtgttggccctctgtactctggctgcagactgaccttgctcaggtccgagaaggatggagcagccactggagtggatgccatctgcacccaccgtcttgaccccaaaagccctggagtggacagggagcagctatactgggagctgagccagctgaccaatggcatcaaagagctgggtccctacaccctggacagaaacagtctctatgtcaatggtttcacccatcagacctctgcgcccaacaccagcactcctgggacctccacagtggaccttgggacctcagggactccatcctccctccccagccctacatctgctggccctctcctggtgccattcaccctcaacttcaccatcaccaacctgcagtacgaggaggacatgcatcacccaggctccaggaagttcaacaccacggagcgggtcctgcagggtctgcttggtcccatgttcaagaacaccagtgtcggccttctgtactctggctgcagactgaccttgctcaggcctgagaagaatggggcagccactggaatggatgccatctgcagccaccgtcttgaccccaaaagccctggactcaacagagagcagctgtactgggagctgagccagctgacccatggcatcaaagagctgggcccctacaccctggacaggaacagtctctatgtcaatggtttcacccatcggagctctgtggcccccaccagcactcctgggacctccacagtggaccttgggacctcagggactccatcctccctccccagccccacaacagctgttcctctcctggtgccgttcaccctcaactttaccatcaccaatctgcagtatggggaggacatgcgtcaccctggctccaggaagttcaacaccacagagagggtcctgcagggtctgcttggtcccttgttcaagaactccagtgtcggccctctgtactctggctgcagactgatctctctcaggtctgagaaggatggggcagccactggagtggatgccatctgcacccaccaccttaaccctcaaagccctggactggacagggagcagctgtactggcagctgagccagatgaccaatggcatcaaagagctgggcccctacaccctggaccggaacagtctctacgtcaatggtttcacccatcggagctctgggctcaccaccagcactccttggacttccacagttgaccttggaacctcagggactccatcccccgtccccagccccacaaccaccggccctctcctggtgccattcacactcaacttcaccatcactaacctacagtatgaggagaacatgggtcaccctggctccaggaagttcaacatcacggagagtgttctgcagggtctgctcaagcccttgttcaagagcaccagtgttggccctctgtattctggctgcagactgaccttgctcaggcctgagaaggatggagtagccaccagagtggacgccatctgcacccaccgccctgaccccaaaatccctgggctagacagacagcagctatactgggagctgagccagctgacccacagcatcactgagctgggaccctacaccctggatagggacagtctctatgtcaatggtttcacccagcggagctctgtgcccaccaccagcactcctgggactttcacagtacagccggaaacctctgagactccatcatccctccctggccccacagccactggccctgtcctgctgccattcaccctcaattttaccatcactaacctgcagtatgaggaggacatgcgtcgccctggctccaggaagttcaacaccacggagagggtccttcagggtctgcttatgcccttgttcaagaacaccagtgtcagctctctgtactctggttgcagactgaccttgctcaggcctgagaaggatggggcagccaccagagtggatgctgtctgcacccatcgtcctgaccccaaaagccctggactggacagagagcggctgtactggaagctgagccagctgacccacggcatcactgagctgggcccctacaccctggacaggcacagtctctatgtcaatggtttcacccatcagagctctatgacgaccaccagaactcctgatacctccacaatgcacctggcaacctcgagaactccagcctccctgtctggacccatgaccgccagccctctcctggtgctattcacaattaacttcaccatcactaacctgcggtatgaggagaacatgcatcaccctggctctagaaagtttaacaccacggagagagtccttcagggtctgctcaggcctgtgttcaagaacaccagtgttggccctctgtactctggctgcagactgaccttgctcaggcccaagaaggatggggcagccaccaaagtggatgccatctgcacctaccgccctgatcccaaaagccctggactggacagagagcagctatactgggagctgagccagctgacccacagcatcactgagctgggcccctacaccctggacagggacagtctctatgtcaatggtttcacacagcggagctctgtgcccaccactagcattcctgggacccccacagtggacctgggaacatctgggactccagtttctaaacctggtccctcggctgccagccctctcctggtgctattcactctcaacttcaccatcaccaacctgcggtatgaggagaacatgcagcaccctggctccaggaagttcaacaccacggagagggtccttcagggcctgctcaggtccctgttcaagagcaccagtgttggccctctgtactctggctgcagactgactttgctcaggcctgaaaaggatgggacagccactggagtggatgccatctgcacccaccaccctgaccccaaaagccctaggctggacagagagcagctgtattgggagctgagccagctgacccacaatatcactgagctgggcccctatgccctggacaacgacagcctctttgtcaatggtttcactcatcggagctctgtgtccaccaccagcactcctgggacccccacagtgtatctgggagcatctaagactccagcctcgatatttggcccttcagctgccagccatctcctgatactattcaccctcaacttcaccatcactaacctgcggtatgaggagaacatgtggcctggctccaggaagttcaacactacagagagggtccttcagggcctgctaaggcccttgttcaagaacaccagtgttggccctctgtactctggctgcaggctgaccttgctcaggccagagaaagatggggaagccaccggagtggatgccatctgcacccaccgccctgaccccacaggccctgggctggacagagagcagctgtatttggagctgagccagctgacccacagcatcactgagctgggcccctacacactggacagggacagtctctatgtcaatggtttcacccatcggagctctgtacccaccaccagcaccggggtggtcagcgaggagccattcacactgaacttcaccatcaacaacctgcgctacatggcggacatgggccaacccggctccctcaagttcaacatcacagacaacgtcatgcagcacctgctcagtcctttgttccagaggagcagcctgggtgcacggtacacaggctgcagggtcatcgcactaaggtctgtgaagaacggtgctgagacacgggtggacctcctctgcacctacctgcagcccctcagcggcccaggtctgcctatcaagcaggtgttccatgagctgagccagcagacccatggcatcacccggctgggcccctactctctggacaaagacagcctctaccttaacggttacaatgaacctggtccagatgagcctcctacaactcccaagccagccaccacattcctgcctcctctgtcagaagccacaacagccatggggtaccacctgaagaccctcacactcaacttcaccatctccaatctccagtattcaccagatatgggcaagggctcagctacattcaactccaccgagggggtccttcagcacctgctcagacccttgttccagaagagcagcatgggccccttctacttgggttgccaactgatctccctcaggcctgagaaggatggggcagccactggtgtggacaccacctgcacctaccaccctgaccctgtgggccccgggctggacatacagcagctttactgggagctgagtcagctgacccatggtgtcacccaactgggcttctatgtcctggacagggatagcctcttcatcaatggctatgcaccccagaatttatcaatccggggcgagtaccagataaatttccacattgtcaactggaacctcagtaatccagaccccacatcctcagagtacatcaccctgctgagggacatccaggacaaggtcaccacactctacaaaggcagtcaactacatgacacattccgcttctgcctggtcaccaacttgacgatggactccgtgttggtcactgtcaaggcattgttctcctccaatttggaccccagcctggtggagcaagtctttctagataagaccctgaatgcctcattccattggctgggctccacctaccagttggtggacatccatgtgacagaaatggagtcatcagtttatcaaccaacaagcagctccagcacccagcacttctacctgaatttcaccatcaccaacctaccatattcccaggacaaagcccagccaggcaccaccaattaccagaggaacaaaaggaatattgaggatgcgctcaaccaactcttccgaaacagcagcatcaagagttatttttctgactgtcaagtttcaacattcaggtctgtccccaacaggcaccacaccggggtggactccctgtgtaacttctcgccactggctcggagagtagacagagttgccatctatgaggaatttctgcggatgacccggaatggtacccagctgcagaacttcaccctggacaggagcagtgtccttgtggatgggtattctcccaacagaaatgagcccttaactgggaattctgaccttcccttctgggctgtcatcctcatcggcttggcaggactcctgggagtcatcacatgcctgatctgcggtgtcctggtgaccacccgccggcggaagaaggaaggagaatacaacgtccagcaacagtgcccaggctactaccagtcacacctagacctggaggatctgcaatgactggaacttgccggtgcctggggtgcctttcccccagccagggtccaaagaagcttggctggggcagaaataaaccatattggtcgga

SEQ ID NO: 2302 - DNA, 2605 bp, Homo sapiens
gtgagtcaccaaggaaggcagcggcagctccactcagccagtacccagatacgctgggaaccttccccagccatggcttccctggggcagatcctcttctggagcataattagcatcatcattattctggctggagcaattgcactcatcattggctttggtatttcagggagacactccatcacagtcactactgtcgcctcagctgggaacattggggaggatggaatcctgagctgcacttttgaacctgacatcaaactttctgatatcgtgatacaatggctgaaggaaggtgttttaggcttggtccatgagttcaaagaaggcaaagatgagctgtcggagcaggatgaaatgttcagaggccggacagcagtgtttgctgatcaagtgatagttggcaatgcctctttgcggctgaaaaacgtgcaactcacagatgctggcacctacaaatgttatatcatcacttctaaaggcaaggggaatgctaaccttgagtataaaactggagccttcagcatgccggaagtgaatgtggactataatgccagctcagagaccttgcggtgtgaggctccccgatggttcccccagcccacagtggtctgggcatcccaagttgaccagggagccaacttctcggaagtctccaataccagctttgagctgaactctgagaatgtgaccatgaaggttgtgtctgtgctctacaatgttacgatcaacaacacatactcctgtatgattgaaaatgacattgccaaagcaacaggggatatcaaagtgacagaatcggagatcaaaaggcggagtcacctacagctgctaaactcaaaggcttctctgtgtgtctcttctttctttgccatcagctgggcacttctgcctctcagcccttacctgatgctaaaataatgtgcctcggccacaaaaaagcatgcaaagtcattgttacaacagggatctacagaactatttcaccaccagatatgacctagttttatatttctgggaggaaatgaattcatatctagaagtctggagtgagcaaacaagagcaagaaacaaaaagaagccaaaagcagaaggctccaatatgaacaagataaatctatcttcaaagacatattagaagttgggaaaataattcatgtgaactagacaagtgtgttaagagtgataagtaaaatgcacgtggagacaagtgcatccccagatctcagggacctccccctgcctgtcacctggggagtgagaggacaggatagtgcatgttctttgtctctgaatttttagttatatgtgctgtaatgttgctctgaggaagcccctggaaagtctatcccaacatatccacatcttatattccacaaattaagctgtagtatgtaccctaagacgctgctaattgactgccacttcgcaactcaggggcggctgcattttagtaatgggtcaaatgattcactttttatgatgcttccaaaggtgccttggcttctcttcccaactgacaaatgccaaagttgagaaaaatgatcataattttagcataaacagagcagtcggcgacaccgattttataaataaactgagcaccttctttttaaacaaacaaatgcgggtttatttctcagatgatgttcatccgtgaatggtccagggaaggacctttcaccttgtctatatggcattatgtcatcacaagctctgaggcttctcctttccatcctgcgtggacagctaagacctcagttttcaatagcatctagagcagtgggactcagctggggtgatttcgccccccatctccgggggaatgtctgaagacaattttggttacctcaatgagggagtggaggaggatacagtgctactaccaactagtggatagaggccagggatgctgctcaacctcctaccatgtacaggacgtctccccattacaactacccaatccgaagtgtcaactgtgtcagggctaagaaaccctggttttgagtagaaaagggcctggaaagaggggagccaacaaatctgtctgcttcctcacattagtcattggcaaataagcattctgtctctttggctgctgcctcagcacagagagccagaactctatcgggcaccaggataacatctctcagtgaacagagttgacaaggcctatgggaaatgcctgatgggattatcttcagcttgttgagcttctaagtttctttcccttcattctaccctgcaagccaagttctgtaagagaaatgcctgagttctagctcaggttttcttactctgaatttagatctccagaccctgcctggccacaattcaaattaaggcaacaaacatataccttccatgaagcacacacagacttttgaaagcaaggacaatgactgcttgaattgaggccttgaggaatgaagctttgaaggaaaagaatactttgtttccagcccccttcccacactcttcatgtgttaaccactgccttcctggaccttggagccacggtgactgtattacatgttgttatagaaaactgattttagagttctgatcgttcaagagaatgattaaatatacatttcctacacca

SEQ ID NO: 2303 - DNA, 2573 bp, Homo sapiens
cattgcctgagtaaaattaggtttttaggtctttttggcatttacttcttttacagctgatgtggaatcaattattcctttatatgttcataagtacaaaatttcactatcttaattacttccaaacaaacaatttccaagcaagggtatgtgtgcctggtttttctgctcctccaattctaagatcgttatttgtttgccttctgtttctcacccaaaaatacagatggttgggaaagatacatcttattgagttgtcctatgcagtctctgtctatatttgcatttctttctattcctatcttgcctttttttttttttttacacagatttggttttcccttccctttgtgaaaaccagaattgagcagcattgtacatcagagatggtacccaggaaatgtctttgttcctcagtatttttcgtcaaaacttccatgcaaagacagtcccagcaaagttgacatacatcccaacctctctcattggcttttctaactttttatagagctattcccctgagaaaagtgaaatgctgagtatgatgggtattgcctgttgataggatagctaaggaaatttgcttttggagaatgtatcttaaataattatacaggaaagtagtcacagtatagtgttctgtttaaggtacatcatgggtacataaatgtctaaaaccttcatcctttggtctatttctctgtaagtgtaaattacatatatattagaaagagagatagaatcaaagaattaggggtgttacagaggcagctttttgctgccttggttttgactgtatcagcatttctattgcagacctctattttcaggggttttagagactcgaccataaaaatttgtttcaggcttaaaagttttgaaagatttttttaggtatctaattttaaacaaatagatcttgtttttatattataggagggaaataaatggagtttactagttcaattttgcgctaatataacttttaataaacttaactttttaaacaaaaacataaaatctaattagttcatagttggttgatgcttttttaaaagaatcaattattgaccttgagaaacttgcctgcttcatcagtatagtaacctatctttgagatattttaaaacgtgtatacctttattaacattatcttgattccagcggtggatcagtatgataatgcagatttatgacatccatataagctatctggtaatatagatttaggaatatatagtatatatgatacatatatatatatatatatttactagatagattaaggagaaaaagctcccataaacttagtttgtcaaataaataccatatatttaaaaaatgcacagacatttatcattcagagtcagaatgagattcaagtaattgcaaagggaagttgtctcttgggtaaacaatacacattttatagcttcttgtgaaactaattttttcctttctatattgtggttatgggaaagtaaaagaattaaaattaatacagactttatttaaataacattaaactgtgaagcagagagaaacgccaggaaattaaatatttaggccattatcttgtggttgtctgacaatacttcacctttcttttaattccccatgatgttttcaattatggagagagtattaaaatctagatttaagtttctgcattgttctcattacactcaacactatttcattaagttcttgataatatgtagtcttctgtgtgcaaggaaagaaataaataacacatttatttgctgaatgagttttaaggtgtgcaagttgtagtgatgtttttcccacacaggattctatacacttataccatcttaaatctggcatttttttttcagatagcttctactgacaaacacaaagcttgtttgtgtgcaaatataaggctaaataaatggtgctaaagtgtattatgactgtcagataaaatcaggcaaaattttgtggtgcttaaattaattttttcattgattttattgatcagtgcattgaacagtgtttattattcacaagttgtcttttattagtaaatcaaggcctcatagcacattgttaaataaagtggttgactagtctatgtaacagctcaccaagctactatctcttttaactccttataatgttgcgtcattaaaggtcaaggggtcatgctattaatctcattgctatagaccattaacatgactgaacttttccacaaagtacttatgtttacaatgctataaccctttgactgctgcggcaacctttaaccacacaaatgtcacaagctagaatcatcagcatggttcttgccatggcaatcaaagagttaagggctgtgcagtgatttgttttgtatttattaatttatatttattttgtttccattcaaggaggggattaggggtggggcagtttttgtctgctgtaagtgtcttaacctagggaagggttaaatggctttttatactattgcatcttctgtatttaccatcaattcattgtgttgtaattaaaagaaactgtcaataaataagagaacagaaaaatgaaaaaaaaaaaaaaaaaaa

SEQ ID NO: 2304 - DNA, 13804 bp, Homo sapiens
ggtgctcgcgaaagctcgctgtcgctgggaggcgcgcgccggcgttcctcggccgctccgggtacctgagggacgcgcggccgcccgcggcaggcggtgcagcccccccaccccttggagccaggcgccggggtctgaggatagcatttctcaagacctgacttatggagcacttgtaacctgagatatttcagttgaaggaagaaatagctcttctcctaagatggaatctgtggtttgggaatgtggttgatcaacttgatatgttggccaaatgtgccccatgtaataaaatgaaaagaagagacaagatgatgtcattttcccatattgtgaaaccaaaaacaaacgccttttgtgagaccaagctaacaaacctctgacggtgcgaagagtatttaactgtttgaagaatttaacagtaagatacagaagaagtaccttcgagctgagacctgcaggtgtataaatatctaaaatacatattgaataggcctgatcatctgaatctccttcagacccaggaaggatggctatgacttggattgtcttctctctttggcccttgactgtgttcatggggcatataggtgggcacagtttgttttcttgtgaacctattaccttgaggatgtgccaagatttgccttataatactaccttcatgcctaatcttctgaatcattatgaccaacagacagcagctttggcaatggagccattccaccctatggtgaatctggattgttctcgggatttccggccttttctttgtgcactctacgctcctatttgtatggaatatggacgtgtcacacttccctgtcgtaggctgtgtcagcgggcttacagtgagtgttcgaagctcatggagatgtttggtgttccttggcctgaagatatggaatgcagtaggttcccagattgtgatgagccatatcctcgacttgtggatctgaatttagctggagaaccaactgaaggagccccagtggcagtgcagagagactatggtttttggtgtccccgagagttaaaaattgatcctgatctgggttattcttttctgcatgtgcgtgattgttcacctccttgtccaaatatgtacttcagaagagaagaactgtcatttgctcgctatttcataggattgatttcaatcatttgcctctcggccacattgtttacttttttaacttttttgattgatgtcacaagattccgttatcctgaaaggcctattatattttatgcagtctgctacatgatggtatccttaattttcttcattggatttttgcttgaagatcgagtagcctgcaatgcatccatccctgcacaatataaggcttccacagtgacacaaggatctcataataaagcctgtaccatgctttttatgatactctatttttttactatggctggcagtgtatggtgggtaattcttaccatcacatggtttttagcagctgtgccaaagtggggtagtgaagctattgagaagaaagcattgctgtttcacgccagtgcatggggcatccccggaactctaaccatcatccttttagcgatgaataaaattgaaggtgacaatattagtggcgtgtgttttgttggcctctacgatgttgatgcattgagatattttgttcttgctcccctctgcctgtatgtggtagttggggtttctctcctcttagctggcattatatccctaaacagagttcgaattgagattccattagaaaaggagaaccaagataaattagtgaagtttatgatccggatcggtgttttcagcattctttatctcgtaccactcttggttgtaattggatgctacttttatgagcaagcttaccggggcatctgggaaacaacgtggatacaagaacgctgcagagaatatcacattccatgtccatatcaggttactcaaatgagtcgtccagacttgattctctttctgatgaaatacctgatggctctcatagttggcattccctctgtattttgggttggaagcaaaaagacatgctttgaatgggccagtttttttcatggtcgtaggaaaaaagagatagtgaatgagagccgacaggtactccaggaacctgattttgctcagtctctcctgagggatccaaatactcctatcataagaaagtcaaggggaacttccactcaaggaacatccacccatgcttcttcaactcagctggctatggtggatgatcaaagaagcaaagcaggaagcatccacagcaaagtgagcagctaccacggcagcctccacagatcacgtgatggcaggtacacgccctgcagttacagaggaatggaggagagactacctcatggcagcatgtcacgactaacagatcactccaggcatagtagttctcatcggctcaatgaacagtcacgacatagcagcatcagagatctcagtaataatcccatgactcatatcacacatggcaccagcatgaatcgggttattgaagaagatggaaccagtgcttaatttgtcttgtctaaggtggaaatcttgtgctgtttaaaaagcagattttattctttgccttttgcatgactgatagctgtaactcacagttaacatgctttcagtcaagtacagattgtgtccactggaaaggtaaatgattgcttttttatattgcatcaaacttggaacatcaaggcatccaaaacactaagaattctatcatcacaaaaataattcgtctttctaggttatgaagagataattatttgtctggtaagcatttttataaacccactcattttatatttagaaaaatcctaaatgtgtggtgactgctttgtagtgaactttcatatactataaactagttgtgagataacattctggtagctcagttaataaaacaatttcagaattaaagaaattttctatgcaaggtttacttctcagatgaacagtaggactttgtagttttatttccactaagtgaaaaaagaactgtgtttttaaactgtaggagaatttaataaatcagcaagggtattttagctaatagaataaaagtgcaacagaagaatttgattagtctatgaaaggttctcttaaaattctatcgaaataatcttcatgcagagatattcagggtttggattagcagtggaataaagagatgggcattgtttcccctataattgtgctgtttttataacttttgtaaatattactttttctggctgtgtttttataacttatccatatgcatgatggaaaaattttaatttgtagccatcttttcccatgtaatagtattgattcatagagaacttaatgttcaaaatttgctttgtggaggcatgtaataagataaacatcatacattataaggtaaccacaattacaaaatggcaaaacattttctctgtattcattgttgtatttttctacagtgagatgtgatcttgccaaagccaccagaccttggcttccaggccctcctgtagtgagttgattgtctgcacttgccttgcccaatagccagtaggctacagcttttgccccacacccttattttcagattctggatcattcttgtttacaactgaaatatatataacctcagtccaaagtggtgattgatttgagtatttgaaaattgttgtagctaaatgaagcatgattagtcttagtatgaatatcatttaatctttaaaaaatcaagtaaaaatgtttatctgataatgtttaaataatttacaatataaactgtaaaacttattaggcatgaaatcaatcagaagagaaagaaaaatgctggaacatgcttgatgtattatgtaaaaagcatatttaaacaagggtcctcaaccctgactgcagataagaatcacttgggttacttcagatgcctaacaccttcctctcatacaaataagaattggtagctttcttaaaaaaaaaaaaaaaaaaaaaaagcgctccaggtgattctaatctgcagcctggcttgaaactcactactttaacttgcccctgatgatctgtcggcatcatatatcacatgaacatccacatggattctgtctttcgcttttatatcattatctaatattcagttgttctgcacctgatgccaaattctgggctgtactcctagagagacttactcagtaaggccaaagtgataggactttaaaatctgtagttataaaaataccgcaggtgattcttacggaggtaatccaagaatcatactttgaagaattattctagactctgaagaggcctggctctgccttatgctattatagtttatgacctttaacaatttaactctccgagcctcagttcccttgtttgtaaatgaagatagaagataaatacgtactctacctacctcacaaagctgtcagattaagatcaagtgaaaaaaattatgtgaaagctctttgaaaactgtaaagcattatgaatgataagggattaggttattgtggatttaagaggtgtgaggactgctatagtacattccttgacgtgtgttgaattcatgtatactttctttcttaccctttaaaacaaactgccaagaaattaggtgttgaaaaagaatattctcatcaggcagcaaagtcagttttctgatagtaataatttgtctattatgttatatatttcaaagtacatgtatgataatatgacttattcttcatgagagatatttgaatatttggcccaaaatgtttttcatttttctctgtgttcattgcctttctccttggagctggagttaatgctcaaagcaggcaggtctgaattccctcataaccgacaattagtaaacattttctctgaaagccaaacatataacaacttatttatcaataattcatgaagcttttgtctgagaatctctcctgcaaacagcatgagagaactaaaacaaacattcacaaacaaaaataagttaaaatagaaggtaccagtttgggctcgaagatgttgtcatccattgccatctgcattatattatcaactgccaaaatgttaattggttttcttttacaagtgggccaagtatagacagttaagtgaacatcactatgaaaatcttaactttgtgcttctagatttttagataatcatttgtattttctctattaaattgtgggtatgtatgggaatactatattgacttttcagttactttcagtaagtatcttaattttgtcccacaaaatttatgtaatattaatccatggttttaaacaacagtattcagtttgggcagcagttttaagtctaactagcttaaaccaatctgaataagtctggacagttttcctaccatatgtttaactttgattggcatatgataatgtttagtgttttcttttttcagttgacaactgagaaaataatagttctctctaacatgttaatatattatcaaaaggttttcaaaaagtactttgatttcagcaactttttttattcaataactagacaaaagatctaagataatattaaactcaaaacagtttgtttcaaagaacaattggttaataactcagctggcacagggattcatacacagtttttcaataaatatttaaatgaacaattcatgtcacacaacttgcttttaccctagtactgagtctcacatcaaagaaatttgaaagatctataacctatgtgaaatgaagtctctgctttaccagaataatatgtggcaggtaataaatatgtaaagtacaccaaatgaaacatattttgcatagataacagtccatatcactattataattaaagaaatatatgtacagacatgtaccaatccttttaattaattttagaagatgaacagtgattcttagaagtgagtaattagactccttttagtcttatgctgttagatctttgtggaccagctgagtaaatgaatcttcaaatcaacctttctttttctgctgctcttagagcagatttataaaaatcctaagaatgtcttcaaattagaaaaatttactacattttaacctacctcatcagtttctttgtgataatagctgaaaataactcaaactgtacccatcttagttaggctatatctctgtgaaatgaaaggaaccacttaattttttttatataaattagtgaatcatttgctggagcttagaaaatattaacataccaaaatttcattatgatgatatttatattgctttttgacatgccaaaggtacatttacatattaccatatttggatgacttacatagtctggtgtaatgaaaattcccctgggattggaattttaagactcatgatgtcaactgggctggtcattttatttctctgagtctttgtttcttcaatgtaaaatgtggataaggtaatttttggttttagcctccctcactggatattgtaaggatcaaatgaaatagtatttattataatgctctgtaacccataaattattctacttaaaaaaattttttatagagacagggtcttgctctgtcacacaggctggagagcagtggcataatcatagttcattataaccttgaactcctaggctcaagcagtcctccagcttcagcctcccaagtagctaagactgtaggcatgcaccactacacctggctaattttaatttttttttctttttttgagacggagtctggctttgttgcccaggctggagtgcagtggcacaatctcagctcactgcaacctccacctcccaggttcaagtgattcttctgtctcagcctcccgagtaactgggactacaggtgcgtgccaccacatccagctagtttttgtatttttagtggagatggagttttgccatgttggtctcaaactcctgacctcaagtgatctgcccacctcagcctcccaaagtgctaggattacaggcatgagtcactgcacctggcttaattttaatttttttaattttttgtagagatgagtctcactatgttgaccaggctggtcttgaactcctggcctcctaaagcactgggattacaagcatgagccaccatgcctgatccataaattgttctactgataccatttggttttgttagaatttgggggggctatagaaaacaaggttacagtcttcattagtatttctttttagcaataacaacaaaataggcaattagaccagtgttcatttggtacagtctttaaatcggtcatccaattaacctttaaaaagtaggttatgctcttaaattgtattggttctttaatatgtgttataccagagtatgcctcaaattttatgtagttgaatttgtagaacaaatttggggatattcattttatttttccttttatatgaaattgtataagtacattagcttgacttaaattataaaaaaaaatatatatgaagaagaatgtagaccctataatgttttttgtctttgactttttggcttttatgtacctcattttttctgattgagaaaaagttttgaaaaagtgattcacttgttggttttcattgtggcaaaactttaaattttaagtcatcacactatgagaattgtttgtacacatttataatttttttaaagtatgtaaagtaaggattttttctccattcttcactcacaaaggatagcatttttatggaacctagatttacaaaggaacttgtgattcttttcaatgcttttgtgtcgttttacagctgattaagaaaaaatgtttacatttaattcagctgtatttcctagtagctgtataatcttacacattattcttatataattttgacctattttatatgaaaataattgtattggcatctcttcataatttaattctcttctctccttcttttgttccgattagatgaatttgggaaaggagtaggaagactaggtatcgcatgccttccgtctgattgtaatcagtctcctgggttttttactaatttaatcttaatcctgtgcttctttagtcatcaaattgatataggattacaattttctctcaggatccaagtcttctaagaatgaaaatgttgaagtctacccagaaccagccatccttgtagacatttctatttggttgatttataaagatttaatatataaagatttaatatgagttaaacatgtttcttattctgtgatctctaattagaaagtaaaattctgttgccataaatataaaagaaagttttcacttatattttagtcaaacaccaaaccactgcattacttacttcctataagacacagtagttcaatctgttgaaaggcattgaaggataatttccttcagattactttttaaatcatcatctgcctcaggaaattctttcttgaatttttttgttggtgtgaaagcgttgcttatactttatgctcattttattggtcactgtcaccagtttttcccgataaagattaaaaatgttttttaccttgaaataattcagattttgaagattcactgtttcattattttgctaattaccattaactagtaaagttagtttttaaagtttttttaaggttgatattttatcatattcctggagtaggatggattactttattattattgtagctttaaggttttttgttgtataagtcagcttgtttgtatatgctaaattgcagatatttctttgtgttgtgcttattggtttttttttttaacttagagcttaataatttctattttctatcctggagtctaaaattaaacaaaaaaatctattttctaaattggcaggatttttttaatgattagtaaaactgtattattttatttttaaaaatacaataggattttgagtcaggaaacttgacttctactcttgcctctcttttgcagttagctgtgtaactttggataaggcattttatctcgtggtgcctccatttttctcattctctagggaacaagagaattagtttaggtagcgtctaaaattccgcccagctctcatttggttctcatttgaccattttataatcattattttggtctcatttttattcttcttattcatcccatgaactagatcaacttgtattattttactagatcaacctgtattattaacgtcatttacatgtaaattgatgggattcagatattttatcaactgtttttccattagtgattttaagtaattttaaagaaggaaaattatattacagataataaaaatgaaagaaagttataaatattggacatggcttttttaaatgggaaagtcttcttaagcaccaatataagcaccttaaattgatacatagaaaagaatgacataacgttttgtggtctttgttctcttaaatatgaatatagctagttagcctaaaatttacacaaaatgtattcaagatcaaattagtgaacaaagcaatggttcgtatggctaatttaaaagcaattcaatttaccaatattaaaataattataaaatgtaaaagaaatttcagaggagttgattgaaaattttttgttcagtaattattcttaaactgcattcttaggtttattacataaatatagttgccagattgccatgggcaagtgaatgtcttcatttgaaatattattagagatcaatgtggcttgttatttttaatttttttctggctatacagaaaatgtttctggaaaaattccttaattgtcatctgatataatgtagagattgaggccagacgcagtggctcacgcctgtaatcccagcactttgggaggccaaggtgggcagatcacctgaggtcaggagttcgagaccagcctgatgaacatggcaaatccccttctgtactaaaaatacaaaaattagccaggcgcagtggctcacgcctgtaatcccaacactttgggaggccgaggcgggcggatcacgaggtcaggagatcaagaccgtcctggctaacatggtgagaccctgtctctactaaaaacaaaaaaattagttgggcatggtggcgggcacctgtagtcccagccactcgggaggctgaggcaggagaatggcgtgaacccgggaggcggagcttgcagtgagctgagatcgcaccgctgcactccagcctgggcaacggagcgagactctatctcaaaaaaaaaaaaagaaaaaaaaaaaagtagagattgcattagttccatatctccgcagagttctctggtagattaaatgttctctgtgcactaggccaaggaagttcctgttacctttgaaaatcattgtgtttgctctgattgtctacattagctcatatcagtcttttgaacactggttcaaatctgggtgttgggttaggatctgatgagtagagaatagtggaaagttgatataggaaggtatactggtttctggtgtgattctttagctacatttattccttgtcttatgtcatttcactggatcatgtaactgtcctggctttcagaaattatattagatgcccagcctttctcattcagagatgcctgtattattatgttatttcgattgcctaccaaaaaaaaaaaaaaaagaaaaggtttgtttttagttctctgcctctgcaagtctttgtgatcacatttgttaaattgaatctgagattcaaatatttcatttaatattttctgggttttgataatgggatattctgtaagataaagcaagtaatcctagagtgatttactttatgtttagccatccaccattttcctatttctctactcctcccattctccatttttaaaaggaaattaacaaatgtcttcctttatccctgcctcagataatttttccctgaactcatcttgtcagcagaaacatttaatgtgaaataattctgtatttctgagacaagatcaacacagtagttctttacattgagctgaggtgaatgtatacttaaaaatactctattttctttttatatgaacttaaaatttttaaaatcatatatgggactccccaatgtgaaaatattagtctggacattctcttgccatcaggtgctatttctaccttagctgtgagttagactaaatccaaatttcgtatcattcatctttttataatatttaacttccctagaatcaccccatttcatgtctttaaccccaacttccaacaacttttctgcttttattttcaaatgtcaaattgtatttttgtgttttattttctcattgaagtgtaaaagtatcacatatatgaaggaatggctggtttagacatttactttggcatagtaaagattgatattgataccacccaccatcctttcctctagccccagaaagaaaagtttgacaactcaaaaacgattaaattatcttatcttgttatttaatagaacaatggaagctgtttcgtcaaaattaaaatactttaccaaaaaaatacttttttgtattttaatctgatagtgaatttggggattatttatgtaaatgtatcataattaatagtaattatgagttatttcactctctgtaatttgtgatacccaagattcatatttatttaatgtgaggtgttttttgaggcttttttgttttatcttgttttcttaactttttacagtgttgttagattatcgcggtcatctcggcatgtggatcgctcctcctgtagatcagctgttctctcttagagtcaggacaaggaggtttttgctacatggtcgtagttggataatacagcattattctgaactatctgaaattgctggttttattggtcaaaaatgatcagatgctagcaatttcataatagatatattcaagaaggaaccaaactttaaaagatcttttagaataggtatgttaacttctcatcctaaccctatcaatatatcagaggctttatgaaggagactctacagataaccacaaatcttatcaagaaaattctccttaaaaaaagttatcctttattttgttgttaaatttcccagtttttaaaagtgttttatcaaaatgacttcataattgaagcaaataccttttggaagtatatatgttacataagactttcactaaatctgtgcgtaaagcttttataatctgagatattgttatgtattaggtttgtgcaaacctaatataaaagggttcatctgtaagtatcatttagaggcaaaataatttccccctcacatctaatgtggactcaaattttggcaactggaatgttatcctcttggtaggcattctaaattaatgaatactgctatgtggtgtagtaaacaaatttgccataaaatgccatttaaggattttctttttacctttatttcattataaaagtatatgagttgaagatcatataaaaaatatgaaactcctacacaggaaatccccaattttgtgatttaataggttgtaaaaagagttgttccaaattcagactacatctcatcatataaataatattatgaataataagggtaaaagattagccaacaaaagctaatctagtacaccccatagaggtactccaggtgtcttggttttggataaatttttatagtggagaaaggttactttgatctctcaataattgcttggtacacttcttcctaggcaatatgctcatgataccctcttcatgtgacctattcctcaaatgctgcattctccaaaacttccttacctgccttctatcccctagtcattcttatcaatacttccaaaatataacctatctcaagtgttagaaatttgctttaactaatttatattaaagtgttagtgactatagcccttttatctctcttaaagagaaatctgcattaaaagcaaacacattgctgttagctcaaattaatgtcagtgagtagaatcttaagctttaaaacaaaagtggaaataatttaaattagtgttgatgggactattttgaggcaagagataccattaagtgacctagcttggaaatctgccccctttgcccaaacccatgtgatgtctgaaactactgtatattttcaatgaccttgagaaagggagctagtcatttgtatttatgggccttatgaagtcagggcctgctgatcctgttttttaagttcaagcgcaatgcctgaagcatcctagatctccttcaccctcattctacctgacagacagctaggtctgtcttccagctctttctcattgatactacctttacatatgaatactatccatgcttgttaaaaaaaaaaaaagtctttccccattttactgttacaatttttcaagagctataaaggtagaaaaagtattccttttcattattctaaaaaatatgtcatttttaaatagctggcacttagcagtttagttttccaaactttattctgaatcaaattgctgaggtgattctaaatgtctaatgttgatttatcatataaacatctaattagaaagtgtttatgctaaagacttgtattttgtggcattagttcttcatgtttcttttttatatgtttattaaaattgttcacttccaaatgagtggaaaagttgctgttgttgggatgtacagggcaagtgcacttggttagagcatgaactgggaatttcacattctctgatgtgctttgcactctgctcttgtagatttattttgtttacagtagactgatgtcagtttttgtaaatgttttttcttagcactttaactgtgagtgtacaaactgattttaaatgtagtggttgtatattttggttataaattggagatttttaataaaattaaataattctcttttctgtcaaaaaaaaaaaaaaaaaa

SEQ ID NO: 2305 - DNA, 2397 bp, Homo sapiens
gcaagaactgaaacgaatggggattgaactgctttgcctgttctttctatttctaggaaggaatgatcacgtacaaggtggctgtgccctgggaggtgcagaaacctgtgaagactgcctgcttattggacctcagtgtgcctggtgtgctcaggagaattttactcatccatctggagttggcgaaaggtgtgataccccagcaaaccttttagctaaaggatgtcaattaaacttcatcgaaaaccctgtctcccaagtagaaatacttaaaaataagcctctcagtgtaggcagacagaaaaatagttctgacattgttcagattgcgcctcaaagcttgatccttaagttgagaccaggtggtgcgcagactctgcaggtgcatgtccgccagactgaggactacccggtggatttgtattacctcatggacctctccgcctccatggatgacgacctcaacacaataaaggagctgggctcccggctttccaaagagatgtctaaattaaccagcaactttagactgggcttcggatcttttgtggaaaaacctgtatcccctttcgtgaaaacaacaccagaagaaattgccaacccttgcagtagtattccatacttctgtttacctacatttggattcaagcacattttgccattgacaaatgatgctgaaagattcaatgaaattgtgaagaatcagaaaatttctgctaatattgacacacccgaaggtggatttgatgcaattatgcaagctgctgtgtgtaaggaaaaaattggctggcggaatgactccctccacctcctggtctttgtgagtgatgctgattctcattttggaatggacagcaaactagcaggcatcgtcattcctaatgacgggctctgtcacttggacagcaagaatgaatactccatgtcaactgtcttggaatatccaacaattggacaactcattgataaactggtacaaaacaacgtgttattgatcttcgctgtaacccaagaacaagttcatttatatgagaattacgcaaaacttattcctggagctacagtaggtctacttcagaaggactccggaaacattctccagctgatcatctcagcttatgaagaactgcggtctgaggtggaactggaagtattaggagacactgaaggactcaacttgtcatttacagccatctgtaacaacggtaccctcttccaacaccaaaagaaatgctctcacatgaaagtgggagacacagcttccttcagcgtgactgtgaatatcccacactgcgagagaagaagcaggcacattatcataaagcctgtggggctgggggatgccctggaattacttgtcagcccagaatgcaactgcgactgtcagaaagaagtggaagtgaacagctccaaatgtcaccacgggaacggctctttccagtgtggggtgtgtgcctgccaccctggccacatggggcctcgctgtgagtgtggcgaggacatgctgagcacagattcctgcaaggaggccccagatcatccctcctgcagcggaaggggtgactgctactgtgggcagtgtatctgccacttgtctccctatggaaacatttatgggccttattgccagtgtgacaatttctcctgcgtgagacacaaagggctgctctgcggaggtaacggcgactgtgactgtggtgaatgtgtgtgcaggagcggctggactggcgagtactgcaactgcaccaccagcacggactcctgcgtctctgaagatggagtgctctgcagcgggcgcggggactgtgtttgtggcaagtgtgtttgcacaaaccctggagcctcaggaccaacctgtgaacgatgtcctacctgtggtgacccctgtaactctaaacggagctgcattgagtgccacctgtcagcagctggccaagcccgagaagaatgtgtggacaagtgcaaactagctggtgcgaccatcagtgaagaagaagatttctcaaaggatggttctgtttcctgctctctgcaaggagaaaatgaatgtcttattacattcctaataactacagataatgaggggaaaaccatcattcacagcatcaatgaaaaagattgtccgaagcctccaaacattcccatgatcatgttaggggtttccctggctattcttctcatcggggttgtcctactgtgcatctggaagctactggtgtcatttcatgatcgtaaagaagttgccaaatttgaagcagaacgatcaaaagccaagtggcaaacgggaaccaatccactctacagaggatccacaagtacttttaaaaatgtaacttataaacacagggaaaaacaaaaggtagacctttccacagattgctagaactactttatgca

SEQ ID NO: 2306 - DNA, 1980 bp, Homo sapiens; identical to SEQ ID NO: 819

SEQ ID NO: 2307 - DNA, 2020 bp, Homo sapiens
gctgtcatttgctctctgactctcagagagggaggcacgctttcctggagctcctggtgacagaacaggtgtttgctgtctggacctggctgctgatcctgagcctgctgggagatcttaacgatccccaggagcaacatggggcccaccctagcggttcccaccccctatggctgtattggctgtaagctaccccagccagaatacccaccggctctaatcatctttatgttctgcgcgatggttatcaccatcgttgtagacctaatcggcaactccatggtcattttggctgtgacgaagaacaagaagctccggaattctggcaacatcttcgtggtcagtctctctgtggccgatatgctggtggccatctacccataccctttgatgctgcatgccatgtccattgggggctgggatctgagccagttacagtgccagatggtcgggttcatcacagggctgagtgtggtcggctccatcttcaacatcgtggcaatcgctatcaaccgttactgctacatctgccacagcctccagtacgaacggatcttcagtgtgcgcaatacctgcatctacctggtcatcacctggatcatgaccgtcctggctgtcctgcccaacatgtacattggcaccatcgagtacgatcctcgcacctacacctgcatcttcaactatctgaacaaccctgtcttcactgttaccatcgtctgcatccacttcgtcctccctctcctcatcgtgggtttctgctacgtgaggatctggaccaaagtgctggcggcccgtgaccctgcagggcagaatcctgacaaccaacttgctgaggttcgcaattttctaaccatgtttgtgatcttcctcctctttgcagtgtgctggtgccctatcaacgtgctcactgtcttggtggctgtcagtccgaaggagatggcaggcaagatccccaactggctttatcttgcagcctacttcatagcctacttcaacagctgcctcaacgctgtgatctacgggctcctcaatgagaatttccgaagagaatactggaccatcttccatgctatgcggcaccctatcatattcttctctggcctcatcagtgatattcgtgagatgcaggaggcccgtaccctggcccgcgcccgtgcccatgctcgcgaccaagctcgtgaacaagaccgtgcccatgcctgtcctgctgtggaggaaaccccgatgaatgtccggaatgttccattacctggtgatgctgcagctggccaccccgaccgtgcctctggccaccctaagccccattccagatcctcctctgcctatcgcaaatctgcctctacccaccacaagtctgtctttagccactccaaggctgcctctggtcacctcaagcctgtctctggccactccaagcctgcctctggtcaccccaagtctgccactgtctaccctaagcctgcctctgtccatttcaaggctgactctgtccatttcaagggtgactctgtccatttcaagcctgactctgttcatttcaagcctgcttccagcaaccccaagcccatcactggccaccatgtctctgctggcagccactccaagtctgccttcagtgctgccaccagccaccctaaacccaccactggccacatcaagccagctaccagccatgctgagcccaccactgctgactatcccaagcctgccactaccagccaccctaagcccactgctgctgacaaccctgagctctctgcctcccattgccccgagatccctgccattgcccaccctgtgtctgacgacagtgacctccctgagtcggcctctagccctgccgctgggcccaccaagcctgctgccagccagctggagtctgacaccatcgctgaccttcctgaccctactgtagtcactaccagtaccaatgattaccatgatgtcgtggttattgatgttgaagatgatcctgatgaaatggctgtgtgaaaaatgctctcgtaggtggccaggcagt

SEQ ID NO: 2308 - DNA, 7550 bp, Homo sapiens
aattgagctggagaggaggcagcgtgagagcagaaacttcagacgccgctgatccgggaggagctggggtgagccgcggcggccgtctctcccacccgcagcagcatcctctctgcccttctctgccaccccggggagagccgggagctgcctctttacagcttccacgagccaggggtgcaggcagctgcccccaggaagtttgggcttctgcgtagtttaggggtgcctgcgagcgccccagagggcgaggggccgagggcgatgttgggcgccgcgcggggctgggggcgcccagaagacgtgcgagtgtccgcggtcctgctgctgtctccagtaccctccgcatcccccaagtgatgggaacaagggcccgcccaggcagccgctgtcgccgcaccgccccctcgctcgctctctgcgcgcggagtcacccagtcacactcccggcaccccgagcccttcctccggagctgctgcttctactttggctgctatcgccgccgccgcgggtggcccgctgctgactgggctcgccgggagacggagaagcactttttggccctccctcagcagctctcacaccccaactttgccgccgccgccgcgcctgccctcgcagcggcgctcggccgcacattgtgggggcgcacgccgggaggctccgcaagaccgtggaggcaggaaacggcactactgcgcttctgcctcggctctttgttgttcgctttggatggttcttgaaagtgtctgagcctcctcggaaatcctggggccggagaagacaaaccttggaattcttcctctgcaaaagtctctgagatactgacaagcgtccggaaaggtcgacgagtaattgccctgaaaactcttggctaattgacccacgttgcttatattaagcctttgtgtgtggtgtgtggcttcatacatttggggaccctatttccactccctcctcttggcatgagactgtatacaggatccacccgaggacaatgattgcggagcccgctcacttttacctgtttggattaatatgtctctgttcaggctcccgtcttcgtcaggaagattttccacctcgcattgttgaacacccttcagacctgattgtctcaaaaggagaacctgcaactttgaactgcaaagctgaaggccgccccacacccactattgaatggtacaaagggggagagagagtggagacagacaaagatgaccctcgctcacaccgaatgttgctgccgagtggatctttatttttcttacgtatagtacatggacggaaaagtagacctgatgaaggagtctatgtctgtgtagcaaggaattaccttggagaggctgtgagccacaatgcatcgctggaagtagccatacttcgggatgacttcagacaaaacccttcggatgtcatggttgcagtaggagagcctgcagtaatggaatgccaacctccacgaggccatcctgagcccaccatttcatggaagaaagatggctctccactggatgataaagatgaaagaataactatacgaggaggaaagctcatgatcacttacacccgtaaaagtgacgctggcaaatatgtttgtgttggtaccaatatggttggggaacgtgagagtgaagtagccgagctgactgtcttagagagaccatcatttgtgaagagacccagtaacttggcagtaactgtggatgacagtgcagaatttaaatgtgaggcccgaggtgaccctgtacctacagtacgatggaggaaagatgatggagagctgcccaaatccagatatgaaatccgagatgatcataccttgaaaattaggaaggtgacagctggtgacatgggttcatacacttgtgttgcagaaaatatggtgggcaaagctgaagcatctgctactctgactgttcaagttgggtctgaacctccacattttgttgtgaaaccccgtgaccaggttgttgctttgggacggactgtaacttttcagtgtgaagcaaccggaaatcctcaaccagctattttctggaggagagaagggagtcagaatctacttttctcatatcaaccaccacagtcatccagccgattttcagtctcccagactggcgacctcacaattactaatgtccagcgatctgatgttggttattacatctgccagactttaaatgttgctggaagcatcatcacaaaggcatatttggaagttacagatgtgattgcagatcggcctcccccagttattcgacaaggtcctgtgaatcagactgtagccgtggatggcactttcgtcctcagctgtgtggccacaggcagtccagtgcccaccattctgtggagaaaggatggagtcctcgtttcaacccaagactctcgaatcaaacagttggagaatggagtactgcagatccgatatgctaagctgggtgatactggtcggtacacctgcattgcatcaacccccagtggtgaagcaacatggagtgcttacattgaagttcaagaatttggagttccagttcagcctccaagacctactgacccaaatttaatccctagtgccccatcaaaacctgaagtgacagatgtcagcagaaatacagtcacattatcgtggcaaccaaatttgaattcaggagcaactccaacatcttatattatagaagccttcagccatgcatctggtagcagctggcagaccgtagcagagaatgtgaaaacagaaacatctgccattaaaggactcaaacctaatgcaatttaccttttccttgtgagggcagctaatgcatatggaattagtgatccaagccaaatatcagatccagtgaaaacacaagatgtcctaccaacaagtcagggggtggaccacaagcaggtccagagagagctgggaaatgctgttctgcacctccacaaccccaccgtcctttcttcctcttccatcgaagtgcactggacagtagatcaacagtctcagtatatacaaggatataaaattctctatcggccatctggagccaaccacggagaatcagactggttagtttttgaagtgaggacgccagccaaaaacagtgtggtaatccctgatctcagaaagggagtcaactatgaaattaaggctcgccctttttttaatgaatttcaaggagcagatagtgaaatcaagtttgccaaaaccctggaagaagcacccagtgccccaccccaaggtgtaactgtatccaagaatgatggaaacggaactgcaattctagttagttggcagccacctccagaagacactcaaaatggaatggtccaagagtataaggtttggtgtctgggcaatgaaactcgataccacatcaacaaaacagtggatggttccaccttttccgtggtcattccctttcttgttcctggaatccgatacagtgtggaagtggcagccagcactggggctgggtctggggtaaagagtgagcctcagttcatccagctggatgcccatggaaaccctgtgtcacctgaggaccaagtcagcctcgctcagcagatttcagatgtggtgaagcagccggccttcatagcaggtattggagcagcctgttggatcatcctcatggtcttcagcatctggctttatcgacaccgcaagaagagaaacggacttactagtacctacgcgggtatcagaaaagtaacttaccagagaggaggcgaagctgtcagcagtggagggaggcctggacttctcaacatcagtgaacctgccgcgcagccatggctggcagacacgtggcctaatactggcaacaaccacaatgactgctccatcagctgctgcacggcaggcaatggaaacagcgacagcaacctcactacctacagtcgcccagctgattgtatagcaaattataacaaccaactggataacaaacaaacaaatctgatgctccctgagtcaactgtttatggtgatgtggaccttagtaacaaaatcaatgagatgaaaaccttcaatagcccaaatctgaaggatgggcgttttgtcaatccatcagggcagcctactccttacgccaccactcagctcatccagtcaaacctcagcaacaacatgaacaatggcagcggggactctggcgagaagcactggaaaccactgggacagcagaaacaagaagtggcaccagttcagtacaacatcgtggagcaaaacaagctgaacaaagattatcgagcaaatgacacagttcctccaactatcccatacaaccaatcatacgaccagaacacaggaggatcctacaacagctcagaccggggcagtagtacatctgggagtcaggggcacaagaaaggggcaagaacacccaaggtaccaaaacagggtggcatgaactgggcagacctgcttcctcctcccccagcacatcctcctccacacagcaatagcgaagagtacaacatttctgtagatgaaagctatgaccaagaaatgccatgtcccgtgccaccagcaaggatgtatttgcaacaagatgaattagaagaggaggaagatgaacgaggccccactccccctgttcggggagcagcttcttctccagctgccgtgtcctatagccatcagtccactgccactctgactccctccccacaggaagaactccagcccatgttacaggattgtccagaggagactggccacatgcagcaccagcccgacaggagacggcagcctgtgagtcctcctccaccaccacggccgatctcccctccacatacctatggctacatttcaggacccctggtctcagatatggatacggatgcgccagaagaggaagaagacgaagccgacatggaggtagccaagatgcaaaccagaaggcttttgttacgtgggcttgagcagacacctgcctccagtgttggggacctggagagctctgtcacggggtccatgatcaacggctggggctcagcctcagaggaggacaacatttccagcggacgctccagtgttagttcttcggacggctcctttttcactgatgctgactttgcccaggcagtcgcagcagcggcagagtatgctggtctgaaagtagcacgacggcaaatgcaggatgctgctggccgtcgacattttcatgcgtctcagtgccctaggcccacaagtcccgtgtctacagacagcaacatgagtgccgccgtaatgcagaaaaccagaccagccaagaaactgaaacaccagccaggacatctgcgcagagaaacctacacagatgatcttccaccacctcctgtgccgccacctgctataaagtcacctactgcccaatccaagacacagctggaagtacgacctgtagtggtgccaaaactcccttctatggatgcaagaacagacagatcatcagacagaaaaggaagcagttacaaggggagagaagtgttggatggaagacaggttgttgacatgcgaacaaatccaggtgatcccagagaagcacaggaacagcaaaatgacgggaaaggacgtggaaacaaggcagcaaaacgagaccttccaccagcaaagactcatctcatccaagaggatattctaccttattgtagacctacttttccaacatcaaataatcccagagatcccagttcctcaagctcaatgtcatcaagaggatcaggaagcagacaaagagaacaagcaaatgtaggtcgaagaaatattgcagaaatgcaggtacttggaggatatgaaagaggagaagataataatgaagaattagaggaaactgaaagctgaagacaaccaagaggcttatgagatctaatgtgaaaatcatcactcaagatgcctcctgtcagatgacacatgacgccagataaaatgttcagtgcaatcagagtgtacaaattgtcgtttttattcctcttattgggatatcattttaaaaactttattgggtttttattgttgttgtttgatccctaaccctacaaagagccttcctattcccctcgctgttggagcaaaccattataccttacttccagcaagcaaagtgctttgacttcttgcttcagtcatcagccagcaagagggaacaaaactgttcttttgcattttgccgctgagatatggcattgcactgcttatatgccaagctaatttatagcaagatattgatcaaatatagaaagttgatattcaacctcacaagggctctcaaagtataatctttctatagccaactgctaatgcaaattaaaacatatttcattttaacatgatttcaaaatcagtttttcatactaccctttgctggaagaaactaaaaatatagcaaatgcagaaccacaaacaattcgaatggggtagaaacattgtaaatatttactctttgcaaaccctggtggtattttattttggcttcatttcaatcattgaagtatattcttattggaaatgtacttttggataagtagggctaagccagttggatctctggttgtctagtcattgtcataagtaaacctagtaaaaccttgttctatttttcaatcatcaaaaagtaattataaatacgtattacaaacaagtggatgtttttaatgaccaattgagtaagaacatccctgtcttaactggcctaaatttcttctggtagtgtcagttcaactttcagaagtgccacttaaggaagtttgatttttgtttttgtaatgcactgtttttaatctctctctctttttttttttttttttggttttaaaagcacaatcactaaactttatttgtaaaccattgtaactattaaccttttttgtcttattgaaaaaaaaaatgttgagaagcgtttttaacctgttttgttaatgctctatgtttgtatttggaatatttgaataatgacagatggtgaagtaacatgcatactttattgtgggccatgaaccaaatggttcttacttttcctggacttaaagaaaaaaagaggtttaagtttgttgtggccaatgtcgaaacctacaagatttccttaaaatctctaatagaggcattacttgctttcaattgacaaatgatgccctctgactagtagatttctatgatccttttttgtcattttatgaatatcattgattttataattggtgctatttgaagaaaaaaatgtacatttattcatagatagataagtatcaggtctgaccccagtggaaaacaaagccaaacaaaactgaaccacaaaaaaaaaggctggtgttcaccaaaaccaaacttgttcatttagataatttgaaaaagttccatagaaaaggcgtgcagtactaagggaacaatccatgtgattaatgttttcattatgttcatgtaagaagccccttatttttagccataattttgcatactgaaaatccaataatcagaaaagtaattttgtcacattatttattaaaaatgttctcaaatacataaaaaaaaaaaaaaaaaaaaaaaaaaaaaaaaaaaaaaaaaaaaaaaaaaaaaaaa

SEQ ID NO: 2309 - DNA, 4918 bp, Homo sapiens
ccaccgactcctgcccgcctcaacacaatgccttacctgtgaagcttgaggccactcaagttccaaatttgtgacaaatcccccagggctcactggagtggcagatatagacctgcagctaactggatttgatttataagagagaaatctgcagtcaatgcccactcttgccacactgctaatatggaaaacagaatgttcaataggatatggtctgataaatagtgatgattgaagatgctgctccaatacatgtgaaatcaatgggagatatctgctgtctgaagatctttcagagcttttctcgacaagctcccctgtaagaaatcggaggtatattctaccattatacagtctttctcaagtggatataaatacgtttgcctcactgtaaccagacaactagacaactaatgtgggaccatggcactgcccagatgcacgtggccaaattatgtttggagagcagtgatggcatgcttggtacaccggggattgggtgccccattgactctctgtatgttgggatgtttgcttcaggctggccatgtgctatcacaaaaattggatgatgtggacccactggtggctaccaactttggaaagataagagggattaagaaggaactcaataatgaaattttggggcctgttattcaatttcttggggttccatatgcagccccaccaacaggggaacgtcgttttcagcctccagaaccaccatctccctggtcagatatcagaaatgccactcaatttgctcctgtgtgtccccagaatatcattgatggcagattgccagaagtcatgcttcctgtgtggtttactaataacttggatgtggtttcatcatatgtgcaagaccagagcgaagactgcctatatttaaatatatatgtcccgactgaggatgatattcgggacagtgggggtcccaaaccagtgatggtgtatatccatggtggctcatatatggaaggtactggaaatttatatgatggaagtgtcttggcaagttatggcaatgtgatcgtcatcacagtcaactatcgacttggagtactcggtttcttgagtacaggcgatcaggctgcaaaggggaactatggactccttgatctcatacaagctttaagatggactagtgaaaacattggattctttggtggtgaccccttaagaatcactgtttttggatctggtgctgggggttcatgtgtcaacctgctgactttatcccattattctgaaggtaaccgttggagcaattcaaccaaaggactttttcaacgagcaatagctcaaagtggaacagccctttccagctgggctgttagttttcaacctgcaaaatatgctagaatgttggccacaaaagttggttgcaatgtttcagatacagtagagttagtggaatgcctacagaagaagccttacaaagaacttgttgaccaagatattcaaccagctcgataccacatagcctttggacctgtgattgatggtgatgtaataccagacgacccccagatattgatggagcaaggagagtttctcaactatgatataatgttaggagtgaaccaaggggaagggttaaaatttgttgaaaatatagtagatagcgatgatggtatatcagctagtgattttgactttgctgtttcaaattttgttgataatttatatggatatcctgaaggcaaagatgttttgagagaaaccattaagttcatgtatactgactgggctgaccgtcataaccctgaaaccagaagaaagacattactggctttgtttacggaccatcagtgggtggcaccagctgtagccacagcggatcttcactcaaactttggttcacctacgtacttctatgccttttaccatcattgccaaacagatcaggttccagcttgggctgatgcagcccacggagacgaggttccctatgtactgggaatccccatgattggccctacagagttatttccttgcaatttctccaaaaatgatgtgatgctgagtgcagttgtaatgacatactggacaaattttgctaaaactggtgacccaaatcaaccagtccctcaagacacgaaattcattcataccaaacccaaccgttttgaagaagtagcatggaccagatattcccagaaagaccaactttatctccatattggattaaaaccaagagttaaagaacattacagagccaataaggtgaacctctggttggagttggtacctcatctgcataatctcaatgacatttctcagtatacctctacaacaactaaagtgccatcaactgacatcactttcagacctacgagaaaaaattctgtacctgtcacgtcagcctttcccactgccaagcaggatgatcccaaacaacaaccaagtccattttcagtggatcaaagggactactcaacagagctgagtgtcactattgcagttggagcatcactgctgtttctgaacatcttggcctttgcagccctgtactacaaaaaggataagaggagacatgatgttcacaggagatgcagccctcagcgcactactaccaatgatctaacccatgcacaagaagaggaaatcatgtccctccaaatgaagcacactgatttggatcatgaatgtgagtccattcatccacatgaggtggttcttcggaccgcctgtcccccagattacacactagctatgaggaggtcacctgatgatgttcccttaatgacacccaacaccattacaatgattcccaacactataccagggattcagcccttacacacattcaatacatttactggaggacagaacaatactctgccccatccccatccccacccccattcacattcaacaaccagggtatagccagataagagaaacaaactattttttttgatggattgcagtaaacgatcactgaagattccttggctttcaacctacaagacttactatttaaataaggaggaatattatgtgaatatacatatcaagaactttgggggttttgaaaaaaatgaattgtatatatacaaatcaactttaaaaacaaatttcaattgcttgaagcaattgttctgaatgatactttttcattcacattcaagaattaattttttgaagatttaagttacataatggaattaggcatgtggaacaccaaacaggaaagaactatgtctgaaatataaaaaataaaaataaaaaaacaactatgaatatgcacaagggacacaccagtggaatgtcagataattttcaccagtttttatttggagccgttttattgtgtagaccatatttacatatttggataagtacacaaagcgtcaatgctgttaatggccttagcaaaggctcatgctgaaatttgccagtaaaacaaagaagtttaaagactggcaggtacaccattatcacataagtgctgtcagtataaagttgtggggataaaggaaactggatatttttagcacgatgtgcatgataatttatatgcttggtggctgtgctgctgattaagccgtaattaaaattcttctcatcccattggagtttttaatagaagcttcctccatcaattggcagaacctaaagaagattttaaggggcaaaagtaattacaataaaataattcacagtagtttcaatatagaaggaattagctattaaaggtatttgaagaaactataggtatagtggtgaatactcgctgatatgaatcccagaaaaaaatttcctgtttttaatgttcttttcaatcccatctagataatttatagaaatataaccctaattggacatgtggtacaggatctataagttgctgtgtttttttgttactctgtattttgttccttttggtaaggtgaagtgtgtccaaagagttacttgcaacagtctttcatgatatgaggatgcccccgtattaccactctgattatagttctgagttctttgatttactcatgctgcatgacaaaatgtttactaataacaattcattataaagttatatccctctttacatcacttatctttctcactgaggttcattcactggaatttactcacgcaatctcagtagagtacaacgtagatacagaacctaggagagtcaacatctggaggattttagtctttcttacacatatgtgtgattttaaacgaatattctcagaccacaggaaactcttcatccccctgttgtttaccagtaacagtatatcacagacctttccaaatgtttgtatatgtaatcagatgtacatttatattgaaaaacaaatgagatggacttaaagagcacatcctgataaatactttctctctcacctgtactatatttctattagactaaagttatgtgattttttttttacattttttcagatgactagcaattttgatagtttataagataatgcaaagaactttctctgacaaactaactgcagtaacagaaacctttcttttcagttactctttttcaagaatgaaagattattatacaaaaaattgtatactacttgatggaaccaactttgtacatcttggccatgtcactggtcattgtgtgaaataaagataatctggataatgactattagtccaatgctaagaaacatgatctttgctcattaaagagctaaaatgtttattgctgttttgtctttcttttttctaaaaaaagaaaaaaaagaaaaaaaggaaaagaagaacaaagaaacatgactgtctcaaagagtaatttttctagattagaccagtcaggtttttgaagacatataggtaacttccacagaaaacacaaacatgtatttaaaggcaagtctcatctaagatgaaactcataaaaattatttaatgtttgttatgaatttaaaag

SEQ ID NO: 2310 - DNA, 983 bp, Homo sapiens; identical to SEQ ID NO: 116

SEQ ID NO: 2311 - DNA, 16737 bp, Homo sapiens; identical to SEQ ID NO: 2299

SEQ ID NO: 2312 - DNA, 2070 bp, Homo sapiens
ctgaagagccggtgcagagcgggcggcggcggcggcggcagcggaggcggcggctccagccggcgcggcgcgaggctcggcggtgggatccggcgggcggtgctagctccgcgctccctgcctcgctcgctgccgggggcggtcggaaggcgcggcgcgaagcccgggtggcccgagggcgcgactctagccttgtcacctcatcttgcccccttggttttggaagtcctgaagagttggtctggaggaggaggaggacattgatgtgcttggtgtgtggccagtggtgaagagatggctgctcctgtcccgtgggcctgctgtgctgtgcttgccgccgccgccgcagttgtctacgcccagagacacagtccacaggaggcaccccatgtgcagtacgagcgcctgggctctgacgtgacactgccatgtgggacagcaaactgggatgctgcggtgacgtggcgggtaaatgggacagacctggcccctgacctgctcaacggctctcagctggtgctccatggcctggaactgggccacagtggcctctacgcctgcttccaccgtgactcctggcacctgcgccaccaagtcctgctgcatgtgggcttgccgccgcgggagcctgtgctcagctgccgctccaacacttaccccaagggcttctactgcagctggcatctgcccacccccacctacattcccaacaccttcaatgtgactgtgctgcatggctccaaaattatggtctgtgagaaggacccagccctcaagaaccgctgccacattcgctacatgcacctgttctccaccatcaagtacaaggtctccataagtgtcagcaatgccctgggccacaatgccacagctatcacctttgacgagttcaccattgtgaagcctgatcctccagaaaatgtggtagcccggccagtgcccagcaaccctcgccggctggaggtgacgtggcagaccccctcgacctggcctgaccctgagtcttttcctctcaagttctttctgcgctaccgacccctcatcctggaccagtggcagcatgtggagctgtccgacggcacagcacacaccatcacagatgcctacgccgggaaggagtacattatccaggtggcagccaaggacaatgagattgggacatggagtgactggagcgtagccgcccacgctacgccctggactgaggaaccgcgacacctcaccacggaggcccaggctgcggagaccacgaccagcaccaccagctccctggcacccccacctaccacgaagatctgtgaccctggggagctgggcagcggcgggggaccctcggcacccttcttggtcagcgtccccatcactctggccctggctgccgctgccgccactgccagcagtctcttgatctgagcccggcaccccatgaggacatgcagagcacctgcagaggagcaggaggccggagctgagcctgcagaccccggtttctattttgcacacgggcaggaggaccttttgcattctcttcagacacaatttgtggagaccccggcgggcccgggcctgccgccccccagccctgccgcaccaagctggccctccttcctccctcaggggaggtgggccatgcagctaacccacccaccaaagaccccctcaccctggccccttgggctggaccctccaatgccagcgactcccaggagcccttgggggacgtgaggggagcctctcacatccgatttctcctcctgccccagcctcctgtctatcccagggtctctgttgccaccatcagattataagctcctgatgctgggggggcccagccatccccctccccccagcacccacaattttcagtcccctcccctctgccctgttttgtatacccctcccctgaccctgctcctatcccacagtatttaatgccctgtcagtcccttctagtctgactcaatggtaacttgctgtatttgaattttttatagatgtatatacagggtggggggagtgggcggttctcattaaacgtcaccatttcatgagaaaaaaaaaaaaaaaaaa

SEQ ID NO: 2313 - DNA, 7874 bp, Homo sapiens
tttttttttttttttcctaatttttggtcggcggcggtgctgggccaggggaaggaagggacacggaggccgccctcgtcccgccacctcctacccgcttccccccagccccggctccgggagatgtgccgggcggggggcccgggttcgccgagccgcaggagagacacgctgggccgaccccagagaggcgctggacaggctggtggtccaggccgtggtgcctgccaggtgatgtggggcaaagccccccgcacaggccactgagagctccggacacgcacccggctgccaccatggcccgcctagccgcagtgctctggaatctgtgtgtcaccgccgtcctggtcacctcggccacccaaggcctgagccgggccgggctcccgttcgggctgatgcgccgggagctggcgtgtgaaggctaccccatcgagctgcggtgccccggcagcgacgtcatcatggtggagaatgccaactacgggcgcacggacgacaagatttgcgatgctgaccctttccagatggagaatgtgcagtgctacctgccggacgccttcaagatcatgtcacagaggtgtaacaaccgcacccagtgcgtggtggtcgccggctcggatgcctttcctgacccctgtcctgggacctacaagtacctggaggtgcagtacgactgtgtcccctacaaagtggagcagaaagtcttcgtgtgcccagggaccctgcagaaggtgctggagcccacctcgacacacgagtcagagcaccagtctggcgcatggtgcaaggacccgctgcaggcgggtgaccgcatctacgtgatgccctggatcccctaccgcacggacacactgactgagtatgcctcgtgggaggactacgtggccgcccgccacaccaccacctaccgcctgcccaaccgcgtggatggcacaggctttgtggtctacgatggtgccgtcttctacaacaaggagcgcacgcgcaacatcgtcaagtatgacctacggacgcgcatcaagagcggggagacggtcatcaataccgccaactaccatgacacctcgccctaccgctggggcggaaagaccgacattgacctggcggtggacgagaacgggctgtgggtcatctacgccactgagggcaacaacgggcggctggtggtgagccagctgaacccctacacactgcgctttgagggcacgtgggagacgggttacgacaagcgctcggcatccaacgccttcatggtgtgtggggtcctgtacgtcctgcgttccgtgtacgtggatgatgacagcgaggcggctggcaaccgcgtggactatgccttcaacaccaatgccaaccgcgaggagcctgtcagcctcaccttccccaacccctaccagttcatctcctccgttgactacaaccctcgcgacaaccagctgtacgtctggaacaactatttcgtggtgcgctacagcctggagttcgggccgcccgaccccagtgctggcccagccacttccccacccctcagcacgaccaccacagccaggcccacgcccctcaccagcacagcctcgcccgcagccaccaccccgctccgccgggcacccctcaccacgcacccagtgggtgccatcaaccagctgggacctgatctgcctccagccacagccccagtccccagcacccggcggcccccagccccgaatctacacgtgtcccctgagctcttctgcgagccccgagaggtacggcgggtccagtggccggccacccagcagggcatgctggtggagaggccctgccccaaggggactcgaggaattgcctccttccagtgtctaccagccttggggctctggaacccccggggccctgacctcagcaactgcacctccccctgggtcaaccaggtggcccagaagatcaagagtggggagaacgcggccaacatcgccagcgagctggcccgacacacccggggctccatctacgcgggggacgtctcctcctctgtgaagctgatggagcagctgctggacatcctggatgcccagctgcaggccctgcggcccatcgagcgcgagtcagccggcaagaactacaacaagatgcacaagcgagagagaacttgtaaggattatatcaaggccgtggtggagacagtggacaatctgctccggccagaagctctggagtcctggaaggacatgaatgccacggagcaggtgcacacggccaccatgctcctcgacgtcctggaggagggcgccttcctgctggccgacaatgtcagggagcctgcccgcttcctggctgccaaggagaacgtggtcctggaggtcacagtcctgaacacagagggccaggtgcaggagctggtgttcccccaggaggagtacccgagaaagaactccatccagctgtctgccaaaaccatcaagcagaacagccgcaatggggtggtcaaagttgtcttcatcctctacaacaacctgggcctcttcctgtccacggagaatgccacagtgaagctggccggcgaagcaggcccgggtggccctgggggcgcctctctagtggtgaactcacaggtcatcgcagcatccatcaacaaggagtccagccgcgtcttcctcatggaccctgtcatcttcaccgtggcccacctggaggacaagaaccacttcaatgctaactgctccttctggaactactcggagcgttccatgctgggctactggtcgacccaaggctgccgcctggtggagtccaacaagacccataccacgtgtgcctgcagccacctcaccaacttcgctgtgctcatggctcaccgtgagatctaccagggccgcatcaacgagctgctgctgtcggtcatcacctgggtgggcattgtgatctccctggtctgcttggccatctgcatctccaccttctgcttcctgcgggggctgcagaccgaccgcaacaccatccacaagaacctgtgcatcaacctcttcctggctgagctgctcttcctggtcgggatcgacaagactcagtatgagattgcctgccccatcttcgccggcctgctgcactatttcttcctggctgccttctcctggctgtgcctggagggcgtgcacctctacctgctactagtggaggtgtttgagagcgagtattcccgcaccaagtactactacctgggtggctactgcttcccggccctggtggtgggcatcgcggctgccattgactaccgcagctacggcaccgagaaggcctgctggctccgagtggacaattacttcatctggagtttcatcgggccagtctccttcgttatcgtggtcaacctggtgttcctcatggtgaccctgcacaagatgatccgaagctcatctgtgctcaagcccgactccagccgcctggacaacattaaatcctgggcgctgggggccatcgcgctgctgttcctgctgggcctcacctgggctttcggcctcctcttcatcaacaaggagtcggtggtcatggcctatctcttcaccaccttcaacgccttccagggggtcttcatcttcgtctttcactgcgccttacagaagaaggtgcacaaggagtacagcaagtgcctgcgtcactcctactgctgcatccgctccccacccgggggcactcacggatccctcaagacctcagccatgcgaagcaacacccgctactacacagggacccagagccgaattcggaggatgtggaatgacactgtgaggaaacagacggagtcctccttcatggcgggtgacatcaacagcacccccaccctgaaccgaggtaccatggggaaccacctgctgaccaaccccgtgctgcagccccgtgggggcaccagtccctacaacaccctcatcgccgagtcagtgggcttcaatccctcctcgccccctgtcttcaactccccagggagctaccgggaacccaagcaccccttgggaggccgggaagcctgtggcatggacaccctgcccctgaacggcaacttcaataacagttactccttgcgaagtggggatttccctcccggggatgggggccctgagccgccccgaggccggaacctagccgatgcggcggcctttgagaagatgatcatctcagagctggtgcacaacaacctgcgggggagcagcagcgcggccaagggccctccaccgcctgagccccctgtgccacctgtgccagggggcgggggcgaggaagaggcgggcgggcccgggggtgctgaccgggccgagattgaacttctctataaggccctggaggagcctctgctgctgccccgggcccagtcggtgctgtaccagagcgatctggacgagtcggagagctgcacggccgaggacggcgccaccagccggcccctctcctcccctcctggccgggactccctctatgccagcggggccaacctgcgggactcaccctcctacccggacagcagccctgaggggcccagtgaggccctgcccccaccccctcccgcaccccccggcccccccgaaatctactacacctcgcgcccgccagccctggtggcccggaatcccctgcagggctactaccaggtgcggcgtcctagccacgagggctacctggcagccccaggccttgaggggccagggcccgatggggacgggcagatgcagctggtcaccagtctctgagggcacctcatggaccaggggctggtggcccaggccagggagggaaccctgggcagggctctggtgggagagggagacagatggaggcagtggctggtgggccactctctccaggtgcccctcagccatgggccctacagtcccctcaggggactctaacctgggggcctgaggtgccagggttcacagacagggtttcccaccagccacacgcaccagctctatttgggggaagtgtagtgaggaggagcccagaggaccccaggggagtgaggagggagaacttggaagggtgcagcccacttccagactctcccctctcccacccttctaccctgtgaagggaaatgagggctttagtttcctgggcagggaggggcagcttctgaggttgccaaaggcccccactggatggaacctgttagctgctcctctccgcagccagaaatgctgccggctgcacccagagggagcagtgaggcaggacagatggacaggttcctcctgcgctgtaattccctgctccctggagactgggaaaaggccgcagggcagggggactgggcggtggtggctggtggtttaaaggttgaactttctctgaagctcctttccccttgctcttggtccctgccccgcaagcaaacctgccccctctgcctcccagtgcacccaatgaccccctcccttggggcgactcctgatgaagcacaactccccgcagggcccccagcccacaggggtggccatatttgggcagttcccagtcctgtgggctcggctatctggggagcagattttgggtctggatctccctggggagtgggtcctgggcttggatctttccctagggggccctcttactccttcctctctcctcctccttccccattgctgtaaatatttcaacgaaatggaaaagaaaaaaaaaagacaaaaaaaaaaaaaaagaaaagaaaaaaaatctcatcacttgaagccaccgggagcctgcggcccgggccagcccgggctttctccggagcagagcagcgctgctggcctggcagccaggacttctccgtgtacgtgcatccccagtccccgccggggcgggcgggccgccagagcagctttttacaatccagagacagaaaacaaaatctagatgcaacagcgaaacaaagaacccatttccttcctggcaccctcctttcctgctccgcctgcccggcatcatcagcccttctggggcgtgtacctctcactgcctgccccaggaccagaggcctgtctcccccttccctccccaccggcccgggggagacctcttcacacccaaagatgctttgtcaagatggctgcgctgtccctttgagttcctgcttcttgtatattgctctggggactctcgccggggaagatggggctgatttcccacctagagaggttgatggcagaaggaaaatggggaggcactggggttgtggagggcatgggtatggctgaggagggtgctgggaacggcaaggcggtctgggggatggggaggggcaaaggtgagagatcaccttccctatcctccaccttcccgcagggaagacgaagccaggtgccagggctggggtcgggacacccatgttctgggcggcttgaccccaaatcccagaccccggaagctccaggctcgggatgtgtcctgagcacctgtcccggccccctcctctccagcctgtcaggccagcctccccagcccccttccctcaactctaggggcagcatagccccaggccaccctagcccagcccctgcattgccgtttccccagaggtggcccctccacctctgctctgacctctccccatctctctgcccctccttttctcacaagtgccatgagttttcaaacatcttcgggtctcagcctgctgctgccatgaactttgttgggttaagggggaggggctctaggaaggaactggggggaaggggacaggtaggtggctggagggaccctttttgctgctagaaagcccctcccttctcccggggagctggggctggcttgtccccatcaattaggggagaaggggtcagaccaaagatggtggtttgtcccgtgtaagggaacaggtgtggggaagaggtggggttgggttccaactctggctttttctggtagaaaggcctaacccattacaccagaagaccatgggtgaagtctagatggggaggagaagtgaggccagggacagtcttgccagacgactctgaggagggcaagggacagttccatggcccttcccggactgcactaggctgggagctctgttgtgtggaggggtggtcagaggtctgtgaagagcgggcaggaggcatgagcaggcgaggagctggcctgtcccgggaagcagcccagcctgtggctgcccccgacaccaggaggagggccaggagagttccagggggctgaggcacacagagaggccaacttcctccctgcccagccttccttgtatctctccagactcggacaatcaaagggagagagggtgtatcgggtcctgttccagccggcatcgccgggtggcttccaggcctcagagctgtgtggcagggccccctgctggggctggacatcactgcagtccagtgcaaagccgcccccagagcccaggtgtccccccaacctaaccagacctggtgccttgacgcccccaccccagctgggacggtacagagaagggtcttggtttcctctcctactcccttccttaggctcctgaactcgtttgctcctaaatcttgttaattctttttctctggattttggtttcttttggctttcccttgccttcccctttctctgtctccaacactctttccccatgtctttctggctgtctctatgttcctcttctcttatcctcaactttctgtccattcgggcctcctccccacctcccacgccccagcccctccctccttggtctccttttcgatatgccaaaccaattttgggtcgagtgcatttaacgagaacaaaacaaaaggctcataacaacaagaacgtttcagaaaaaaacaaaaagttttaaaaaaattgttgagtcaaaaagtcaaacaataaagaaattaagatttcttggaatgacaaaaaaaaaaaaaaaaaaa

SEQ ID NO: 2314 - DNA, 5716 bp, Homo sapiens
gtgatgataataatacgcgggcttatataaccgtcttcatcttgcgagcacttcgcagaccgtcgctaatgaatcttggggccggtgtcgggccggggcggcttgatcggcaactaggaaaccccaggcgcagaggccaggagcgagggcagcgaggatcagaggccaggccttcccggctgccggcgctcctcggaggtcagggcagatgaggaacatgactctcccccttcggaggaggaaggaagtcccgctgccaccttatctctgctcctctgcctcctccctgttcccagagctttttctctagagaagattttgaaggcggcttttggattcttcacttctcttgaacaaggaactcactcagagactaacacaaaggaagtaatttcttacctggtcattatttagtctacaataagttcatccttcttcagtgtgaccagtaaattcttcccatactcttgaagagagcataattggaatggagaggtgctgacggccacccaccatcatctaaagaagataaacttggcaaatgacatgcaggttcttcaaggcagaataattgcagaaaatcttcaaaggaccctatctgcagatgttctgaatacctctgagaatagagattgattattcaaccaggatacctaattcaagaactccagaaatcaggagacggagacattttgtcagttttgcaacattggaccaaatacaatgaagtattcttgctgtgctctggttttggctgtcctgggcacagaattgctgggaagcctctgttcgactgtcagatccccgaggttcagaggacggatacagcaggaacgaaaaaacatccgacccaacattattcttgtgcttaccgatgatcaagatgtggagctggggtccctgcaagtcatgaacaaaacgagaaagattatggaacatgggggggccaccttcatcaatgcctttgtgactacacccatgtgctgcccgtcacggtcctccatgctcaccgggaagtatgtgcacaatcacaatgtctacaccaacaacgagaactgctcttccccctcgtggcaggccatgcatgagcctcggacttttgctgtatatcttaacaacactggctacagaacagccttttttggaaaatacctcaatgaatataatggcagctacatcccccctgggtggcgagaatggcttggattaatcaagaattctcgcttctataattacactgtttgtcgcaatggcatcaaagaaaagcatggatttgattatgcaaaggactacttcacagacttaatcactaacgagagcattaattacttcaaaatgtctaagagaatgtatccccataggcccgttatgatggtgatcagccacgctgcgccccacggccccgaggactcagccccacagttttctaaactgtaccccaatgcttcccaacacataactcctagttataactatgcaccaaatatggataaacactggattatgcagtacacaggaccaatgctgcccatccacatggaatttacaaacattctacagcgcaaaaggctccagactttgatgtcagtggatgattctgtggagaggctgtataacatgctcgtggagacgggggagctggagaatacttacatcatttacaccgccgaccatggttaccatattgggcagtttggactggtcaaggggaaatccatgccatatgactttgatattcgtgtgcctttttttattcgtggtccaagtgtagaaccaggatcaatagtcccacagatcgttctcaacattgacttggcccccacgatcctggatattgctgggctcgacacacctcctgatgtggacggcaagtctgtcctcaaacttctggacccagaaaagccaggtaacaggtttcgaacaaacaagaaggccaaaatttggcgtgatacattcctagtggaaagaggcaaatttctacgtaagaaggaagaatccagcaagaatatccaacagtcaaatcacttgcccaaatatgaacgggtcaaagaactatgccagcaggccaggtaccagacagcctgtgaacaaccggggcagaagtggcaatgcattgaggatacatctggcaagcttcgaattcacaagtgtaaaggacccagtgacctgctcacagtccggcagagcacgcggaacctctacgctcgcggcttccatgacaaagacaaagagtgcagttgtagggagtctggttaccgtgccagcagaagccaaagaaagagtcaacggcaattcttgagaaaccaggggactccaaagtacaagcccagatttgtccatactcggcagacacgttccttgtccgtcgaatttgaaggtgaaatatatgacataaatctggaagaagaagaagaattgcaagtgttgcaaccaagaaacattgctaagcgtcatgatgaaggccacaaggggccaagagatctccaggcttccagtggtggcaacaggggcaggatgctggcagatagcagcaacgccgtgggcccacctaccactgtccgagtgacacacaagtgttttattcttcccaatgactctatccattgtgagagagaactgtaccaatcggccagagcgtggaaggaccataaggcatacattgacaaagagattgaagctctgcaagataaaattaagaatttaagagaagtgagaggacatctgaagagaaggaagcctgaggaatgtagctgcagtaaacaaagctattacaataaagagaaaggtgtaaaaaagcaagagaaattaaagagccatcttcacccattcaaggaggctgctcaggaagtagatagcaaactgcaacttttcaaggagaacaaccgtaggaggaagaaggagaggaaggagaagagacggcagaggaagggggaagagtgcagcctgcctggcctcacttgcttcacgcatgacaacaaccactggcagacagccccgttctggaacctgggatctttctgtgcttgcacgagttctaacaataacacctactggtgtttgcgtacagttaatgagacgcataattttcttttctgtgagtttgctactggctttttggagtattttgatatgaatacagatccttatcagctcacaaatacagtgcacacggtagaacgaggcattttgaatcagctacacgtacaactaatggagctcagaagctgtcaaggatataagcagtgcaacccaagacctaagaatcttgatgttggaaataaagatggaggaagctatgacctacacagaggacagttatgggatggatgggaaggttaatcagccccgtctcactgcagacatcaactggcaaggcctagaggagctacacagtgtgaatgaaaacatctatgagtacagacaaaactacagacttagtctggtggactggactaattacttgaaggatttagatagagtatttgcactgctgaagagtcactatgagcaaaataaaacaaataagactcaaactgctcaaagtgacgggttcttggttgtctctgctgagcacgctgtgtcaatggagatggcctctgctgactcagatgaagacccaaggcataaggttgggaaaacacctcatttgaccttgccagctgaccttcaaaccctgcatttgaaccgaccaacattaagtccagagagtaaacttgaatggaataacgacattccagaagttaatcatttgaattctgaacactggagaaaaaccgaaaaatggacggggcatgaagagactaatcatctggaaaccgatttcagtggcgatggcatgacagagctagagctcgggcccagccccaggctgcagcccattcgcaggcacccgaaagaacttccccagtatggtggtcctggaaaggacatttttgaagatcaactatatcttcctgtgcattccgatggaatttcagttcatcagatgttcaccatggccaccgcagaacaccgaagtaattccagcatagcggggaagatgttgaccaaggtggagaagaatcacgaaaaggagaagtcacagcacctagaaggcagcgcctcctcttcactctcctctgattagatgaaactgttaccttaccctaaacacagtatttctttttaacttttttatttgtaaactaataaaggtaatcacagccaccaacattccaagctaccctgggtacctttgtgcagtagaagctagtgagcatgtgagcaagcggtgtgcacacggagactcatcgttataatttactatctgccaagagtagaaagaaaggctggggatatttgggttggcttggttttgattttttgcttgtttgtttgttttgtactaaaacagtattatcttttgaatatcgtagggacataagtatatacatgttatccaatcaagatggctagaatggtgcctttctgagtgtctaaaacttgacacccctggtaaatctttcaacacacttccactgcctgcgtaatgaagttttgattcatttttaaccactggaatttttcaatgccgtcattttcagttagatgattttgcactttgagattaaaatgccatgtctatttgattagtcttatttttttatttttacaggcttatcagtctcactgttggctgtcattgtgacaaagtcaaataaacccccaaggacgacacacagtatggatcacatattgtttgacattaagcttttgccagaaaatgttgcatgtgttttacctcgacttgctaaaatcgattagcagaaaggcatggctaataatgttggtggtgaaaataaataaataagtaaacaaaatgaagattgcctgctctctctgtgcctagcctcaaagcgttcatcatacatcatacctttaagattgctatattttgggttattttcttgacaggagaaaaagatctaaagatcttttattttcatcttttttggttttcttggcatgactaagaagcttaaatgttgataaaatatgactagttttgaatttacaccaagaacttctcaataaaagaaaatcatgaatgctccacaatttcaacataccacaagagaagttaatttcttaacattgtgttctatgattatttgtaagaccttcaccaagttctgatatcttttaaagacatagttcaaaattgcttttgaaaatctgtattcttgaaaatatccttgttgtgtattaggtttttaaataccagctaaaggattacctcactgagtcatcagtaccctcctattcagctccccaagatgatgtgtttttgcttaccctaagagaggttttcttcttatttttagataattcaagtgcttagataaattatgttttctttaagtgtttatggtaaactcttttaaagaaaatttaatatgttatagctgaatctttttggtaactttaaatctttatcatagactctgtacatatgttcaaattagctgcttgcctgatgtgtgtatcatcggtgggatgacagaacaaacatatttatgatcatgaataatgtgctttgtaaaaagatttcaagttattaggaagcatactctgttttttaatcatgtataatattccatgatacttttatagaacaattctggcttcaggaaagtctagaagcaatatttcttcaaataaaaggtgtttaaacttt

SEQ ID NO: 2315 - DNA, 3059 bp, Homo sapiens
tcctctgcgtcccgccccgggagtggctgcgaggctaggcgagccgggaaagggggcgccgcccagccccgagccccgcgccccgtgccccgagcccggagccccctgcccgccgcggcaccatgcgcgccgagccggcgtgaccggctccgcccgcggccgccccgcagctagcccggcgctctcgccggccacacggagcggcgcccgggagctatgagccatgaagccgcccggcagcagctcgcggcagccgcccctggcgggctgcagccttgccggcgcttcctgcggcccccaacgcggccccgccggctcggtgcctgccagcgccccggcccgcacgccgccctgccgcctgcttctcgtccttctcctgctgcctccgctcgccgcctcgtcccggccccgcgcctggggggctgctgcgcccagcgctccgcattggaatgaaactgcagaaaaaaatttgggagtcctggcagatgaagacaatacattgcaacagaatagcagcagtaatatcagttacagcaatgcaatgcagaaagaaatcacactgccttcaagactcatatattacatcaaccaagactcggaaagcccttatcacgttcttgacacaaaggcaagacaccagcaaaaacataataaggctgtccatctggcccaggcaagcttccagattgaagccttcggctccaaattcattcttgacctcatactgaacaatggtttgttgtcttctgattatgtggagattcactacgaaaatgggaaaccacagtactctaagggtggagagcactgttactaccatggaagcatcagaggcgtcaaagactccaaggtggctctgtcaacctgcaatggacttcatggcatgtttgaagatgataccttcgtgtatatgatagagccactagagctggttcatgatgagaaaagcacaggtcgaccacatataatccagaaaaccttggcaggacagtattctaagcaaatgaagaatctcactatggaaagaggtgaccagtggccctttctctctgaattacagtggttgaaaagaaggaagagagcagtgaatccatcacgtggtatatttgaagaaatgaaatatttggaacttatgattgttaatgatcacaaaacgtataagaagcatcgctcttctcatgcacataccaacaactttgcaaagtccgtggtcaaccttgtggattctatttacaaggagcagctcaacaccagggttgtcctggtggctgtagagacctggactgagaaggatcagattgacatcaccaccaaccctgtgcagatgctccatgagttctcaaaataccggcagcgcattaagcagcatgctgatgctgtgcacctcatctcgcgggtgacatttcactataagagaagcagtctgagttactttggaggtgtctgttctcgcacaagaggagttggtgtgaatgagtatggtcttccaatggcagtggcacaagtattatcgcagagcctggctcaaaaccttggaatccaatgggaaccttctagcagaaagccaaaatgtgactgcacagaatcctggggtggctgcatcatggaggaaacaggggtgtcccattctcgaaaattttcaaagtgcagcattttggagtatagagactttttacagagaggaggtggagcctgccttttcaacaggccaacaaagctatttgagcccacggaatgtggaaatggatacgtggaagctggggaggagtgtgattgtggttttcatgtggaatgctatggattatgctgtaagaaatgttccctctccaacggggctcactgcagcgacgggccctgctgtaacaatacctcatgtctttttcagccacgagggtatgaatgccgggatgctgtgaacgagtgtgatattactgaatattgtactggagactctggtcagtgcccaccaaatcttcataagcaagacggatatgcatgcaatcaaaatcagggccgctgctacaatggcgagtgcaagaccagagacaaccagtgtcagtacatctggggaacaaaggctgcagggtctgacaagttctgctatgaaaagctgaatacagaaggcactgagaagggaaactgcgggaaggatggagaccggtggattcagtgcagcaaacatgatgtgttctgtggattcttactctgtaccaatcttactcgagctccacgtattggtcaacttcagggtgagatcattccaacttccttctaccatcaaggccgggtgattgactgcagtggtgcccatgtagttttagatgatgatacggatgtgggctatgtagaagatggaacgccatgtggcccgtctatgatgtgtttagatcggaagtgcctacaaattcaagccctaaatatgagcagctgtccactcgattccaagggtaaagtctgttcgggccatggggtgtgtagtaatgaagccacctgcatttgtgatttcacctgggcagggacagattgcagtatccgggatccagttaggaaccttcacccccccaaggatgaaggacccaagggtcctagtgccaccaatctcataataggctccatcgctggtgccatcctggtagcagctattgtccttgggggcacaggctggggatttaaaaatgtcaagaagagaaggttcgatcctactcagcaaggccccatctgaatcagctgcgctggatggacaccgccttgcactgttggattctgggtatgacatactcgcagcagtgttactggaactattaagtttgtaaacaaaacctttgggtggtaatgactacggagctaaagttggggtgacaaggatggggtaaaagaaaactgtctcttttggaaataatgtcaaagaacacctttcaccacctgtcagtaaacgggggagggggcaaaagaccatgctataaaaagaactgttccagaatcttttttttccctaatggacgaaggaacaacacacacacaaaaattaaatgcaataaaggaatcattaaaaaaaaaaa

SEQ ID NO: 2316 - DNA, 5115 bp, Homo sapiens
ccagccatgggctcggggcgcgtacccgggctctgcctgcttgtcctgctggtccacgcccgcgccgcccagtacagcaaagccgcgcaagatgtggatgagtgtgtggaggggactgacaactgccacatcgatgctatctgccagaacaccccgaggtcatacaagtgcatctgcaagtctggctacacaggggacggcaaacactgcaaagacgtggatgagtgcgagcgagaggataatgcaggttgtgtgcatgactgtgtcaacatccctggcaattaccggtgtacctgctatgatggattccacctggcacatgacggacacaactgtctggatgtggacgagtgtgccgagggcaacggcggctgtcagcagagctgtgtcaacatgatgggcagctatgagtgccactgccgggaaggcttcttcctcagcgacaaccagcatacctgtatccagcggccagaagaaggaatgaattgcatgaacaagaaccacggctgtgcccacatttgccgggagacacccaaggggggtattgcctgtgaatgccgtcctggctttgagcttaccaagaaccaacgggactgtaaattgacatgcaactatggtaacggcggctgccagcacacgtgtgatgacacagagcagggtccccggtgcggctgccatatcaagtttgtgctccataccgacgggaagacatgcatcgagacctgtgctgtcaacaacgggggctgtgacagtaagtgccatgatgcagcgactggtgtccactgcacctgccctgtgggcttcatgctgcagccagacaggaagacgtgcaaagatatagatgagtgccgcttaaacaacgggggctgtgaccatatttgccgcaacacagtgggcagcttcgaatgcagttgcaagaaaggctataagcttctcatcaatgagaggaactgccaggatatagacgagtgttcctttgatcgaacctgtgaccacatatgtgtcaacacaccaggaagcttccagtgtctctgccatcgtggctacctgttgtatggtatcacccactgtggggatgtggatgaatgcagcatcaaccggggaggttgccgctttggctgcatcaacactcctggcagctaccagtgtacctgcccagcaggccagggtcggctgcactggaatggcaaagattgcacagagccactgaagtgtcagggcagtcctggggcctcgaaagccatgctcagctgcaaccggtctggcaagaaggacacctgtgccctgacctgtccctccagggcccgatttttgccagagtctgagaatggcttcacggtgagctgtgggacccccagccccagggctgctccagcccgagctggccacaatgggaacagcaccaactccaaccactgccatgaggctgcagtgctgtccattaaacaacgggcctccttcaagatcaaggatgccaaatgccgtttgcacctgcgaaacaaaggcaaaacagaggaggctggcagaatcacagggccaggtggtgccccctgctctgaatgccaggtcaccttcatccaccttaagtgtgactcctctcggaagggcaagggccgacgggcccggacccctccaggcaaagaggtcacaaggctcaccctggaactggaggcagaggtcagagccgaagaaaccacagccagctgtgggctgccctgcctccgacagcgaatggaacggcggctgaaaggatccctgaagatgctcagaaagtccatcaaccaggaccgcttcctgctgcgcctggcaggccttgattatgagctggcccacaagccgggcctggtagccggggagcgagcagagccgatggagtcctgtaggcccgggcagcaccgtgctgggaccaagtgtgtcagctgcccgcagggaacgtattaccacggccagacggagcagtgtgtgccatgcccagcgggcaccttccaggagagagaagggcagctctcctgcgacctttgccctgggagtgatgcccacgggcctcttggagccaccaacgtcaccacgtgtgcaggtcagtgcccacctggccaacactctgtagatgggttcaagccctgtcagccatgcccacgtggcacctaccaacctgaagcaggacggaccctatgcttcccttgtggtgggggcctcaccaccaagcatgaaggggccatttccttccaagactgtgacaccaaagtccagtgctccccagggcactactacaacaccagcatccaccgctgtattcgctgtgccatgggctcctatcagcccgacttccgtcagaacttctgcagccgctgtccaggaaacacaagcacagactttgatggctctaccagtgtggcccaatgcaagaatcgtcagtgtggtggggagctgggtgagttcactggctatattgagtcccccaactacccgggcaactacccagctggtgtggagtgcatctggaacatcaaccccccacccaagcgcaagatccttatcgtggtaccagagatcttcctgccatctgaggatgagtgtggggacgtcctggtcatgagaaagaactcatccccatcctccattaccacttatgagacctgccagacctacgagcgtcccattgccttcactgcccgttccaggaagctctggatcaacttcaagacaagcgaggccaacagcgcccgtggcttccagattccctatgttacctatgatgaggactatgagcagctggtagaagacattgtgcgagatggccggctctatgcctctgaaaaccaccaggagattttaaaggacaagaagctcatcaaggccttctttgaggtgctagcccacccccagaactacttcaagtacacagagaaacacaaggagatgctgccaaaatccttcatcaagctgctccgctccaaagtttccagcttcctgaggccctacaaatagtaaccctaggctcagagacccaattttttaagcccccagactccttagccctcagagccggcagccccctaccctcagacaaggaactctctcctctctttttggagggaaaaaaaaaatatcactacacaaaccaggcactctccctttctgtctttctagtttcctttccttgtctctctctgcctgcctctctactgttcccccttttctaacacactacctagaaaagccattcagtactggctctagtccccgtgagatgtaaagaaacagtacagccccttccactgcccattttaccagctcacattcccgaccccatcagcttggaagggtgctagaggcccatcaaggaagtgggtctggtgggaaacggggaggggaaagaagggcttctgccattatagggttgtgccttgctagtcaggggccaaaatgtcccctggctctgctccctagggtgattctaacagcccagggtcctgccaaagaagcctttgatttacaggcttaatgccagcaccagtcctctggggcacatggtttgagctctggacttcccacatggccagctttcttgtctatacagatcctctctttctttccctacgtctgcctggggtctactccataagggtttacaaatggcccacaacactgagttagtggacaccggctaaatgaggaagagcagcaggcattgtcatggtgaatgccccgctgtagctccctgagagaaagactgtaactctgcaggacagaaacaaggttttaaagcattgccaaaaaaaagaaaacagaaagaaaaaatgtatcatctaaaggactagacacagaacaattggaagtcaacttcaaacactaatcccttttcttgtcttccctggcccagccacctcctcagccccatgtgatgctccctgggggagccctactccccttgctacatgttgtccttaaacatggttattgacctgaagccagcctaggccttgccctacagttgtttttcccttgtagccccagctggcttgtgggcttcaccaaagaggaccccactctgaagccagcctggagccacctacctctggcctcaggctgtgggcagcaaaaggaatgtgtgtgcacttggcgagcctcctgcccaccctgtccacacctaataagtgcaatcattttgagtctttctatgttgtctagacggaggggtttttgttttctgggtttgttttttgtttttgtttcttcttcctctattagcaaaaccctatttatagctgcccaagagaaaagagtgtatgtttggagtggaagaaaatcggttttgaatctcatgaaccttgagtgctggagcatctgatctgtctctatgccaccactggccacctagagcccttggctgtggtaatccagggtaattgcgcagaggcatctgatgtgtaggaaagtaattctggggatttgatggagcagaaaggagagagacctatgtttgctaaaccaatcttgctatccctatgcctctccatggagtcagtgtggacctcatgattatagaggccaatggaactggtcagtgattctctaccccaagtagggaaaacctccatcttttccctgtcttcatcctgttatcccctggtgtacacatggaagaggaccaggacataccacctggggatgggctgactcagggtcccgaggccagagacaaagctgtgggagccaagaataagacagaaggcatcagatatttgcctggctctggtcacttccctttgaagttgacttcaagcttagcttcctcaactactgtttttcagaaggaagaaagaatcaaatggaagaagaatcaagtccatgcccaagcccaaagcctgcacacattctgcccttaatccaagtgttgcctataaaattattttctgttttctcactctagttcccccaaagctgtagtcccaatcaatcaaaggctaccaactgagtcctcaggttcatttcttttttttttttttttctttttaactctcctggtaactcacagaacagctcaggttcatttctaggtgactgtcctaggctactgctcccccaggagactcaacactaaataaaggagtc

SEQ ID NO: 2317 - DNA, 2395 bp, Homo sapiens; identical to SEQ ID NO: 1744

SEQ ID NO: 2318 - DNA, 8051 bp, Homo sapiens
gtctctccaagggaatgaaaggtgaggggagcgtgagtgcaggcatgatgggaatctccgtgacttgtgaaccaaggactgggttttgctctggaagcctgtcctgattgcttctgtaatctggcgctatgcatccggatcttggacccttatgtacactgctgtatgttactcttacaattctgtgctcttctgtgagttcagacttggcaccttattttacttctgagccgctctctgctgtccagaaacttggtggacctgtagtactgcattgttctgctcaacctgtgaccactcgtatctcatggctgcataacggaaaaacattggatggaaacctggaacatgttaagattcatcaggggactctgacaattctttctctcaactcctctcttttgggttactaccagtgccttgccaacaatagcatcggtgccattgtgagtggccctgcgacagtatctgtggcagttcttggtgattttggttcatccacaaagcatgttattacagcagaagaaaaaagtgctggtttcattggctgcagggtaccggagagtaaccccaaagctgaggtgcgctataaaatccggggaaaatggctggaacattccacagagaattacttaatccttccatcaggaaatcttcagattttgaatgtatccttagaggacaagggatcatacaaatgtgcagcttataatcctgtcacacatcaattaaaagttgaacctattggccgaaagctccttgtgagtcgtccttcttcagatgatgttcacattcttcaccccacccattcacaggcattagctgttctttctcgtagccctgtaaccttggagtgtgtggtgagtggggtcccggctcctcaagtgtattggctaaaggacgggcaggacattgcaccaggaagcaactggagaaggttgtattctcatcttgccactgatagcgttgacccggcggactccggaaactattcctgcatggcgggaaacaagtctggagatgtaaaatatgtgacttacatggttaatgtacttgaacatgcttccatttctaaaggactacaggatcagatagtgtctctgggtgccacagtacactttacctgcgacgttcatgggaacccagcccccaactgtacctggtttcacaatgcacagcctattcatccttctgcacgacatctaactgcaggaaacggactgaaaatcagtggggttactgtggaagatgttgggatgtatcagtgtgtagcagataatgggattggatttatgcactctactggaagacttgaaattgaaaatgacggtggattcaagccagttataattacggcaccagtaagtgcaaaggttgcagacggagactttgttactctgtcctgcaatgccagtgggctgccggttccggtcattcgttggtatgacagccatggattgataaccagccatccatctcaagtcctgagatcgaaatcccgaaaatcacagttatcaagacctgagggcttgaacctggagcctgtgtacttcgtcctgtcccaagctggtgcaagctctctccatattcaggctgtgactcaggaacatgcggggaaatacatctgcgaagctgcaaatgaacatggtaccacacaggcagaagcatctctcatggttgttccttttgaaacaaatacaaaagcagagacagtcacacttcctgatgctgctcagaatgatgacagaagtaagagagatggttcagaaactgggttactgagctcatttccggtgaaggtccatcccagtgcagtggaatcagcaccagagaaaaacgccagcggcatctctgttcctgatgcccccatcatactgagccccccacagacccacacaccagacacgtacaacctggtgtggagggcaggcaaggatggtgggctgcccatcaatgcttactttgtgaagtatcgaaagctggatgatggggttggcatgctgggaagctggcacacggttcgagtcccaggaagtgaaaatgagctccatttagctgagctggagccatctagtctttatgaagtcttgatggtagcaagaagcgcagcaggtgaaggccaacctgccatgcttaccttccgaaccagcaaagaaaaaacagcgtcatcaaaaaacacccaggcatcctctccacccgtgggcatccctaagtatcccgttgtttcagaggctgcaaacaacaattttggagtggtacttacagattcctctaggcacagtggagttccagaggcaccagatcggcctaccatctccactgcatcagagacatcagtctatgtcacttggattcctcgggcaaacgggggttctccaatcactgccttcaaagtcgaatataaacggatgaggaccagcaattggctggtggcagctgaagacatccctccttccaaactttcagtggaagttcgtagtttagaaccaggttcaacatacaaatttagggtcattgccatcaaccattatggtgagagttttcggagttcagcatctcgtccttatcaagtggttgggttccccaatcgcttttccagccgtccaataactggacctcacattgcatacacagaggctgtcagcgatactcagatcatgctaaagtggacgtacattccatcaagtaacaataacactcccattcaaggattttatatctattaccgaccaacagatagtgacaatgacagtgattacaagagggatgttgtagaaggttcaaagcagtggcacatgattggccacctgcagccagaaacctcctatgacattaaaatgcaatgcttcaatgaaggaggagaaagtgaatttagcaatgtgatgatctgcgagactaaagtgaaacgtgttcctggagcttctgaatatcctgtcaaagacttgagtacccctccaaattctttgggaagtggaggaaatgtggggcctgcaaccagccctgccagaagcagtgacatgttatatctgatcgttggctgtgtgctgggcgtcatggtcctcattctgatggttttcattgcaatgtgcctgtggaagaatcgccagcagaataccatacaaaaatatgacccaccaggatatctctaccaaggatcagatatgaacgggcagatggtggactacaccactctctcaggagcaagtcagataaatggaaatgttcacggaggcttcctaaccaatggcggtctcagcagtggctattcccaccttcaccataaggtccccaatgcagtcaatggaattgtgaatgggagcctaaatggagggctttactccgggcacagcaactctctaaccaggacacacgtggattttgaacatcctcatcatctagtgaatggtggtggaatgtacacggccgtgcctcagattgaccctctggagtgtgttaactgccgaaattgtcgaaacaacaataggtgtttcaccaaaaccaacagcactttcagcagcagccctcctcctgtggtccctgtggtagcaccttatcctcaggatggtttggaaatgaagcccctcagtcacgtgaaggtgcctgtatgcctgacttccgcagtccctgattgtggccagttgccggaggagagcgtcaaggacaatgtggaaccagtccctactcagcgtacctgctgtcaggacattgtaaatgacgtcagctctgatggctcagaagatccagcagagttcagcagaggagacagctgtgcccattcagaaacagagatcaacattgtaagttggaatgctcttattttgccacctgtccccgagggctgtgctgagaagacaatgtggtctccacctggcattcctttagacagcccgacagaggtccttcagcagccccgggaaacctgaggacatgcaaacaaccagtcatgttccaacttcaagccggtaactgcacacaacaggcctgggagcgaactgtgtgaaggaccttaattcaaatcagagaaaatcattatttatttttttgtagtagtaatgtcatatgaatgtatcttaaaacgtgtgcccttttatattatttatgccttaaatgttttcttccccattccttcctccccctcggtaggaaacaaccttgttttgcatagtattcagtcacctggagggcagaggggtccttccatgttttctaacagctatagtgacagcaagagctcctcatgcaaaggatcccatctcttggctgcttcggctaggagggaatgcaggggcccgttgaaggttgccaccagctgggttttcaggtggaaaatggtctttcaatagtgtattctcagacttttttttgtttgttttttgagatggagtcttgctgtcatccaggctggagtgcaatggctcgatcttggctcactgcaacctccgcctcccaggttcaagcaattctcccgcctcagcctcctgagtagctgggactacaggcacctgccaccacgtccagctaattgtcttgtatttttattagagacaaggtttcaggctggttttgaactcctgacctcaagtgatccacccgcctccgcctcccaaagtgcgaggattacaggcgtgagccaccacgtctggcctgtattatcagacttcctgagaacactttgaaatcaactgcagttgtgacccatgtttataataacagacctggctgacggattttacaagagtgccttccacagaagtggtaatgtgacctgttgactttgtatctgcacgtgggcacgagtgatgttcagtttgctaggcactagtcatagtgttatggacgtggtggagtgtaaggtcttgatgaattacggcagtatgcagaaaaggaaccaaggccagagagacaaataatgcctcatgtcccactgctttaaaattacattaatttataaaatggccactatgggctctttttgactgtttctcggagtaggaacaaaataagacattaaatggtggcttgaagagaaagatacacattttcagaagaaagaaaggggagggctgcagggagcctgtcttggcgggagctctccagtctgttggattagcacagggacacgcttatggtgccatgacgccgaaactagtcatcccccatctccagcataggcaacggcctgcaggggtgagtgtcagaaaagacttactttggaagaaaagggtttttttttgtttgtttgttttttgtttttttttgtttgtttgttttgggtttttttcctgaaatttcctgatacctttttcagaatgtcacccttgtaaataggcacctaaagccaagttggtcagcagagctcctgaccacggctgcctctgcgtgacaaggacatttgcagctgcctttggaaggctcttcacattaaaaaacaataattatgtaagtgtgtttcatagcttgagtcaagctttcaaggatcactgctcctttgtgcattgtgcatccctttggggaaagaaacagaaaattattctctttctatagagtcaagcaattccagcagaagtgaagaaatgttagtttcccagaaatcgcagtggaatagaatacaatactgtgttaaccaactttctgtataaatgcatcagtattcccttacatatgtctatatattttataatagaactgttagtgaaaatgtgcttgtttaagctgggtcactatgcaagagttacttccagtagaatgtagtgaatgtaattccctagtcggatattagggatgctgtagacccaagttctacattccagatgtccgtgcctatagtatactggatttattcttcatgttgcttaaatgcagttagctctggagggggatagctgcatcccttacttctgtgactagcaaaggacaaagtcccagcgcacagaatatgaaaacataccctgtgttagccaatcaagttacagcaatgctgtcacaaagggagttttagaaaactggggagtcattgtccgtagacagccattttgatttaggaaacaggtgtattagcatgagccttaggtcatgaactgcttttaaagattgagtttgaatatgggatctgtccacgaggaagagaaaatggctttacctttaggacaatctcattgtggactgctttatttatattattagtaacgctgttttaagtgttattctttttattgtattttatttataaaaaatgcctttatatattgaaatatataaatatatatatataaacacacacacacacacacacacacacatatatatatatatatataattgcctttatatttaggcggtatgagttctccctaagcgtgagttggctctgccctgcacaggcacccaaacagtcctacctaatgtcacttcaccaggaaatgagaggacatggtacagtgtgggagacagcactaacacgtgctgaataactactgtgtaccaggcactgtgctcggtgcttgttactgttaactcatttaacccccacaactcatctacaaagttggcattaaaatccccaagtcactcagtgagccatgggacctgaatccgaacctagtttatctggagccataatctgggctcctcccatttttccatactgctttccaaaagcattgtggttcactctttggatggaaccagtcccgttccgtatgctgtgatctatccctgccgtggaattcctccgaggctccaactccgcagccagagaagctgctctctggcctccgcgggcagagctctgcttatgacttcgtcttccagaggtccacatttctccccttgacgccccctgtctaccacctccacctggaaatttgatctttactgtgctcagtgatcacgaaattggtcaagcctattcatgttccttctcatctagaattctgtgtgattgttttagcataaactgccccgctcccactgtatcatttcacgatctccttttaatgtttttctttcagttttgcactgacagtctggtgacaggtgctgccagggtgcaagttacattgcaatgttctaaaccttttgaagtgttcttagcaaaagcctttctttctgggtgtttttgtcgaatgagtctatgaagactcaatgcatccatcttgggctgatcatgccacagatctcattccagctatagtactgccaagaagtgaagtttatcattgaattttacctgtgttgctctcttttaaagtaatgactttgagatgcatgctttgtatcatattgaaaagtatgttttattttccttaaagttgtaatattgtgtgtgaaactgtacatattttaaatgatgtagctttggcaggttttatttggttgatatgattttatattaaaagagaaggctgctttcatatagcatagcccctgaaggtgggaatactccctgtttgtacaacgctgcttatagtttgtgattggggtgggcgaatgtcttcctctgaaattctttggaaccccccacccctgtcctcccctgaaactcccctgtgcacacccctctgttctgactgcagagatcaaggccctgaaggagcaggatcttgggcaagtgttttaggggacgctgagaacatacctgaccctgggggcgatgtggaggcaggcccacctcctcggggcaactttgcgtttccttggagggaagggaggtgggtaggagaggagcttgggaggatgaggaggagcggtcccgcctcacacattgtctatttttaccattaaccgagcgccacatgtttatgaacttcaggatagaaatttagcctccttgtgaaaacgttttgttttactgccctaagaaaatacacatctctaggcttgtctgaccagaaagccagcaaagtcttttgcatcgggtgtggcccttttgtattttatttcccatatttaaataagccttccttaaaccctagccccagtcctgagagctttgagggtagccgaaaccccttatctaataaagtctaactctgtgagaaccacagaaaaaa

SEQ ID NO: 2319 - DNA, 4950 bp, Homo sapiens; identical to SEQ ID NO: 796

SEQ ID NO: 2320 - DNA, 1432 bp, Homo sapiens
ggggcgtgctcgcggctataaggggcggaggctgggcggcgttgctctgcgctctgcggctgacggcgcttttgtctccggtgagttttgtggcgggaagcttctgcgctggtgcttagtaaccgactttcctccggactcctgcacgacctgctcctacagccggcgatccactcccggctgttcccccggagggtccagaggcctttcagaaggagaaggcagctctgtttctctgcagaggagtagggtcctttcagccatgaagcatgtgttgaacctctacctgttaggtgtggtactgaccctactctccatcttcgttagagtgatggagtccctagagggcttactagagagcccatcgcctgggacctcctggaccaccagaagccaactagccaacacagagcccaccaagggccttccagaccatccatccagaagcatgtgataagacctccttccatactggccatattttggaacactgacctagacatgtccagatgggagtcccattcctagcagacaagctgagcaccgttgtaaccagagaactattactaggccttgaagaacctgtctaactggatgctcattgcctgggcaaggcctgtttaggccggttgcggtggctcatgcctgtaatcctagcactttgggaggctgaggtgggtggatcacctgaggtcaggagttcgagaccagcctcgccaacatggcgaaaccccatctctactaaaaatacaaaagttagctgggtgtggtggcagaggcctgtaatcccagctccttgggaggctgaggcgggagaattgcttgaacccggggacggaggttgcagtgagccgagatcgcactgctgtacccagcctgggccacagtgcaagactccatctcaaaaaaaaaagaaaagaaaaagcctgtttaatgcacaggtgtgagtggattgcttatggctatgagataggttgatctcgcccttaccccggggtctggtgtatgctgtgctttcctcagcagtatggctctgacatctcttagatgtcccaacttcagctgttgggagatggtgatattttcaaccctacttcctaaacatctgtctggggttcctttagtcttgaatgtcttatgctcaattatttggtgttgagcctctcttccacaagagctcctccatgtttggatagcagttgaagaggttgtgtgggtgggctgttgggagtgaggatggagtgttcagtgcccatttctcattttacattttaaagtcgttcctccaacatagtgtgtattggtctgaagggggtggtgggatgccaaagcctgctcaagttatggacattgtggccaccatgtggcttaaatgattttttctaactaataaagtggaatatatatttctaaaaaaaaaaaaaaaaaaaaa

SEQ ID NO: 2321 - DNA, 2594 bp, Homo sapiens
gccctaaccttcccagggctcagctctttggagctgcccattcctccggctgcgagaaaggacgcgcgccctgcgtcgggcgaagaaaagaagcaaaacttgtcgggagggtttcgtcatcaacctccttcccgcaaacctaaacctcctgccggggccatccctagacagaggaaagttcctgcagagccgaccagccctagtggatctggggcaggcagcggcgctggctgtggaattagatctgttttgaacccagtggagcgcatcgctggggctcggaagtcaccgtccgcgggcaccgggttggcgctgcccgagtggaaccgacagtttgcgagcctcggctgcaagtggcctctcctccccgcggttgttgttcagtgtcgggtgagggctgcgagtgtggcaagttgcaaagagagcctcagaggtccgaagagcgctgcgctcctactcgcgttcgcttcttcctcttctcggttccctactgtgaaatcgcagcgacatttacaaaggcctccgggtcctaccgagaccgatccgcagcgtttggcccggtcgtgcctattgcatcgggagcccccgagcaccggcgaaggactggcgggtggggtagggaggtggcggcggcggcatggcgaggttcccgaaggccgacctggccgctgcaggagttatgttactttgccacttcttcacggaccagtttcagttcgccgatgggaaacccggagaccaaatccttgattggcagtatggagttactcaggccttccctcacacagaggaggaggtggaagttgattcacacgcgtacagccacaggtggaaaagaaacttggactttctcaaggcggtagacacgaaccgagcaagcgtcggccaagactctcctgagcccagaagcttcacagacctgctgctggatgatgggcaggacaataacactcagatcgaggaggatacagaccacaattactatatatctcgaatatatggtccatctgattctgccagccgggatttatgggtgaacatagaccaaatggaaaaagataaagtgaagattcatggaatattgtccaatactcatcggcaagctgcaagagtgaatctgtccttcgattttccattttatggccacttcctacgtgaaatcactgtggcaaccgggggtttcatatacactggagaagtcgtacatcgaatgctaacagccacacagtacatagcacctttaatggcaaatttcgatcccagtgtatccagaaattcaactgtcagatattttgataatggcacagcacttgtggtccagtgggaccatgtacatctccaggataattataacctgggaagcttcacattccaggcaaccctgctcatggatggacgaatcatctttggatacaaagaaattcctgtcttggtcacacagataagttcaaccaatcatccagtgaaagtcggactgtccgatgcatttgtcgttgtccacaggatccaacaaattcccaatgttcgaagaagaacaatttatgaataccaccgagtagagctacaaatgtcaaaaattaccaacatttcggctgtggagatgaccccattacccacatgcctccagtttaacagatgtggcccctgtgtatcttctcagattggcttcaactgcagttggtgtagtaaacttcaaagatgttccagtggatttgatcgtcatcggcaggactgggtggacagtggatgccctgaagagtcaaaagagaagatgtgtgagaatacagaaccagtggaaacttcttctcgaaccaccacaaccgtaggagcgacaaccacccagttcagggtcctaactaccaccagaagagcagtgacttctcagtttcccaccagcctccctacagaagatgataccaagatagcactacatctaaaagataatggagcttctacagatgacagtgcagctgagaagaaagggggaaccctccacgctggcctcatcattggaatcctcatcctggtcctcattgtagccacagccattcttgtgacagtctatatgtatcaccacccaacatcagcagccagcatcttctttattgagagacgcccaagcagatggcctgcgatgaagtttagaagaggctctggacatcctgcctatgctgaagttgaaccagttggagagaaagaaggctttattgtatcagagcagtgctaaaatttctaggacagaacaacaccagtactggtttacaggtgttaagactaaaattttgcctatacctttaagacaaacaaacaaacacacacacaaacaagctctaagctgctgtagcctgaagaagacaagatttctggacaagctcagcccaggaaacaaagggtaaacaaaaaactaaaacttatacaagataccatttacactgaacatagaattccctagtggaatgtcatctatagttcactcggaacatctcccgtggacttatctgaagtatgacaagattataatgcttttggcttaggtgcagggttgcaaagggatcagaaaaaaaaaatcataataaagctttagttcatgaggg

SEQ ID NO: 2322 - DNA, 15735 bp, Homo sapiens; identical to SEQ ID NO: 802

SEQ ID NO: 2323 - DNA, 9657 bp, Homo sapiens; identical to SEQ ID NO: 665

SEQ ID NO: 2324 - DNA, 2329 bp, Homo sapiens
agccccgccctgccccgcgccgccaagcggttcccgccctcgcccagcgcccaggtagctgcgaggaaacttttgcagcggctgggtagcagcacgtctcttgctcctcagggccactgccaggcttgccgagtcctgggactgctctcgctccggctgccactctcccgcgctctcctagctccctgcgaagcaggatggccgggaccgtgcgcaccgcgtgcttggtggtggcgatgctgctcagcttggacttcccgggacaggcgcagcccccgccgccgccgccggacgccacctgtcaccaagtccgctccttcttccagagactgcagcccggactcaagtgggtgccagaaactcccgtgccaggatcagatttgcaagtatgtctccctaagggcccaacatgctgctcaagaaagatggaagaaaaataccaactaacagcacgattgaacatggaacagctgcttcagtctgcaagtatggagctcaagttcttaattattcagaatgctgcggttttccaagaggcctttgaaattgttgttcgccatgccaagaactacaccaatgccatgttcaagaacaactacccaagcctgactccacaagcttttgagtttgtgggtgaatttttcacagatgtgtctctctacatcttgggttctgacatcaatgtagatgacatggtcaatgaattgtttgacagcctgtttccagtcatctatacccagctaatgaacccaggcctgcctgattcagccttggacatcaatgagtgcctccgaggagcaagacgtgacctgaaagtatttgggaatttccccaagcttattatgacccaggtttccaagtcactgcaagtcactaggatcttccttcaggctctgaatcttggaattgaagtgatcaacacaactgatcacctgaagttcagtaaggactgtggccgaatgctcaccagaatgtggtactgctcttactgccagggactgatgatggttaaaccctgtggcggttactgcaatgtggtcatgcaaggctgtatggcaggtgtggtggagattgacaagtactggagagaatacattctgtcccttgaagaacttgtgaatggcatgtacagaatctatgacatggagaacgtactgcttggtctcttttcaacaatccatgattctatccagtatgtccagaagaatgcaggaaagctgaccaccactattggcaagttatgtgcccattctcaacaacgccaatatagatctgcttattatcctgaagatctctttattgacaagaaagtattaaaagttgctcatgtagaacatgaagaaaccttatccagccgaagaagggaactaattcagaagttgaagtctttcatcagcttctatagtgctttgcctggctacatctgcagccatagccctgtggcggaaaacgacaccctttgctggaatggacaagaactcgtggagagatacagccaaaaggcagcaaggaatggaatgaaaaaccagttcaatctccatgagctgaaaatgaagggccctgagccagtggtcagtcaaattattgacaaactgaagcacattaaccagctcctgagaaccatgtctatgcccaaaggtagagttctggataaaaacctggatgaggaagggtttgaaagtggagactgcggtgatgatgaagatgagtgcattggaggctctggtgatggaatgataaaagtgaagaatcagctccgcttccttgcagaactggcctatgatctggatgtggatgatgcgcctggaaacagtcagcaggcaactccgaaggacaacgagataagcacctttcacaacctcgggaacgttcattccccgctgaagcttctcaccagcatggccatctcggtggtgtgcttcttcttcctggtgcactgactgcctggtgcccagcacatgtgctgccctacagcaccctgtggtcttcctcgataaagggaaccactttcttatttttttctatttttttttttttgttatcctgtatacctcctccagccatgaagtagaggactaaccatgtgttatgttttcgaaaatcaaatggtatcttttggaggaagatacattttagtggtagcatatagattgtccttttgcaaagaaagaaaaaaaaccatcaagttgtgccaaattattctcctatgtttggctgctagaacatggttaccatgtctttctctctcactccctccctttctatcgttctctctttgcatggatttctttgaaaaaaaataaattgctcaaataaaaaaaaaaaaaaa

SEQ ID NO: 2325 - DNA, 2366 bp, Homo sapiens; identical to SEQ ID NO: 2295

SEQ ID NO: 2326 - DNA, 8815 bp, Homo sapiens; identical to SEQ ID NO: 2279

SEQ ID NO: 2327 - DNA, 6141 bp, Homo sapiens; identical to SEQ ID NO: 2300

SEQ ID NO: 2328 - DNA, 3628 bp, Homo sapiens
agatatatataggattgaagatctctcagttaagtctacatgaaaaggatggtttcttggagcttccacaaacttaaaaccatgaaacatctattattgctactattgtgtgtttttctagttaagtcccaaggtgtcaacgacaatgaggagggtttcttcagtgcccgtggtcatcgaccccttgacaagaagagagaagaggctcccagcctgaggcctgccccaccgcccatcagtggaggtggctatcgggctcgtccagccaaagcagctgccactcaaaagaaagtagaaagaaaagcccctgatgctggaggctgtcttcacgctgacccagacctgggggtgttgtgtcctacaggatgtcagttgcaagaggctttgctacaacaggaaaggccaatcagaaatagtgttgatgagttaaataacaatgtggaagctgtttcccagacctcctcttcttcctttcagtacatgtatttgctgaaagacctgtggcaaaagaggcagaagcaagtaaaagataatgaaaatgtagtcaatgagtactcctcagaactggaaaagcaccaattatatatagatgagactgtgaatagcaatatcccaactaaccttcgtgtgcttcgttcaatcctggaaaacctgagaagcaaaatacaaaagttagaatctgatgtctcagctcaaatggaatattgtcgcaccccatgcactgtcagttgcaatattcctgtggtgtctggcaaagaatgtgaggaaattatcaggaaaggaggtgaaacatctgaaatgtatctcattcaacctgacagttctgtcaaaccgtatagagtatactgtgacatgaatacagaaaatggaggatggacagtgattcagaaccgtcaagacggtagtgttgactttggcaggaaatgggatccatataaacagggatttggaaatgttgcaaccaacacagatgggaagaattactgtggcctaccaggtgaatattggcttggaaatgataaaattagccagcttaccaggatgggacccacagaacttttgatagaaatggaggactggaaaggagacaaagtaaaggctcactatggaggattcactgtacagaatgaagccaacaaataccagatctcagtgaacaaatacagaggaacagccggtaatgccctcatggatggagcatctcagctgatgggagaaaacaggaccatgaccattcacaacggcatgttcttcagcacgtatgacagagacaatgacggctggttaacatcagatcccagaaaacagtgttctaaagaagacggtggtggatggtggtataatagatgtcatgcagccaatccaaacggcagatactactggggtggacagtacacctgggacatggcaaagcatggcacagatgatggtgtagtatggatgaattggaaggggtcatggtactcaatgaggaagatgagtatgaagatcaggcccttcttcccacagcaatagtccccaatacgtagatttttgctcttctgtatgtgacaacatttttgtacattatgttattggaattttctttcatacattatattcctctaaaactctcaagcagacgtgagtgtgactttttgaaaaaagtataggataaattacattaaaatagcacatgattttcttttgttttcttcatttctcttgctcaccaagaagtaacaaaagtatagttttgacagagttggtgttcataatttcagttctagttgattgcgagaattttcaaataaggaagaggggtcttttatccttgtcgtaggaaaaccatgacggaaaggaaaaactgatgtttaaaagtccacttttaaaactatatttatttatgtaggatctgtcaaagaaaacttccaaaaagatttattaattaaaccagactctgttgcaataagttaatgttttcttgttttgtaatccacacattcaatgagttaggctttgcacttgtaaggaaggagaagcgttcacaacctcaaatagctaataaaccggtcttgaatatttgaagatttaaaatctgactctaggacgggcacggtggctcacgactataatcccaacactttgggaggctgaggcgggcggtcacaaggtcaggagttcaagaccagcctgaccaatatggtgaaaccccatctctactaaaaatacaaaaattagccaggcgtggtggcaggtgcctgtagtcccagctacctgtgaggtggagattgcattgagccaagatctcaacactgcactccagcctgggcaacagcgtgagactccacctcaaaaaaaaaaaaaaaagaatctgactatataccatggaaaagccaccactctgccacttaaataaacatcaggatcagagattccaagaggacaatctgcatcaagtcttcaccaagtgttttttaagcgaaataatgaaatagggagcagaatatgcctgttgcccatagaaacgaggtctattcttgtcctcaattaggcttttttttcttcatagttacaccagaactaaagtaaaagtggtttttctgttctttctacttctccccatgaaatgggcatatcatctcaacacttcactccaagtcgccacgggcaaccttatgaccctaggtcctccacccctaatgtatcatcattgccacccatttttatggtacttattgttcttaagcttatcctcttaatcttttcatgtaagcaaagctcattaatttctgtcttggaaatgctactactctctttaattactcaccaaatccaactttaacttttgacctggtttctctgccacaagttctgtcccactggagcccatactcacctaccgctttgccatcacatttaacagaaaactcttatcaacttacttcctgcttaacattagctccttcctatctatatccaaatttcttaaattcaaattttttagctggagtaaaaatggtcccagtaccatttcctgttcccttcactataacctacatttttgtcacattaagtttttccccattccaggacaggtcaggccctttaaaaatttcaacagctttattgagatataattgatataatttaaaaaatcctgcacatgtgtcatgctggagccctattgattccaacagggatggcgccttgtccaagaagagacccagagccagtgaatgggacatagggtttatttaggacttaaatacagatgtggtccagtggcagtgggctggacaggaccgctactatttgtaaagagtatgtagtttatataacatttctacttagcactctccacttagcaacctccatttaacccaaaataaaaggccttggttccttgcacatcctgagttccaacggacaggcagggagttcaagtgtccttcacagataagaagtgaatctctctgggttggccattcccggattccttagcttagactctgaacacatattcttcttagaccatacagtcattctcagggtatgcttgagttaatgctgtcggatgcatctgtcatacaaagtgtttaacatatacgatttcatgattttggaaatatgcatacacccatgatat

SEQ ID NO: 2329 - DNA, 5190 bp, Homo sapiens; identical to SEQ ID NO: 612

SEQ ID NO: 2330 - DNA, 3913 bp, Homo sapiens; identical to SEQ ID NO: 2282

SEQ ID NO: 2331 - DNA, 4665 bp, Homo sapiens
ataggctcagacacaaggagaggcttggagagagcagacgccttctggattcaagaagacgaggcccattcccctcaggctcacctgttactcggcctcccagaaagatggataggagaaatgactacggatatagggtgcctctatttcagggccctctgcctcccccggggagcctggggcttcccttccctccagatatacagactgagaccacagaagaggacagtgtcctgctgatgcataccctgttggcggcaaccaaggactccctggccatggacccaccagttgtcaaccggcctaagaaaagcaagaccaagaaggcccctataaagactattactaaggctgcacctgctgcccctccagtcccagctgccaatgagattgccaccaacaagcccaaaataacttggcaggctttaaacctgccagtcattacccagatcagccaggctttacctaccactgaggtaaccaatactcaggcttcttcagtcactgctcagcctaagaaagccaacaagatgaagagagttactgccaaggcagcccaaggctcccaatccccaactggccatgagggtggcactatacagctgaagtcacccttgcaggtcctaaagctaccagtcatctcacagaatattcacgctccaattgccaatgagtcagccagttcccaagccttgataacctctatcaagcctaagaaagcttccaaggctaagaaggctgcaaataaggccatagctagtgccaccgaggtctcgctggctgcaactgccacccatacagctaccacccaaggccaaattaccaatgagacagccagtatccacaccacagcagcctccatccgaaccaagaaagcctccaaagccaggaagacaattgctaaggtcataaatactgacactgagcatatagaggctctaaatgtcactgacgcagctaccaggcagattgaggcctcagtagtggctatcaggcccaaaaaatccaagggcaagaaggctgccagcaggggcccaaattctgtctctgagatctctgaggccccacttgccactcagatagtcacaaaccaagccctggcagccaccctgcgggtcaagagagggtctagggctcggaaggctgccactaaggctcgggcaactgaaagccagactccaaatgctgaccaaggggcccaggccaagatagcctctgctcagaccaacgtaagtgcccttgagactcaggttgctgctgctgtccaggccctggcagatgactatctggctcagttgagcctggagcccacaaccaggacccggggcaaaagaaaccgaaagtccaagcatctgaatggggatgagagaagtggcagtaattacaggcggatcccatggggccggaggcctgcaccaccgcgagatgtggccattttacaagaaagggctaataagttggtgaaatacctgttggttaaggaccagacaaagatccccatcaaacgctcagacatgctgagggatgtcatccaagaatatgatgaatatttcccagaaatcattgaacgagcaagctacactctggagaagatgtttcgagtcaatctgaaagaaattgataagcaaagtagcttgtatattctcatcagcactcaggaatcctctgcaggcatactgggaacgaccaaggacacacccaagctgggtctcctcatggtgattctgagtgtcatttttatgaatggcaacaaggccagtgaggctgtcatctgggaggtgctgcgcaagttggggctgcgccctggggtgaggcattcactctttggggaagtgaggaagctcatcacagacgagtttgtgaagcagaagtacctggagtacaagagggtccctaacagcagaccacctgaatatgagttcttctggggcttgcgctcctaccacgagactagcaagatgaaagtcctcaagtttgcatgcagggtgcagaagaaagaccccaaggactgggctgtgcagtaccgcgaggcagtggagatggaagtccaagctgcagctgtggctgtggctgaggctgaagccagggctgaggcaagagcccaaatggggattggagaggaagctgtggctgggccctggaattgggatgacatggatatcgactgcctaacaagggaagagttaggcgatgatgctcaggcctggagcagattttcatttgaaattgaggccagagcccaagaaaatgcagatgccagcaccaacgtcaacttcagcagaggagctagtaccagggctggcttcagcgatggtgctagtattagcttcaatggtgcacccagctccagtggtggcttcagtggtggacctggcattacctttggtgttgcacccagcaccagtgccagcttcagcaatacagccagcattagctttggtggtacactgagcactagctccagcttcagcagcgcagccagcattagctttggttgtgcacacagcaccagcactagtttcagcagtgaagccagcattagctttggtggcatgccttgtaccagtgccagctttagtggtggagtcagctctagttttagtggcccactcagcaccagtgccactttcagtggtggagccagctctggctttggaggcacactcagcaccacggctggctttagtggtgtactcagcactagcaccagctttggcagtgcacccacaacgagcacagtcttcagtagtgcgcttagcaccagcactggctttggaggcatactcagcaccagtgtctgttttggtggctctcccagctccagtggtagctttggtggtacactcagtaccagtatctgcttcggtggctctccctgcaccagcactggctttggaggcacacttagcaccagtgtctcctttggtggctcttccagcaccagtgccaattttggtggtacactaagtaccagcatctgctttgatggctctcccagcactggtgctggctttggtggtgctctcaacaccagtgccagctttggcagtgtgctcaacaccagtactggttttggtggtgctatgagcaccagtgctgactttggcggtacactaagcaccagtgtctgctttggtggctctcctggcaccagtgtcagctttggcagtgcactcaacaccaatgctggttatggtggtgctgtcagcaccaacactgactttggtggtacactaagcaccagcgtctgttttggtggctctcccagcaccagtgctggctttggtggtgcactcaacaccaatgccagctttggctgtgccgtcagcaccagtgccagcttcagtggtgctgtcagcaccagtgcttgcttcagtggtgcaccaatcaccaaccctggctttggcggtgcatttagcaccagtgctggcttcggtggggcacttagtaccgctgctgacttcggtggtactcccagcaacagcattggctttggtgctgctcccagcaccagtgtcagctttggtggtgctcatggcaccagcctctgttttggtggagctcccagcaccagcctctgctttggcagtgcatctaatactaacctatgctttggtggccctcctagcaccagtgcctgctttagtggtgctaccagccctagtttttgtgatggacccagcaccagtaccggtttcagctttggcaatgggttaagcaccaatgctggatttggtggtggactgaacaccagtgctggctttggtggtggcctaggcaccagtgctggcttcagtggtggcctaagcacaagttctggctttgatggtgggctaggtaccagcgctggcttcggtggaggaccaggcaccagcactggttttggtggtggactgggcaccagtgctggcttcagtggcggactgggcaccagtgctggctttggtggtggactggtcactagtgatggctttggtggtggactgggcaccaatgctagtttcggcagcacacttggcaccagtgctggctttagtggtggcctcagcaccagcgatggctttggcagtaggcctaatgccagcttcgacagaggactgagtaccatcattggctttggcagtggttccaacaccagcactggctttactggcgaacccagcaccagcacgggcttcagtagtggacccagttctattgttggcttcagcggtggaccaagcactggtgttggcttctgcagtggaccaagcaccagtggcttcagcggtggaccgagcacaggagctggcttcggcggtggaccaaacactggtgctggctttggtggtggaccgagcaccagtgctggctttggcagtggagccgccagtcttggtgcctgtggcttctcgtatggctagtgaggtttcagatttattccccatgtttacagataccgctaataaattgcagtagtccttcccatggagccaaagtacatccttggaatctttgtccacacagcagtcaaggcagttatggccaatcagctgagggtgtcatgtgatggaaaaatctgtttgctgttcctgctttattgtttgctttctgtgtgctgtcatattttggtatcagagttacattaaatttgcaaaatgaaaaaaaaaaaaaaaaaaaaaaaaa

SEQ ID NO: 2332 - DNA, 955 bp, Homo sapiens; identical to SEQ ID NO: 1996

SEQ ID NO: 2333 - DNA, 8689 bp, Homo sapiens
ctcctctcttttggaaaccggagaggtggagggagggcaacaccgctgcaaaggagaggcccgccaagtctgcccgcctgcaaagtgttgctttgacacattcttattatggaagttaagtaaaaatatagacatattaaaaaataactccggacgtggagctgctacggagaaggaaaccgggggaaagaaaaccagtaggcaggccaatggtttttcggcagcgcgctggcaagtttgtggaacactttctaggaattaggtcttttcctcccccttcatcatcttgacttctgaaggaagaacttggctttggattgcagtggagcctaaggagagagggttagacacactcgaataatccctctggctgggctgaatttgtgggaatttaggaagccagagtgctggaaatacagcagcctttgaagtaccctctgttaatttggatggatctcagtgtgccccgttcgagacctctccaccaaccccttctgatcttgcgatttgctcttcttgactttaattagtatctaggaaagtctaaactttggacctacctctttttttgatactcatttttgtacttttgctctctgggattggtttcttaaagaatctggatcctttttaatatgtcaaaatgagtctgctgatgtttacacaactactgctctgtggatttttatatgttcgggttgatggatcgcgtcttcgccaggaggactttcccccgcggattgtggagcatccttccgatgtcatcgtctctaagggcgagcccacgactctgaactgcaaggcggagggccggccaacgcccaccattgagtggtacaaagatggggagcgagtggagactgacaaggacgatccccggtcccacaggatgcttctgcccagcggatccttattcttcttgcgcatcgtgcacgggcgcaggagtaaacctgatgaaggaagctacgtttgtgttgcgaggaactatcttggtgaagcagtgagtcgaaatgcgtctctggaagtggcattgttacgagatgacttccgacaaaaccccacagatgttgtagtggcagctggagagcctgcaatcctggagtgccagcctccccggggacacccagaacccaccatctactggaaaaaagacaaagttcgaattgatgacaaggaagaaagaataagtatccgtggtggaaaactgatgatctccaataccaggaaaagtgatgcagggatgtatacttgtgttggtaccaatatggtgggagaaagggacagtgacccagcagagctgactgtctttgaacgacccacatttctcaggaggccaattaaccaggtggtactggaggaagaagctgtagaatttcgttgtcaagtccaaggagatcctcaaccaactgtgaggtggaaaaaggatgatgcagacttgccaagaggaaggtatgacatcaaagacgattacacactaagaattaaaaagaccatgagtacagatgaaggcacctatatgtgtattgctgagaatcgggttggaaaaatggaagcctctgctacactcaccgtccgagctcccccacagtttgtggttcggccaagagatcagattgttgctcaaggtcgaacagtgacatttccctgtgaaactaaaggaaacccacagccagctgttttttggcagaaagaaggcagccagaacctacttttcccaaaccaaccccagcagcccaacagtagatgctcagtgtcaccaactggagacctcacaatcaccaacattcaacgttccgacgcgggttactacatctgccaggctttaactgtggcaggaagcattttagcaaaagctcaactggaggttactgatgttttgacagatagacctccacctataattctacaaggcccagccaaccaaacgctggcagtggatggtacagcgttactgaaatgtaaagccactggtgatcctcttcctgtaattagctggttaaaggagggatttacttttccgggtagagatccaagagcaacaattcaagagcaaggcacactgcagattaagaatttacggatttctgatactggcacttatacttgtgtggctacaagttcaagtggagagacttcctggagtgcagtgctggatgtgacagagtctggagcaacaatcagtaaaaactatgatttaagtgacctgccagggccaccatccaaaccgcaggtcactgatgttactaagaacagtgtcaccttgtcctggcagccaggtacccctggaacccttccagcaagtgcatatatcattgaggctttcagccaatcagtgagcaacagctggcagaccgtggcaaaccatgtaaagaccaccctctatactgtaagaggactgcggcccaatacaatctacttattcatggtcagagcgatcaacccccaaggtctcagtgacccaagtcccatgtcagatcctgtgcgcacacaagatatcagcccaccagcacaaggagtggaccacaggcaagtgcagaaagagctaggagatgtccttgtccgtcttcataatccagttgtgctgactcccaccacggttcaggtcacatggacggttgatcgccaaccccagtttatccaaggctaccgagtgatgtatcgtcagacttcaggtctgcaggcgacatcttcgtggcagaatttagatgccaaagtcccgactgaacgaagtgctgtcttagtcaacctgaaaaagggggtgacttatgaaattaaagtacggccatattttaatgagttccaaggaatggatagtgaatctaaaacggttcgtactactgaagaagccccaagtgccccaccacagtctgtcactgtactgacagttggaagctacaatagcacaagtattagtgtttcctgggatcctcctcctccagatcaccagaatggaattatccaagaatacaagatctggtgtctaggaaatgaaacgcgattccatatcaacaaaactgtggatgcagccattcggtccgtaataattggtggattattcccaggtattcaataccgggtagaggttgcagctagtaccagtgcaggggttggagtaaagagtgagccacagccaataataatcgggagacgcaatgaagttgtcattactgaaaacaataacagcataactgagcaaatcactgatgtggtgaagcaaccagcctttatagctggtattggtggtgcctgctgggtaattctgatgggttttagcatatggttgtattggcgaagaaagaagaggaagggactcagtaattatgctgttacgtttcaaagaggagatggaggactaatgagcaatggaagccgtccaggtcttctcaatgctggtgatcccagctatccatggcttgctgattcttggccagccacgagcttgccagtaaataatagcaacagtggcccaaatgagattggaaattttggccgtggagatgtgctgccaccagttccaggccaaggggataaaacagcaacgatgctctcagatggagccatttatagtagcattgacttcactaccaaaaccagttacaacagttccagccaaataacacaggctaccccatatgccacgacacagatcttgcattccaacagcatacatgaattggctgtcgatctgcctgatccacaatggaaaagctcaattcagcaaaaaacagatctgatgggatttggttattctctacctgatcagaacaaaggtaacaatggtgggaaaggtggaaaaaagaagaaaaataaaaactcttctaaaccacagaaaaacaatggatccacttgggccaatgtccctctacctccccccccagtccagccccttcctggcacggagctggaacactatgcagtggaacaacaagaaaatggctatgacagtgatagctggtgcccaccattgccagtacaaacttacttacaccaaggtctggaagatgaactggaagaagatgatgatagggtcccaacacctcctgttcgaggcgtggcttcttctcctgctatctcctttggacagcagtccactgcaactcttactccatccccacgggaagagatgcaacccatgctgcaggctcacctggatgagttgacaagagcctatcagtttgatatagcaaaacaaacatggcacattcaaagcaataatcaacctccacagcctccagttccaccgttaggttatgtgtctggagccttgatttctgatttggaaacggatgttgcagatgatgatgccgacgacgaagaggaagctttagaaatccccaggcccctgagagcactggaccagactcctggatccagcatggacaatctagacagctctgtgacaggaaaagcctttacctcctctcaaagacctcgacctaccagcccattttctactgacagtaacaccagtgcagccctgagtcaaagtcagaggcctcggcccactaaaaaacacaagggagggcggatggaccaacaaccagcattgcctcatcgaagggaaggaatgacagatgaggaggccttggtgccctatagcaagcccagtttcccatctccaggtggccacagctcatcaggaacagcttcttctaagggatccactggacctaggaaaaccgaggtgttgagagcaggccaccagcgcaatgccagcgaccttcttgacataggatatatgggctccaacagtcaaggacagtttacaggtgaattatagtaaatgagaggagacatacaaagctgctctgaaggaccatcaggtccggactcatggaagtgatgactctaaacagtgcaatgaacaatttatttatgtactattaaaagaactgtaaatgcaatgtaaagacacacagccacacatatcccacagatattttcattgtgttcttctcttaagtacaccacccaccttaactctttcttgtcaggagtatataaaaaagaaagaaaacaaaactcgccctacaggaagaaaaggattctcctctgtatataatttcttttgtgcattgctatgcaagctcactctttttagctctgctcatattattgtctgttcttattggtctgttgtactatatgtgaattaataggctgtggtgccatatattaacttttaattgtgtaacttttatgtttaaattttgcactgcaattttatttggtgataagcacaaatctctactcctcatgacatgaagaaaaagactgaatgtgaagggagtttctgtactgtaagctagattggataatgatggctgtaacaaatcatgttagatggttttcagttggggtgtagaaataggaagatgcaaaggaacaatggtgttggcaaagtcttctttgaatatcagggactgagtcaataaaaaaaatagtagaaaggtggcttttactattgacaaaagccggggtcaaaaaaagtagtttaagtcttaagactgaatatgcattaaagtatgcaggtagcaaagatgtaataaatttgcttaaaaaaagaaattaaagttttatttagaatcaattttacctgtcattgtaattgacccatctgagaattacaataagcaagaggaaattaaggtgttttgcaagagctgtatttatattacagttttttaaaaacattttctgaattatcgtaattaagctctccaactcgttaagtcagaatataatatgaagttccccaaggaaacgaacaaaatgaactctagaatatctagcaaatagttaaagaagcaatttattattagggcatactcgggctgtttccaaatataaactctattgcaatatcttatttcatctttctaatacatgtacagtgcacactagaggatagagctgcatcacttaaattcatgacttaaaaaataatacagtttatatacaacttgttttttatttgattaagaagtgaagtttacgccacccaatgtatagccaaattgtacgtgcttaaaaaacagtgccgagagtatgttcagttcgcagtaagtagatttattggaataaatattctatggtacattctcagaaattggcttccaactaaaatacgtttgacccattttgaataaggaaattgaaaagaaaaatttaaaaggagaaaaaaatgcatgtttataaactttttaaataaaaccagaccttgtaagtggacattaataattgtcctgcctcatttgttttcacgactttgacaacaagaagttcctgaacattagtcatgtatgctcagaataaatgtgactttgaaatatatgttagctactgtacatgtatagtcagtcaagtagaagaggaccttcctgaaattcccacttgtgacattttcccatgggtttcctacacaatcttaaattttatttctgtctatactttctcaaatttttcctatgataagttcagttgttggtactcttctaaaaatattcaacgtgattaggatcagttctaaaatacgggacccctttgagtgacaattcgcactccatgcattattggctcagtagccaatttttgtcacgtcgttataacaaggagatgacataattaaacatttccatcctttctattccctgagactgcatcagcacaggcaagtatagaatgtaatgttcttcatgggccccaccagctttttggtgccatgtaatttatttcttcgctgaagagaaaaagaattctgagacacagttattaaaccctttatcaactttctaccatcagtgcctgaattctaatgcagtgtgatttctctgggacaaagagactgaggaagatgaaaagtttcttcaaagagtgaatacatacttattcacaactctaggatgtgaggactttaaatatctctttatgaagttccctgcctaacctctttctatttaaaggcaaacaaatttcgaagaggttttgtgttccctctttatgtttctctatgacccagtttagtctaaaaccttagttcattacatatacaacacatagcctttgatccctggtaactggcaggtgttggtgattaataaaccaaggcttcaaagtgaagtatgtgtgtgcagatgacttttggaataacgtgggcatagcatcataccttcctgattgtcttcagcatataaaaattaactgttgtagttaaaattatgtcagtgcagagcttgtggttacttggaatgttctttcagaatagtccatgttgcctattaaacctagttttaaacacattgggcagtcaatttatgcacccaaaatatcaccctcaggtagattgagggcaagataaaatgctgtatgtagctatacaaaggaattcagaaacattactggaaagcaaagcctttgtcagcttgctactgacaaagtagtaaaaagctactaatcagtgttgagtcagatgtcaacagaaaaatacaaatacctatgagagccacagcagtttctcgtttcatagccgattcaatgaatatgattagaaattcactgagctcactcttgcaggtttaaatggaggcctgcataaggactgcaagaggaaatctgggtgggagagaatgtaatctgatcttgcactcataggcaatgctgcaatgcaatcatgtccaatacaagcacagcttcattcataacaggaaacgtcttctttgggaaaatagctctattggtgcccaaactcaggtatgccagtgtatgcaggtggagtcgccctacccctcttccaaacatgtcctgtgagatttttaaaataagatgggatagtacaggggcatgaaaagaattgattccttcacaggatttgaatccagttcaagggagaatgtagaaaattcaaaaccaacatataaggtatcacacaaccaagaaaagtaaaaccattgcaagtttacttgcgttgagtacaaaacagatttaatggtgttctatgtcatagtttaatgctctgggtatttaaatatgttttcaacaggatttgagttgaaagtttgtaatgtgctttgatggaacacctctcaatttctattcaataaacttatgtaattgtccattgacaatataatgataacagtaccattgaactctaaactgtggtttatcttcactactgggaagcaactgtgcatcagtattaaagatatgcagaaacataatattcactaatttgttcatctgcttctgtatattgtttatggaattacatggcaagaactgttctaaagcaacatgtctttccacattattttagaggtgaaattacttttgttttgcttctctataatgtgtacttcaaatgaaacaccatacttttttctaaaaaaagatgttcaatttactaatttttttaaatctcataatttaaaaagcatttgttgtgattttaaagtgttgcaagaaaagggattttgtggccgtgggtagactttttatactttgttttatagatggattttttttaactgtagtttgtttaagtcaccaagcagcatccaaaatcttaatgtgtttcatttgatgttgttagatcagagaagaaattggcataaaatcggttaatagtattgtcaaagaattgtgtattgtgtactcactgggaaaaaataaaatatattcacatttcaaa

SEQ ID NO: 2334 - DNA, 1599 bp, Homo sapiens; identical to SEQ ID NO: 804

SEQ ID NO: 2335 - DNA, 1698 bp, Homo sapiens
ctgcctggggagcccccccgccccacatcctgccccgcaaaaggcagcttcaccaaagtggggtatttccagcctttgtagctttcacttccacatctaccaagtgggcggagtggccttctgtggacgaatcagattcctctccagcaccgactttaagaggcgagccggggggtcagggtcccagatgcacaggaggagaagcaggagctgtcgggaagatcagaagccagtcatggatgaccagcgcgaccttatctccaacaatgagcaactgcccatgctgggccggcgccctggggccccggagagcaagtgcagccgcggagccctgtacacaggcttttccatcctggtgactctgctcctcgctggccaggccaccaccgcctacttcctgtaccagcagcagggccggctggacaaactgacagtcacctcccagaacctgcagctggagaacctgcgcatgaagcttcccaagcctcccaagcctgtgagcaagatgcgcatggccaccccgctgctgatgcaggcgctgcccatgggagccctgccccaggggcccatgcagaatgccaccaagtatggcaacatgacagaggaccatgtgatgcacctgctccagaatgctgaccccctgaaggtgtacccgccactgaaggggagcttcccggagaacctgagacaccttaagaacaccatggagaccatagactggaaggtctttgagagctggatgcaccattggctcctgtttgaaatgagcaggcactccttggagcaaaagcccactgacgctccaccgaaagtactgaccaagtgccaggaagaggtcagccacatccctgctgtccacccgggttcattcaggcccaagtgcgacgagaacggcaactatctgccactccagtgctatgggagcatcggctactgctggtgtgtcttccccaacggcacggaggtccccaacaccagaagccgcgggcaccataactgcagtgagtcactggaactggaggacccgtcttctgggctgggtgtgaccaagcaggatctgggcccagtccccatgtgagagcagcagaggcggtcttcaacatcctgccagccccacacagctacagctttcttgctcccttcagcccccagcccctcccccatctcccaccctgtacctcatcccatgagaccctggtgcctggctctttcgtcacccttggacaagacaaaccaagtcggaacagcagataacaatgcagcaaggccctgctgcccaatctccatctgtcaacaggggcgtgaggtcccaggaagtggccaaaagctagacagatccccgttcctgacatcacagcagcctccaacacaaggctccaagacctaggctcatggacgagatgggaaggcacagggagaagggataaccctacacccagaccccaggctggacatgctgactgtcctctcccctccagcctttggccttggcttttctagcctatttacctgcaggctgagccactctcttccctttccccagcatcactccccaaggaagagccaatgttttccacccataatcctttctgccgacccctagttccctctgctcagccaagcttgttatcagctttcagggccatggttcacattagaataaaaggtagtaattagaacaaaaaaaaaaaaaaaaaa

SEQ ID NO: 2336 - DNA, 3409 bp, Homo sapiens; identical to SEQ ID NO: 2298

SEQ ID NO: 2337 - DNA, 3982 bp, Homo sapiens
gagaaatccatgactcacatatatcgtccgtcatccccagtcaagctcagggaggagggaggagcccagctggggcaggagaggggtgtctccccaccaaacaaacccggtccctccctctccgcactagctgtctgccctgccctgccgtaggagatgggctgggagcctcccacgctctccagctcactcggcaggcagcggggaccagggctggcaggttaagcctctgggggtggatcctgaaaggtggtccagccgcctggccctgcgtgggaccctccacctggcagcagacagggtctcgctctgtcacacaggctggagtgcagtggtgtgatcttggctcatcgtaacctccacctcccgggttcaagtgattctcatgcctcagcctcccgagtagctgggattacaggtggtgacttccaagagtgactccgtcggaggaaaatgactccccagtcgctgctgcagacgacactgttcctgctgagtctgctcttcctggtccaaggtgcccacggcaggggccacagggaagactttcgcttctgcagccagcggaaccagacacacaggagcagcctccactacaaacccacaccagacctgcgcatctccatcgagaactccgaagaggccctcacagtccatgcccctttccctgcagcccaccctgcttcccgatccttccctgaccccaggggcctctaccacttctgcctctactggaaccgacatgctgggagattacatcttctctatggcaagcgtgacttcttgctgagtgacaaagcctctagcctcctctgcttccagcaccaggaggagagcctggctcagggccccccgctgttagccacttctgtcacctcctggtggagccctcagaacatcagcctgcccagtgccgccagcttcaccttctccttccacagtcctccccacacggccgctcacaatgcctcggtggacatgtgcgagctcaaaagggacctccagctgctcagccagttcctgaagcatccccagaaggcctcaaggaggccctcggctgcccccgccagccagcagttgcagagcctggagtcgaaactgacctctgtgagattcatgggggacatggtgtccttcgaggaggaccggatcaacgccacggtgtggaagctccagcccacagccggcctccaggacctgcacatccactcccggcaggaggaggagcagagcgagatcatggagtactcggtgctgctgcctcgaacactcttccagaggacgaaaggccggagcggggaggctgagaagagactcctcctggtggacttcagcagccaagccctgttccaggacaagaattccagccaagtcctgggtgagaaggtcttggggattgtggtacagaacaccaaagtagccaacctcacggagcccgtggtgctcactttccagcaccagctacagccgaagaatgtgactctgcaatgtgtgttctgggttgaagaccccacattgagcagcccggggcattggagcagtgctgggtgtgagaccgtcaggagagaaacccaaacatcctgcttctgcaaccacttgacctactttgcagtgctgatggtctcctcggtggaggtggacgccgtgcacaagcactacctgagcctcctctcctacgtgggctgtgtcgtctctgccctggcctgccttgtcaccattgccgcctacctctgctccaggaggaaacctcgggactacaccatcaaggtgcacatgaacctgctgctggccgtcttcctgctggacacgagcttcctgctcagcgagccggtggccctgacaggctctgaggctggctgccgagccagtgccatcttcctgcacttctccctgctcacctgcctttcctggatgggcctcgaggggtacaacctctaccgactcgtggtggaggtctttggcacctatgtccctggctacctactcaagctgagcgccatgggctggggcttccccatctttctggtgacgctggtggccctggtggatgtggacaactatggccccatcatcttggctgtgcataggactccagagggcgtcatctacccttccatgtgctggatccgggactccctggtcagctacatcaccaacctgggcctcttcagcctggtgtttctgttcaacatggccatgctagccaccatggtggtgcagatcctgcggctgcgcccccacacccaaaagtggtcacatgtgctgacactgctgggcctcagcctggtccttggcctgccctgggccttgatcttcttctcctttgcttctggcaccttccagcttgtcgtcctctaccttttcagcatcatcacctccttccaaggcttcctcatcttcatctggtactggtccatgcggctgcaggcccggggtggcccctcccctctgaagagcaactcagacagcgccaggctccccatcagctcgggcagcacctcgtccagccgcatctaggcctccagcccacctgcccatgtgatgaagcagagattcggcctcgtcgcacactgcctgtggcccccgagcccggcccagccccaggccagtcagccgcagactttggaaagcccaacgaccatggagagatgggccgttgccatggtggacggactcccgggctgggcttttgaattggccttggggactactcggctctcactcagctcccacgggactcagaagtgcgccgccatgctgcctagggtactgtccccacatctgtcccaacccagctggaggcctggtctctccttacaacccctgggcccagccctcattgctgggggccaggccttggatcttgagggtctggcacatccttaatcctgtgcccctgcctgggacagaaatgtggctccagttgctctgtctctcgtggtcaccctgagggcactctgcatcctctgtcattttaacctcaggtggcacccagggcgaatggggcccagggcagaccttcagggccagagccctggcggaggagaggccctttgccaggagcacagcagcagctcgcctacctctgagcccaggccccctccctccctcagccccccagtcctccctccatcttccctggggttctcctcctctcccagggcctccttgctccttcgttcacagctgggggtccccgattccaatgctgttttttggggagtggtttccaggagctgcctggtgtctgctgtaaatgtttgtctactgcacaagcctcggcctgcccctgagccaggctcggtaccgatgcgtgggctgggctaggtccctctgtccatctgggcctttgtatgagctgcattgcccttgctcaccctgaccaagcacacgcctcagaggggccctcagcctctcctgaagccctcttgtggcaagaactgtggaccatgccagtcccgtctggtttccatcccaccactccaaggactgagactgacctcctctggtgacactggcctagggcctgacactctcctaagaggttctctccaagcccccaaatagctccaggcgccctcggccgcccatcatggttaattctgtccaacaaacacacacgggtagattgctggcctgttgtaggtggtagggacacagatgaccgacctggtcactcctcctgccaacattcagtctggtatgtgaggcgtgcgtgaagcaagaactcctggagctacagggacagggagccatcattcctgcctgggaatcctggaagacttcctgcaggagtcagcgttcaatcttgaccttgaagatgggaaggatgttctttttacgtaccaattcttttgtcttttgatattaaaaagaagtacatgttcattgtagagaatttggaaactgtagaagagaatcaagaagaaaaataaaaatcagctgttgtaatcacctagcaaactggaaaaaaaaaaaaaaa

SEQ ID NO: 2338 - DNA, 2080 bp, Homo sapiens; identical to SEQ ID NO: 816

SEQ ID NO: 2339 - DNA, 2605 bp, Homo sapiens; identical to SEQ ID NO: 2302

SEQ ID NO: 2340 - DNA, 2397 bp, Homo sapiens; identical to SEQ ID NO: 2305

SEQ ID NO: 2341 - DNA, 5608 bp, Homo sapiens
aagacggattctcagacaaggcttgcaaatgccccgcagccatcatttaactgcacccgcagaatagttacggtttgtcacccgaccctcccggatcgcctaatttgtccctagtgagaccccgaggctctgcccgcgcctggcttcttcgtagctggatgcatatcgtgctccgggcagcgcgggcgcagggcacgcgttcgcgcacaccctagcacacatgaacacgcgcaagagctgaaccaagcacggtttccatttcaaaaagggagacagcctctaccgcgattgtagaagagactgtggtgtgaattagggaccgggaggcgtcgaacggaggaacggttcatcttagagactaattttctggagtttctgcccctgctctgcgtcagccctcacgtcacttcgccagcagtagcagaggcggcggcggcggctcccggaattgggttggagcaggagcctcgctggctgcttcgctcgcgctctacgcgctcagtccccggcggtagcaggagcctggacccaggcgccgccggcgggcgtgaggcgccggagcccggcctcgaggtgcataccggacccccattcgcatctaacaaggaatctgcgccccagagagtcccgggagcgccgccggtcggtgcccggcgcgccgggccatgcagcgacggccgccgcggagctccgagcagcggtagcgcccccctgtaaagcggttcgctatgccggggccactgtgaaccctgccgcctgccggaacactcttcgctccggaccagctcagcctctgataagctggactcggcacgcccgcaacaagcaccgaggagttaagagagccgcaagcgcagggaaggcctccccgcacgggtgggggaaagcggccggtgcagcgcggggacaggcactcgggctggcactggctgctagggatgtcgtcctggataaggtggcatggacccgccatggcgcggctctggggcttctgctggctggttgtgggcttctggagggccgctttcgcctgtcccacgtcctgcaaatgcagtgcctctcggatctggtgcagcgacccttctcctggcatcgtggcatttccgagattggagcctaacagtgtagatcctgagaacatcaccgaaattttcatcgcaaaccagaaaaggttagaaatcatcaacgaagatgatgttgaagcttatgtgggactgagaaatctgacaattgtggattctggattaaaatttgtggctcataaagcatttctgaaaaacagcaacctgcagcacatcaattttacccgaaacaaactgacgagtttgtctaggaaacatttccgtcaccttgacttgtctgaactgatcctggtgggcaatccatttacatgctcctgtgacattatgtggatcaagactctccaagaggctaaatccagtccagacactcaggatttgtactgcctgaatgaaagcagcaagaatattcccctggcaaacctgcagatacccaattgtggtttgccatctgcaaatctggccgcacctaacctcactgtggaggaaggaaagtctatcacattatcctgtagtgtggcaggtgatccggttcctaatatgtattgggatgttggtaacctggtttccaaacatatgaatgaaacaagccacacacagggctccttaaggataactaacatttcatccgatgacagtgggaagcagatctcttgtgtggcggaaaatcttgtaggagaagatcaagattctgtcaacctcactgtgcattttgcaccaactatcacatttctcgaatctccaacctcagaccaccactggtgcattccattcactgtgaaaggcaaccccaaaccagcgcttcagtggttctataacggggcaatattgaatgagtccaaatacatctgtactaaaatacatgttaccaatcacacggagtaccacggctgcctccagctggataatcccactcacatgaacaatggggactacactctaatagccaagaatgagtatgggaaggatgagaaacagatttctgctcacttcatgggctggcctggaattgacgatggtgcaaacccaaattatcctgatgtaatttatgaagattatggaactgcagcgaatgacatcggggacaccacgaacagaagtaatgaaatcccttccacagacgtcactgataaaaccggtcgggaacatctctcggtctatgctgtggtggtgattgcgtctgtggtgggattttgccttttggtaatgctgtttctgcttaagttggcaagacactccaagtttggcatgaaagatttctcatggtttggatttgggaaagtaaaatcaagacaaggtgttggcccagcctccgttatcagcaatgatgatgactctgccagcccactccatcacatctccaatgggagtaacactccatcttcttcggaaggtggcccagatgctgtcattattggaatgaccaagatccctgtcattgaaaatccccagtactttggcatcaccaacagtcagctcaagccagacacatttgttcagcacatcaagcgacataacattgttctgaaaagggagctaggcgaaggagcctttggaaaagtgttcctagctgaatgctataacctctgtcctgagcaggacaagatcttggtggcagtgaagaccctgaaggatgccagtgacaatgcacgcaaggacttccaccgtgaggccgagctcctgaccaacctccagcatgagcacatcgtcaagttctatggcgtctgcgtggagggcgaccccctcatcatggtctttgagtacatgaagcatggggacctcaacaagttcctcagggcacacggccctgatgccgtgctgatggctgagggcaacccgcccacggaactgacgcagtcgcagatgctgcatatagcccagcagatcgccgcgggcatggtctacctggcgtcccagcacttcgtgcaccgcgatttggccaccaggaactgcctggtcggggagaacttgctggtgaaaatcggggactttgggatgtcccgggacgtgtacagcactgactactacagggtcggtggccacacaatgctgcccattcgctggatgcctccagagagcatcatgtacaggaaattcacgacggaaagcgacgtctggagcctgggggtcgtgttgtgggagattttcacctatggcaaacagccctggtaccagctgtcaaacaatgaggtgatagagtgtatcactcagggccgagtcctgcagcgaccccgcacgtgcccccaggaggtgtatgagctgatgctggggtgctggcagcgagagccccacatgaggaagaacatcaagggcatccataccctccttcagaacttggccaaggcatctccggtctacctggacattctaggctagggcccttttccccagaccgatccttcccaacgtactcctcagacgggctgagaggatgaacatcttttaactgccgctggaggccaccaagctgctctccttcactctgacagtattaacatcaaagactccgagaagctctcgagggaagcagtgtgtacttcttcatccatagacacagtattgacttctttttggcattatctctttctctctttccatctcccttggttgttcctttttctttttttaaattttctttttcttttttttttcgtcttccctgcttcacgattcttaccctttcttttgaatcaatctggcttctgcattactattaactctgcatagacaaaggccttaacaaacgtaatttgttatatcagcagacactccagtttgcccaccacaactaacaatgccttgttgtattcctgcctttgatgtggatgaaaaaaagggaaaacaaatatttcacttaaactttgtcacttctgctgtacagatatcgagagtttctatggattcacttctatttatttattattattactgttcttattgtttttggatggcttaagcctgtgtataaaaaagaaaacttgtgttcaatctgtgaagcctttatctatgggagattaaaaccagagagaaagaagatttattatgaaccgcaatatgggaggaacaaagacaaccactgggatcagctggtgtcagtccctacttaggaaatactcagcaactgttagctgggaagaatgtattcggcaccttcccctgaggacctttctgaggagtaaaaagactactggcctctgtgccatggatgattcttttcccatcaccagaaatgatagcgtgcagtagagagcaaagatggcttccgtgagacacaagatggcgcatagtgtgctcggacacagttttgtcttcgtaggttgtgatgatagcactggtttgtttctcaagcgctatccacagaacctttgtcaacttcagttgaaaagaggtggattcatgtccagagctcatttcggggtcaggtgggaaagccaagaacttggaaaagataagacaagctataaattcggaggcaagtttcttttacaatgaacttttcagatctcacttccctccgacccctaacttccatgcccacccgtccttttaactgtgcaagcaaaattgtgcatggtcttcgtcgattaataccttgtgtgcagacactactgctccagacgtcgtttccctgataggtagagcagatccataaaaaggtatgacttatacaattaggggaagctaatggagtttattagctgagtatcaatgtctctgcgttgtacggtggtgatgggttttaatgaatatggaccctgaagcctggaaatcctcatccacgtcgaacccacaggactgtgggaagggcagaatcaatccctaagggaaaggaaacctcaccctgagggcatcacatgcactcatgttcagtgtacacaggtcaagtcccttgctctgggctctagttgggagagtggtttcattccaagtgtactccattgtcagtatgctgtttttgtttccttcactccattcaaaaagtcaaaatacaaaatttggcacagcatgccaacgggaggctgtgcccagaccaagcactggaagtgtgcttctaggcatagtcattggttttgcaaaaagagggctcaaatttaaatagaaatttacagctatttgaatggtcagatataccaagaaagaaaaatatttctgttcctcaagaaaacttgctaccctctgtgaggggaattttgctaaacttgacatctttataacatgagccagattgaaagggagtgattttcattcatcttaggtcatgttatttcatatttgtttctgaaggtgcgatagctctgttttaggttttgcttgcgcctgttaattactggaacaccttatttttcattaaaggctttgaaagccaattctcaaaaattcaaaagtgcaaattaacagaacaaaaggaaatccagtagcaactgcagtcaagcgagggagttgacaagataaaccttacgtccattcaagttatatgctggcctatgagagatgagagttgggtcgtttgttctctttgttgatgattt

SEQ ID NO: 2342 - DNA, 1270 bp, Homo sapiens
agacgttcgcacacctgggtgccagcgccccagaggtcccgggacagcccgaggcgccgcgcccgccgccccgagctccccaagccttcgagagcggcgcacactcccggtctccactcgctcttccaacacccgctcgttttggcggcagctcgtgtcccagagaccgagttgccccagagaccgagacgccgccgctgcgaaggaccaatgagagccccgctgctaccgccggcgccggtggtgctgtcgctcttgatactcggctcaggccattatgctgctggattggacctcaatgacacctactctgggaagcgtgaaccattttctggggaccacagtgctgatggatttgaggttacctcaagaagtgagatgtcttcagggagtgagatttcccctgtgagtgaaatgccttctagtagtgaaccgtcctcgggagccgactatgactactcagaagagtatgataacgaaccacaaatacctggctatattgtcgatgattcagtcagagttgaacaggtagttaagcccccccaaaacaagacggaaagtgaaaatacttcagataaacccaaaagaaagaaaaagggaggcaaaaatggaaaaaatagaagaaacagaaagaagaaaaatccatgtaatgcagaatttcaaaatttctgcattcacggagaatgcaaatatatagagcacctggaagcagtaacatgcaaatgtcagcaagaatatttcggtgaacggtgtggggaaaagtccatgaaaactcacagcatgattgacagtagtttatcaaaaattgcattagcagccatagctgcctttatgtctgctgtgatcctcacagctgttgctgttattacagtccagcttagaagacaatacgtcaggaaatatgaaggagaagctgaggaacgaaagaaacttcgacaagagaatggaaatgtacatgctatagcataactgaagataaaattacaggatatcacattggagtcactgccaagtcatagccataaatgatgagtcggtcctctttccagtggatcataagacaatggaccctttttgttatgatggttttaaactttcaattgtcactttttatgctatttctgtatataaaggtgcacgaaggtaaaaagtattttttcaagttgtaaataatttatttaatatttaatggaagtgtatttattttacagctcattaaacttttttaaccaaacagaaaaaaaaaaaaaaaaaaaaaaaaaaaaaaaaa

SEQ ID NO: 2343 - DNA, 4293 bp, Homo sapiens
gtttctcatagttggcgtcttctaaaggaaaaacactaaaatgaggaactcagcggaccgggagcgacgcagcttgagggaagcatccctagctgttggcgcagaggggcgaggctgaagccgagtggcccgaggtgtctgaggggctggggcaaaggtgaaagagtttcagaacaagcttcctggaacccatgacccatgaagtcttgtcgacatttataccgtctgagggtagcagctcgaaagtagaagaagtggagtgttgccagggacggcagtatctctttgtgtgaccctggcggcttatgggacgttggcttcagacctttgtgatacaccatgctgcgtgggacgatgacggcgtggagaggaatgaggcctgaggtcacactggcttgcctcctcctagccacagcaggctgctttgctgacttgaacgaggtccctcaggtcaccgtccagcctgcgtccaccgtccagaagcccggaggcactgtgatcttgggctgcgtggtggaacctccaaggatgaatgtaacctggcgcctgaatggaaaggagctgaatggctcggatgatgctctgggtgtcctcatcacccacgggaccctcgtcatcactgcccttaacaaccacactgtgggacggtaccagtgtgtggcccggatgcctgcgggggctgtggccagcgtgccagccactgtgacactagccaatctccaggacttcaagttagatgtgcagcacgtgattgaagtggatgagggaaacacagcagtcattgcctgccacctgcctgagagccaccccaaagcccaggtccggtacagcgtcaaacaagagtggctggaggcctccagaggtaactacctgatcatgccctcagggaacctccagattgtgaatgccagccaggaggacgagggcatgtacaagtgtgcagcctacaacccagtgacccaggaagtgaaaacctccggctccagcgacaggctacgtgtgcgccgctccaccgctgaggctgcccgcatcatctaccccccagaggcccaaaccatcatcgtcaccaaaggccagagtctcattctggagtgtgtggccagtggaatcccacccccacgggtcacctgggccaaggatgggtccagtgtcaccggctacaacaagacgcgcttcctgctgagcaacctcctcatcgacaccaccagcgaggaggactcaggcacctaccgctgcatggccgacaatggggttgggcagcccggggcagcggtcatcctctacaatgtccaggtgtttgaaccccctgaggtcaccatggagctatcccagctggtcatcccctggggccagagtgccaagcttacctgtgaggtgcgtgggaaccccccgccctccgtgctgtggctgaggaatgctgtgcccctcatctccagccagcgcctccggctctcccgcagggccctgcgcgtgctcagcatggggcctgaggacgaaggcgtctaccagtgcatggccgagaacgaggttgggagcgcccatgccgtagtccagctgcggacctccaggccaagcataaccccaaggctatggcaggatgctgagctggctactggcacacctcctgtatcaccctccaaactcggcaaccctgagcagatgctgagggggcaaccggcgctccccagacccccaacgtcagtggggcctgcttccccgcagtgtccaggagagaaggggcagggggctcccgccgaggctcccatcatcctcagctcgccccgcacctccaagacagactcatatgaactggtgtggcggcctcggcatgagggcagtggccgggcgccaatcctctactatgtggtgaaacaccgcaaggtcacaaattcctctgacgattggaccatctctggcattccagccaaccagcaccgcctgaccctcaccagacttgaccccgggagcttgtatgaagtggagatggcagcttacaactgtgcgggagagggccagacagccatggtcaccttccgaactggacggcggcccaaacccgagatcatggccagcaaagagcagcagatccagagagacgaccctggagccagtccccagagcagcagccagccagaccacggccgcctctcccccccagaagctcccgacaggcccaccatctccacggcctccgagacctcagtgtacgtgacctggattccccgtgggaatggtgggttcccaatccagtccttccgtgtggagtacaagaagctaaagaaagtgggagactggattctggccaccagcgccatccccccatcgcggctgtccgtggagatcacgggcctagagaaaggcacctcctacaagtttcgagtccgggctctgaacatgctgggggagagcgagcccagcgccccctctcggccctacgtggtgtcgggctacagcggtcgcgtgtacgagaggcccgtggcaggtccttatatcaccttcacggatgcggtcaatgagaccaccatcatgctcaagtggatgtacatcccagcaagtaacaacaacaccccaatccatggcttttatatctattatcgacccacagacagtgacaatgatagtgactacaagaaggatatggtggaaggggacaagtactggcactccatcagccacctgcagccagagacctcctacgacattaagatgcagtgcttcaatgaaggaggggagagcgagttcagcaacgtgatgatctgtgagaccaaagctcggaagtcttctggccagcctggtcgactgccacccccaactctggccccaccacagccgccccttcctgaaaccatagagcggccggtgggcactggggccatggtggctcgctccagcgacctgccctatctgattgtcggggtcgtcctgggctccatcgttctcatcatcgtcaccttcatccccttctgcttgtggagggcctggtctaagcaaaaacatacaacagacctgggttttcctcgaagtgcccttccaccctcctgcccgtatactatggtgccattgggaggactcccaggccaccaggccagtggacagccctacctcagtggcatcagtggacgggcctgtgctaatgggatccacatgaataggggctgcccctcggctgcagtgggctacccgggcatgaagccccagcagcactgcccaggcgagcttcagcagcagagtgacaccagcagcctgctgaggcagacccatcttggcaatggatatgacccccaaagtcaccagatcacgaggggtcccaagtctagcccggacgagggctctttcttatacacactgcccgacgactccactcaccagctgctgcagccccatcacgactgctgccaacgccaggagcagcctgctgctgtgggccagtcaggggtgaggagagcccccgacagtcctgtcctggaagcagtgtgggaccctccatttcactcagggcccccatgctgcttgggccttgtgccagttgaagaggtggacagtcctgactcctgccaagtgagtggaggagactggtgtccccagcaccccgtaggggcctacgtaggacaggaacctggaatgcagctctccccggggccactggtgcgtgtgtcttttgaaacaccacctctcacaatttaggcagaagctgatatcccagaaagactatatattgttttttttttaaaaaaaaaaagaagaaaaaagagacagagaaaattggtatttatttttctattatagccatatttatatatttatgcacttgtaaataaatgtatatgttttataattctggagagacataaggagtcctacccgttgaggttggagagggaaaataaagaagctgccacctaacaggagtcacccaggaaagcaccgcacaggctggcgcgggacagactcctaacctggggcctctgcagtggcaggcgaggctgcaggaggcccacagataagctggcaagaggaaggatcccaggcacatggttcatcacgagcatgagggaacagcaaggggcacggtatcacagcctggagacacccacacagatggctggatccggtgctacgggaaacattttcctaagatgcccatgagaacagaccaagatgtgtacagcactatgagcattaaaaaaccttccagaatcaataatccgtggcaacatatctctgtaaaaacaaacactgtaacttctaaataaatgtttagtcttccctgtaaccttcaaaaaaaaaaaaaaa

SEQ ID NO: 2344 - DNA, 6082 bp, Homo sapiens
ataacgtctttgtcactaaaatgttccccaggggccttcggcgagtctttttgtttggttttttgtttttaatctgtggctcttgataatttatctagtggttgcctacacctgaaaaacaagacacagtgtttaactatcaacgaaagaactggacggctccccgccgcagtcccactccccgagtttgtggctggcatttgggccacgccgggctgggcggtcacagcgaggggcgcgcagtttggggtcacacagctccgcttctaggccccaaccaccgttaaaaggggaagcccgtgccccatcaggtccgctcttgctgagcccagagccatcccgcgctctgcgggctgggaggcccgggccaggacgcgagtcctgcgcagccgaggttccccagcgccccctgcagccgcgcgtaggcagagacggagcccggccctgcgcctccgcaccacgcccgggaccccacccagcggcccgtacccggagaagcagcgcgagcacccgaagctcccggctggcggcagaaaccgggagtggggccgggcgagtgcgcggcatcccaggccggcccgaacgctccgcccgcggtgggccgacttcccctcctcttccctctctccttcctttagcccgctggcgccggacacgctgcgcctcatctcttggggcgttcttccccgttggccaaccgtcgcatcccgtgcaactttggggtagtggccgtttagtgttgaatgttccccaccgagagcgcatggcttgggaagcgaggcgcgaacccggcccccgaagggccgccgtccgggagacggtgatgctgttgctgtgcctgggggtcccgaccggccgcccctacaacgtggacactgagagcgcgctgctttaccagggcccccacaacacgctgttcggctactcggtcgtgctgcacagccacggggcgaaccgatggctcctagtgggtgcgcccactgccaactggctcgccaacgcttcagtgatcaatcccggggcgatttacagatgcaggatcggaaagaatcccggccagacgtgcgaacagctccagctgggtagccctaatggagaaccttgtggaaagacttgtttggaagagagagacaatcagtggttgggggtcacactttccagacagccaggagaaaatggatccatcgtgacttgtgggcatagatggaaaaatatattttacataaagaatgaaaataagctccccactggtggttgctatggagtgccccctgatttacgaacagaactgagtaaaagaatagctccgtgttatcaagattatgtgaaaaaatttggagaaaattttgcatcatgtcaagctggaatatccagtttttacacaaaggatttaattgtgatgggggccccaggatcatcttactggactggctctctttttgtctacaatataactacaaataaatacaaggcttttttagacaaacaaaatcaagtaaaatttggaagttatttaggatattcagtcggagctggtcattttcggagccagcatactaccgaagtagtcggaggagctcctcaacatgagcagattggtaaggcatatatattcagcattgatgaaaaagaactaaatatcttacatgaaatgaaaggtaaaaagcttggatcgtactttggagcttctgtctgtgctgtggacctcaatgcagatggcttctcagatctgctcgtgggagcacccatgcagagcaccatcagagaggaaggaagagtgtttgtgtacatcaactctggctcgggagcagtaatgaatgcaatggaaacaaacctcgttggaagtgacaaatatgctgcaagatttggggaatctatagttaatcttggcgacattgacaatgatggctttgaagatgttgctatcggagctccacaagaagatgacttgcaaggtgctatttatatttacaatggccgtgcagatgggatctcgtcaaccttctcacagagaattgaaggacttcagatcagcaaatcgttaagtatgtttggacagtctatatcaggacaaattgatgcagataataatggctatgtagatgtagcagttggtgcttttcggtctgattctgctgtcttgctaaggacaagacctgtagtaattgttgacgcttctttaagccaccctgagtcagtaaatagaacgaaatttgactgtgttgaaaatggatggccttctgtgtgcatagatctaacactttgtttctcatataagggcaaggaagttccaggttacattgttttgttttataacatgagtttggatgtgaacagaaaggcagagtctccaccaagattctatttctcttctaatggaacttctgacgtgattacaggaagcatacaggtgtccagcagagaagctaactgtagaacacatcaagcatttatgcggaaagatgtgcgggacatcctcaccccaattcagattgaagctgcttaccaccttggtcctcatgtcatcagtaaacgaagtacagaggaattcccaccacttcagccaattcttcagcagaagaaagaaaaagacataatgaaaaaaacaataaactttgcaaggttttgtgcccatgaaaattgttctgctgatttacaggtttctgcaaagattgggtttttgaagccccatgaaaataaaacatatcttgctgttgggagtatgaagacattgatgttgaatgtgtccttgtttaatgctggagatgatgcatatgaaacgactctacatgtcaaactacccgtgggtctttatttcattaagattttagagctggaagagaagcaaataaactgtgaagtcacagataactctggcgtggtacaacttgactgcagtattggctatatatatgtagatcatctctcaaggatagatattagctttctcctggatgtgagctcactcagcagagcggaagaggacctcagtatcacagtgcatgctacctgtgaaaatgaagaggaaatggacaatctaaagcacagcagagtgactgtagcaatacctttaaaatatgaggttaagctgactgttcatgggtttgtaaacccaacttcatttgtgtatggatcaaatgatgaaaatgagcctgaaacgtgcatggtggagaaaatgaacttaactttccatgttatcaacactggcaatagtatggctcccaatgttagtgtggaaataatggtaccaaattcttttagcccccaaactgataagctgttcaacattttggatgtccagactactactggagaatgccactttgaaaattatcaaagagtgtgtgcattagagcagcaaaagagtgcaatgcagaccttgaaaggcatagtccggttcttgtccaagactgataagaggctattgtactgcataaaagctgatccacattgtttaaatttcttgtgtaattttgggaaaatggaaagtggaaaagaagccagtgttcatatccaactggaaggccggccatccattttagaaatggatgagacttcagcactcaagtttgaaataagagcaacaggttttccagagccaaatccaagagtaattgaactaaacaaggatgagaatgttgcgcatgttctactggaaggactacatcatcaaagacccaaacgttatttcaccatagtgattatttcaagtagcttgctacttggacttattgtacttctgttgatctcatatgttatgtggaaggctggcttctttaaaagacaatacaaatctatcctacaagaagaaaacagaagagacagttggagttatatcaacagtaaaagcaatgatgattaaggacttctttcaaattgagagaatggaaaacagactcaggttgtagtaaagaaatttaaaagacactgtttacaagaaaaaatgaattttgtttggacttcttttactcatgatcttgtgacatattatgtcttcatgcaaggggaaaatctcagcaatgattactctttgagatagaagaactgcaaaggtaataatacagccaaagataatctctcagcttttaaatgggtagagaaacactaaagcattcaatttattcaagaaaagtaagcccttgaagatatcttgaaatgaaagtataactgagttaaattatactggagaagtcttagacttgaaatactacttaccatatgtgcttgcctcagtaaaatgaaccccactgggtgggcagaggttcatttcaaatacatctttgatacttgttcaaaatatgttctttaaaaatataattttttagagagctgttcccaaattttctaacgagtggaccattatcactttaaagccctttatttataatacatttcctacgggctgtgttccaacaaccattttttttcagcagactatgaatattatagtattataggccaaactggcaaacttcagactgaacatgtacactggtttgagcttagtgaaattacttctggataattatttttttataattatggatttcaccatctttctttctgtatatatacatgtgtttttatgtaggtatatatttaccattcttcctatctattcttcctataacacacctttatcaagcatacccaggagtaatcttcaaatcttttgttatattctgaaacaaaagattgtgagtgttgcactttacctgatacacgctgatttagaaaatacagaaaccatacctcactaataactttaaaatcaaagctgtgcaaagactagggggcctatacttcatatgtattatgtactatgtaaaatattgactatcacacaactatttccttggatgtaattctttgttaccctttacaagtataagtgttaccttacatggaaacgaagaaacaaaattcataaatttaaattcataaatttagctgaaagatactgattcaatttgtatacagtgaatataaatgagacgacagcaaaattttcatgaaatgtaaaatatttttatagtttgttcatactatatgaggttctattttaaatgactttctggattttaaaaaatttctttaaatacaatcatttttgtaatatttattttatgcttatgatctagataattgcagaatatcattttatctgactctgccttcataagagagctgtggccgaattttgaacatctgttatagggagtgatcaaattagaaggcaatgtggaaaaacaattctgggaaagatttctttatatgaagtccctgccactagccagccatcctaattgatgaaagttatctgttcacaggcctgcagtgatggtgaggaatgttctgagatttgcgaaggcatttgagtagtgaaatgtaagcacaaaacctcctgaacccagagtgtgtatacacaggaataaactttatgacatttatgtatttttaaaaaactttgtatcgttataaaaaggctagtcattctttcaggagaacatctaggatcatagatgaaaaatcaagccccgatttagaactgtcttctccaggatggtctctaaggaaatttacatttggttctttcctactcagaactactcagaaacaactatatatttcaggttatctgagcacagtgaaagcagagtactatggttgtccaacacaggcctctcagatacaaggggaacacaattacatattgggctagattttgcccagttcaaaatagtatttgttatcaacttactttgttacttgtatcatgaattttaaaaccctaccactttaagaagacagggatgggttattcttttttggcaggtaggctatataactatgtgattttgaaatttaactgctctggattagggagcagtgaatcaaggcagacttatgaaatctgtattatatttgtaacagaatataggaaatttaacataattgatgagctcaaatcctgaaaaatgaaagaatccaaattatttcagaattatctaggttaaatattgatgtattatgatggttgcaaagtttttttgtgtgtccaataaacacattgtaaaaaaaa

SEQ ID NO: 2345 - DNA, 1606 bp, Homo sapiens
actaagtatctccactttcaattctagatcaggaactgaggacatatctaaattttctagttttatagaaggcttttatccacaagaatcaagatcttccctctctgagcaggaatcctttgtgcattgaagactttagattcctctctgcggtagacgtgcacttataagtatttgatggggtggattcgtggtcggaggtctcgacacagctgggagatgagtgaatttcataattataacttggatctgaagaagagtgatttttcaacacgatggcaaaagcaaagatgtccagtagtcaaaagcaaatgtagagaaaatgcatctccattttttttctgctgcttcatcgctgtagccatgggaatccgtttcattattatggtaacaatatggagtgctgtattcctaaactcattattcaaccaagaagttcaaattcccttgaccgaaagttactgtggcccatgtcctaaaaactggatatgttacaaaaataactgctaccaattttttgatgagagtaaaaactggtatgagagccaggcttcttgtatgtctcaaaatgccagccttctgaaagtatacagcaaagaggaccaggatttacttaaactggtgaagtcatatcattggatgggactagtacacattccaacaaatggatcttggcagtgggaagatggctccattctctcacccaacctactaacaataattgaaatgcagaagggagactgtgcactctatgcctcgagctttaaaggctatatagaaaactgttcaactccaaatacgtacatctgcatgcaaaggactgtgtaaagatgatcaaccatctcaataaaagccaggaacagagaagagattacaccagcggtaacactgccaactgagactaaaggaaacaaacaaaaacaggacaaaatgaccaaagactgtcagatttcttagactccacaggaccaaaccatagaacaatttcactgcaaacatgcatgattctccaagacaaaagaagagagatcctaaaggcaattcagatatccccaaggctgcctctcccaccacaagcccagagtggatgggctgggggaggggtgctgttttaatttctaaaggtaggaccaacacccaggggatcagtgaaggaagagaaggccagcagatcactgagagtgcaaccccaccctccacaggaaattgcctcatgggcagggccacagcagagagacacagcatgggcagtgccttccctgcctgtgggggtcatgctgccacttttaatgggtcctccacccaacggggtcagggaggtggtgctgccccagtgggccatgattatcttaaaggcattattctccagccttaagtaagatcttaggacgtttcctttgctatgatttgtacttgcttgagtcccatgactgtttctcttcctctctttcttccttttggaatagtaatatccatcctatgtttgtcccactattgtattttggaagcacataacttgtttggtttcacaggttcacagttaagaaggaattttgcctctgaataaatagaatcttgagtctcatgcaaaaaaaaaaaaaaaaaa

SEQ ID NO: 2346 - DNA, 782 bp, Homo sapiens; identical to SEQ ID NO: 601

SEQ ID NO: 2347 - DNA, 1815 bp, Homo sapiens; identical to SEQ ID NO: 544

SEQ ID NO: 2348 - DNA, 3275 bp, Homo sapiens; identical to SEQ ID NO: 568

SEQ ID NO: 2349 - DNA, 473 bp, Homo sapiens; identical to SEQ ID NO: 541

SEQ ID NO: 2350 - DNA, 4380 bp, Homo sapiens; identical to SEQ ID NO: 157

SEQ ID NO: 2351 - DNA, 2880 bp, Homo sapiens; identical to SEQ ID NO: 114

SEQ ID NO: 2352 - DNA, 2032 bp, Homo sapiens; identical to SEQ ID NO: 1510

SEQ ID NO: 2353 - DNA, 4024 bp, Homo sapiens; identical to SEQ ID NO: 113

SEQ ID NO: 2354 - DNA, 14121 bp, Homo sapiens; identical to SEQ ID NO: 587

SEQ ID NO: 2355 - DNA, 3920 bp, Homo sapiens; identical to SEQ ID NO: 609

SEQ ID NO: 2356 - DNA, 1461 bp, Homo sapiens; identical to SEQ ID NO: 561

SEQ ID NO: 2357 - DNA, 4730 bp, Homo sapiens
cacaagggtcaagtagtccagcattctacagtttgtgtgtttgagagaaaaataagcccataaaaacattctaaccttcagattaagtgttttctgcattctctcccagcggatctgattcctgttctgaagaattgaagttgagcatcgttagttaaattcagctgctgcctgactgtataccacagcaaaggctttggaaacatttttcagttaaaacaataatgactttcttggagtgtaatcccagtggaggctgttctacgtatagcctgaaagaatacttaactaccatacgcaattctgcagagaccttgtaaaaatcacactttacaccaaacaactgagtgattctgaattggttgggggaatcttagttgtagatatcaattcaccttcttgaagattcaaccactgctactcagagctgctgctgaaataccatgtctaagaactcagagttcatcaatctgtcatttttattagatcatgagaaggaaatgatcctgggcgtcctaaagagagatgaatatttgaaaaaagtggaggacaagagaataaggaagctgaaaaatgaactcttagaagcaaaacgtagaagtgggaaaactcaacaagaggccagcagagtttgtgttcactgtcacagaaacctgggcctaatctttgaccggggagacccttgtcaggcttgctcactgagggtatgcagggagtgtcgagttgcaggccccaatggcagctggaagtgcactgtctgtgacaaaatcgcgcagctaaggattataactggtgagtggttttttgaagaaaaggcaaaacgtttcaagcaagtcaatgttctcggcactgatgttgtccgacagtccattttaagaagaagtccaggagctgaagaagtacagagccaagagcaaacccgccaggatgcagaaaagtcagacacttcacctgttgctgggaagaaggccagccatgatgggcccaagagaaagggatttcttcttagcaagttcagatcggcaaccagaggagaaatcataactcccaaaactgacactgggcggagctatagcttggacttagacggtcaacattttcggagtttaaaatcacctcctggttcagacaggggaagcactggctcatcagatctcaatgaccaggaacctggtcctaggaccccgaagagcagtcggagcaatggtgtgaccccaggcactcagagttcaccagccccaagcacacgaactgtgacctcagtcatcagtagagagtatggttttgaaaattccatggatttggctgctattgaaggtacctctcaggagctcacaaagagtcaccgcagaaacacttctggcacaccttccatagcagtgtctggaacctctctctcctcagatcagagtcgatctgagttagatttgagtgagtcatttacagaagactcagaggatactgtaagcataagaagcaagtctgtccctggggctttagacaaggactccttggaagagactgaagaaagcattgatgccttagtgtcctcgcagttatctacaaacactcaccgtctggcaagtggcctatcaactaccagccttaacagcatgatgagcgtttacagtgaaacgggagactatggcaacgtgaaagtcagtggtgaaatccttctccatatcagctactgctacaaaactggtgggctgtacatttttgtcaagaattgcagaaatctggccataggagatgaaaagaaacagaggacagatgcttatgtcaagtcatatcttcttcctgacaagtcccggaacaacaagcgtaagaccaaaatcagaacaggcaccaatccagaattcaatgaaacactaaagtacactatcagccatacccagctggaaacaagaactctgcagctctcagtctggcactatgatcgatttggacgtaatagcttcctcggggaagtagagattccttttgactcatggaactttgaaaatccaactgatgagtggtttgtgcttcaacccaaggtggagtttgctcctgatattggccttcaatacaaaggagagctgacagttgttttacgttacattcccccagaagagaacctgatgcttccaccagaacaactccaaggaaataagacttttaaaaagggaaagaagaaggagtcacctgtaatctctggaggaatactagaagtgttcatcaaagaggcaaagaatttgacagcagtgaagtcaggaggcacttctgatagctttgtgaagggctacctgctccctgatgatagcaaagccaccaagcacaaaactctggtaataaaaaagagtgttaaccctcagtggaatcatacattcatgttcagtggcatccatccccaggatataaagaatgtttgcctagaacttactatctgggacaaggaggccttttccagcaacatctttctgggaggagttcgtttgaattctggaagtggtgtgagccatgggaagaacgtggattggatggactctcagggggaagagcagcgcctttggcagaagatggccaacaaccctggaactccctttgagggtgtactcatgcttcgttccagcatgggaaaatgtaggctctaaagggaccagttctccaagaatgaggccaccaggacctatctggctgtcttttcctaccattagcaaactgagacctgggattctgcttccctgccatttctcacctgacagtgttgggacatgaggggagagatgtcagtagtatgaacatttagggtcttgctgagtgcctaaaaaacatatatttccatccaatcaaggccttcttgattggatgatagaaagtgtactacttgtcctgtcaacaagcaaattgtgcaaaggcttatagggtttatgccataaaagaaatggcacaagcctccatttgctaattataagttactttagatttcctcaaatcctttgaagagaaagaggaccactgagaaggtagatcacttgaaaagtcagaagaaaggatactggccaacttttactcaccctaggaatccacatgatctcaagaaggcatggtggagatggttgcttgagcaaggggattgtcctgttattgcagcaaacttgtggattaaccaagtagtatttcaagatggattgacagggctttctatgattactatagaatttatcatctaaatcagtttactttttagaacaaagagagctaaataactacatcagaacgattgatgttgattagaattgacctgggaaaattgggatgtagggtcaccctactgatgacctaagagagctctgttttaaacatttattttataaaatgttctaagccattaactaaaaggaaatgagatataatggtcaattgatataccttttcacattgtgttcactgacgagactagtttaatgaaaaaggaggtactctacctgctattttacttctgttcctcttctgccctgttatgggagagaatcaaagactccatctgctctcttcccccttgttttctccttcactgagtttttcttatctccttttgcagtggttaactattgtcacaataatgctgaatgaaaaaacacaccaaatgtcagtggcttaaaatgaccatcctttttctcacagttatgaagattggctatggcacctctgcttcctgctataggcctgaggttctagggcttcttatgcctcatcctctttaagccaaagggatagccagagcatcttgatggcagaagtgcaataagatgagccccactgctcgggtacattttcagcccctggttgtgtcatgtctactgatatctcattggtcaaaggaagtcagagggccaagatgaagaggcagggaaatatgcactgcccacagtgaagccatgacaagagtgaggatgcaggaaggcatgaagaattggggccaacagttcaatctaccataccttctctcacctggaattccagatgcttgagctacgaaacttagatgcaaagaaagttaaagctagaaggaacctcaggcccagttgctcattttgcagattccaaatgtgaatttcagagagctgagataacttgcccaaggccatatagaggctgtgactaaatctggacttaaatccagactatcaatcttaggccagtgttcttttttcaatatagtccttggcataatgctatgcttattaggtagataaaagggcttatgtcaagaaatttggagcagagtctgattacttgagcatgaacatacccgaccaaggtatgttctggagtcatattctagcctctgagctcattttttcatgcgagttcatataaaatcctcgaaagtttagaaactaggttttagtagtaacggagctagaatcatcttcgggcttattcctgctagttgttccatatttctagatttcatcttgaattttgaaaactgatttaagaatatatttagtattattattagtaagggaatacgcaatccagtttcaattttattcagaagtaggtcacctaattctagaaaatggttattagtctagtgtcgcttagcaaggtacttaaaagaaaatctgcacatatccttgtgctgcccttcttaaaaacagaaaacaaaaagtgtaagatcatcattgcttcccacataggaaaaataaaatgtcttcagacttgatgtgactcaaaaa

SEQ ID NO: 2358 - DNA, 2531 bp, Homo sapiens
gtgcaaccttcctccctttcttaaatgcttggggtgagagagaagagaggctagggtggggcatggaggacacagagagagagagtgctgtgtattccttccccgctactgtcctgtcctcagctaacttgctctgggacagcttccccagggctacagatactgcactcagctgactgtcctttcttctgggcccctggtcccagagcagagctgacaaaggagattcctgagagagcaccttcttatcacagaaagtgctgagccaagagctcctagctgccccttttgcagatgtgaagggccagtgaaccttggacccagatggttgcttaatactcctttccccctccctcactccttcctttgcgggctgcctcacctcctccacccttcttgcttaaatccataggcatttgtctggccttcccttttactgctggctgggaaggaggagcatcagaccacagatcctggaaggcacttctctccctgactgctgctcacactgccgtgagaacctgcttatatccaggaccaaggaggcaatgccaggaagctggtgaagggtttcctctcctccaccatggttgacagcactgagtatgaagtggcctcccagcctgaggtggaaacctcccctttgggtgatggggccagcccagggccggagcaggtgaagctgaagaaggagatctcactgcttaacggcgtgtgcctgattgtggggaacatgatcggctcgggcatctttgtttcccccaagggtgtgctcatatacagtgcctcctttggtctctctctggtcatctgggctgtcgggggcctcttctccgtctttggggccctttgttatgcggaactgggcaccaccattaagaaatctggggccagctatgcctatatcctggaggcctttggaggattccttgctttcatcagactctggacctccctgctcatcattgagcccaccagccaggccatcattgccatcacctttgccaactacatggtacagcctctcttcccgagctgcttcgccccttatgctgccagccgcctgctggctgctgcctgcatttgtctcttaaccttcattaactgtgcctatgtcaaatggggaaccctggtacaagatattttcacctatgctaaagtattggcactgatcgcggtcatcgttgcaggcattgttagacttggccagggagcctctactcattttgagaattcctttgagggttcatcatttgcagtgggtgacattgccctggcactgtactcagctctgttctcctactcaggctgggacaccctcaactatgtcactgaagagatcaagaatcctgagaggaacctgcccctctccattggcatctccatgcccattgtcaccatcatctatatcttgaccaatgtggcctattatactgtgctagacatgagagacatcttggccagtgatgctgttgctgtgacttttgcagatcagatatttggaatatttaactggataattccactgtcagttgcattatcctgttttggtggcctcaatgcctccattgtggctgcttctaggcttttctttgtgggctcaagagaaggccatctccctgatgccatctgcatgatccatgttgagcggttcacaccagtgccttctctgctcttcaatggtatcatggcattgatctacttgtgcgtggaagacatcttccagctcattaactactacagcttcagctactggttctttgtggggctttctattgtgggtcagctttatctgcgctggaaggagcctgatcgacctcgtcccctcaagctcagcgttttcttcccgattgtcttctgcctctgcaccatcttcctggtggctgttccactttacagtgatactatcaactccctcatcggcattgccattgccctctcaggcctgcccttttacttcctcatcatcagagtgccagaacataagcgaccgctttacctccgaaggatcgtggggtctgccacaaggtacctccaggtcctgtgtatgtcagttgctgcagaaatggatttggaagatggaggagagatgcccaagcaacgggatcccaaatctaactaaacaccatctggaatcctgatgtggaaagcaggggtttctggtctactggctagagctaaggaagttgaaaaggaaagctcacttctttggaggcacctgtccagaagcctggcctaggcagcttcaacctttgaacttactttttgaaatgaaaagtaatttatttgttttgctacatactgttccagacttttaaaggggacaatgaaggtgactgtggggaggagcatgtcaggtttgggcttggttgttttagaagcacctgggtgtgcctacctactcctcttttcttttaaaagggcccacaatgctccaatttcctgtctcctttagagagacatgaaactatcacaggtgctggatgacaataaaagtttatgttcctaaaaaaaaaaaaaaaaaaaaaaaa

SEQ ID NO: 2359 - DNA, 938 bp, Homo sapiens; identical to SEQ ID NO: 584

SEQ ID NO: 2360 - DNA, 2775 bp, Homo sapiens; identical to SEQ ID NO: 556

SEQ ID NO: 2361 - DNA, 2165 bp, Homo sapiens; identical to SEQ ID NO: 1865

SEQ ID NO: 2362 - DNA, 5606 bp, Homo sapiens; identical to SEQ ID NO: 624

SEQ ID NO: 2363 - DNA, 5190 bp, Homo sapiens; identical to SEQ ID NO: 44

SEQ ID NO: 2364 - DNA, 2562 bp, Homo sapiens; identical to SEQ ID NO: 119

SEQ ID NO: 2365 - DNA, 2120 bp, Homo sapiens; identical to SEQ ID NO: 588

SEQ ID NO: 2366 - DNA, 1588 bp, Homo sapiens; identical to SEQ ID NO: 144

SEQ ID NO: 2367 - DNA, 464 bp, Homo sapiens
ctccccagcctgataaaggtcctgcgggcaggacaggacctcccaaccaagccctccagcaaggattcagagtgcccctccggcctcgccatgaggctcttcctgtcgctcccggtcctggtggtggttctgtcgatcgtcttggaaggcccagccccagcccaggggaccccagacgtctccagtgccttggataagctgaaggagtttggaaacacactggaggacaaggctcgggaactcatcagccgcatcaaacagagtgaactttctgccaagatgcgggagtggttttcagagacatttcagaaagtgaaggagaaactcaagattgactcatgaggacctgaagggtgacatcccaggaggggcctctgaaatttcccacaccccagcgcctgtgctgaggactccctccatgtggccccaggtgccaccaataaaaatcctacagaaaattcaaa

SEQ ID NO: 2368 - DNA, 6364 bp, Homo sapiens; identical to SEQ ID NO: 168

SEQ ID NO: 2369 - DNA, 4809 bp, Homo sapiens
gtgaactgttgcaccgtgcaattgcacactataaatgtctttccttatctgtgtgtactcttatctcactgttctattttttctcctcatttatattaactctttcttacctttttttctgaacttctaggccttctctttccagaactggtggaagacaaatgaaacggccaagatggtaagaaacaagccgcatttctccttggggagactgataatttaaaaggtttgttgtgtcagaaacattcccagcttcatcaccaaccctttccttccacctctgcccactggagaccacttatatcccgaagcggacgcggcagctgaagtcaggaaaccatgcatcacattagcaggagccaactgcagactttaaactccgttcaacatgtggatgcggcagagaaatgacctgtccagacaagccggggcagctcataaactggttcatctgctccctgtgcgtcccgcgggtgcgtaagctctggagcagccggcgtccaaggacccggagaaaccttctgctgggcactgcgtgtgccatctacttgggcttcctggtgagccaggtggggagggcctctctccagcatggacaggcggctgagaaggggccacatcgcagccgcgacaccgccgagccatccttccctgagatacccctggatggtaccctggcccctccagagtcccagggcaatgggtccactctgcagcccaatgtggtgtacattaccctacgctccaagcgcagcaagccggccaatatccgtggcaccgtgaagcccaagcgcaggaaaaagcatgcagtggcatcggctgccccagggcaggaggctttggtcggaccatcccttcagccgcaggaagcggcaagggaagctgatgctgtagcacctgggtacgctcagggagcaaacctggttaagattggagagcgaccctggaggttggtgcggggtccgggagtgcgagccgggggcccagacttcctgcagcccagctccagggagagcaacattaggatctacagcgagagcgccccctcctggctgagcaaagatgacatccgaagaatgcgactcttggcggacagcgcagtggcagggctccggcctgtgtcctctaggagcggagcccgtttgctggtgctggaggggggcgcacctggcgctgtgctccgctgtggccctagcccctgtgggcttctcaagcagcccttggacatgagtgaggtgtttgccttccacctagacaggatcctggggctcaacaggaccctgccgtctgtgagcaggaaagcagagttcatccaagatggccgcccatgccccatcattctttgggatgcatctttatcttcagcaagtaatgacacccattcttctgttaagctcacctggggaacttatcagcagttgctgaaacagaaatgctggcagaatggccgagtacccaagcctgaatcgggttgtactgaaatacatcatcatgagtggtccaagatggcactctttgattttttgttacagatttataatcgcttagatacaaattgctgtggattcagacctcgcaaggaagatgcctgtgtacagaatggattgaggccaaaatgtgatgaccaaggttctgcggctctagcacacattatccagcgaaagcatgacccaaggcatttggtttttatagacaacaagggtttctttgacaggagtgaagataacttaaacttcaaattgttagaaggcatcaaagagtttccagcttctgcagtttctgttttgaagagccagcacttacggcagaaacttcttcagtctctgtttcttgataaagtgtattgggaaagtcaaggaggtagacaaggaattgaaaagcttatcgatgtaatagaacacagagccaaaattcttatcacctatatcaatgcacacggggtcaaagtattacctatgaatgaatgacaaaagaatcttctggctagggtgttagatatatttatgcatttttggttttgtttttaaatcaagcacatcaacctcaagcccgtttagcaatgaggcagtgtagatgaatacgtaaaataaatgactttaaccaagtagctataatgggacttagcactgtatgcatacttaaaaaggttttgaaaaacaaactacttgagaaatatttgtttatatttttctctaacatcatgctatgtgtcagtctgaacatctgacaacagaaatttcagttattattctagctaagttttgaaaacatttgtcatgctgtttaatagaaaactgcaaaccagagacactgactccattaataaaccatattttgtgccgttttgactgttctgaccaaatactaatgggaacaattcttgacgtttttctgttgctgattgttaacatagagcagtctctacactaccctgaggcaactctacattggaacactgaggcttacagcctgcaagagcatcagagctgaccatacatttaaacagaaatgctggtttatttgcaaaatcaccagtatattttctattgtgtctataaaaaatcagtcatttaagtacaagaatcatattttccattcctttttagaaatttattttgttgtccctatggaaatcattcacatctgacaatttatatgttaaagagttttactctctctattttggtccaatttgtatctagtggctgagaaattaaataattctaaagtatgaagttacctatctgaaaatgtacttacagagtatcattttaaaatggatgtctctttaaaaattttgttacttttaccaacaatgtaatataatttatgtatattttattaataatagtgaattccttaaaatttgttctatgtacttatatttaatttgatttaatggttactgcccagatattgagaattggttcaaatattgagtgtgtttcaatatattatctggcttatttcaacatgagtaatatgagcaaaataagttaaaacctgcgtctgatcaattttcctcatgactagaactaaaacagtaaatttggacaatattaagcctcaaataatcatctccaaactccttctaacactttttaaatcagattggaagacatggacaaatcaggttcatgtgttgcatctttatgtcctttgccaatatccaagatcatcacatatggtagatattcacatggagtttcaaattcagaatagattaccattaccttcctgcccttacacatcctactccttatttaaaagttctatttgtgacttttcatttcctgaaagtttaaaaatacaatttgagaatgtttataatacattctctcctgtcttttcacggttacgtctgttattgctgaaatacaccacattttctttgttctggtcaaggttaactcaatatctgtgtgaaagagaactactaacaacgttacaatagaggctagatttgaaaaaaaaaatctatagatctaattgatacaattgtagaacaaaatgtcaaaataatgttttaagtataagagaagatggaccaaggagagagagatcatttgaaaatctaattgtagcttttctaggctcacattcatgtactacttttagcacccttatgggctgtgctcgccccctggacagttgagctttggattatcttcctcttcaattttccctctattgacccgagtgtctccctctgcttctacagatttatagtactccttggctcttttgagtctccacttttactcactgtctctgggatttttaagatccttttcttctcttataaatcatcctcttaatgaaaattagcctaacaaaagtttggagactggaatcctactttgagccactgacttgaaataactcttttggcaagttgcctgacatcctgtcttaccaaggtggcatatttgcatttttactgcttaaaacatttttttttttttaccatctttatccaaatttatcatattgatggtaggactaacaggctttttagaagctggctttaactttgagtctcaagctacaatgctgttgggcagcctggtcttcccacgtgagggtttaactttgtttatttgcctccagttattccaaaatgcttattaaatgaaagtcccaggaacatgtttattttagtcacctttgctttttaacaattttgttttgtaatcaatgagtaattcatgatgaattatttttgactaatggatagccgaaggccaggcttttaattctaataggtaatgttcttcttttgtcttattgaaacaatgagaatactctgtgcatttcaaatgcactccgattatgctgtggttttattcacataagcacaatatgtgttttatttataacttcataacaaacttataatataataatttaccttagcagacatgcaaaagcttattcttgtgtgacttactttctttaagctaataatataaaaataaatatgtatcttaaaaatctataataaaacattagaaattaaagatatgtgctttttattttgcagatgagttcatttgcttttgtagatgtgttttcagagctaggtacagaggaatgtttgctacctttagcggtgaaaaaagaaagagagtcaagaattttgttggattgtgtttgtgtgtgcatatatttgatatcatcattatatttgtaatctttggacttgtaatcatagcctgtttattctactgtgccattaaatatactttaccttatacataacgaataaaatacctagaagtagatttatttacaaaaaaaaaaaaaaaa

SEQ ID NO: 2370 - DNA, 1900 bp, Homo sapiens; identical to SEQ ID NO: 1899

SEQ ID NO: 2371 - DNA, 5384 bp, Homo sapiens; identical to SEQ ID NO: 1604

SEQ ID NO: 2372 - DNA, 1560 bp, Homo sapiens; identical to SEQ ID NO: 622

SEQ ID NO: 2373 - DNA, 2207 bp, Homo sapiens; identical to SEQ ID NO: 566

SEQ ID NO: 2374 - DNA, 2632 bp, Homo sapiens; identical to SEQ ID NO: 663

SEQ ID NO: 2375 - DNA, 2792 bp, Homo sapiens; identical to SEQ ID NO: 619

SEQ ID NO: 2376 - DNA, 1331 bp, Homo sapiens
ggaaaggattttctcagcccccatccccagcactgtgtgttggccgcacccatgagagcctcagcactctgaaggtgcagggggcaaaggccaaaagagctctggcctgaacttgggtggtccctactgtgtgacttggggcatggccctcatctgtgctgaaatgattccacaaagattaaactggctatcatttgttgatttcccccttcttacatttaatccttgcaggagaaagctaagcctcaagatagtttgcttctctttcccccaaggccaaggagaaggtggagtgagggctggggtcgggacaggttgaacgggaaccctgtgctctaaacagttagggtttgttcccgcaggaactgaacccaaaggatcacctggtattccctgagagtacagatttctccggcgtggccctcaagggacagacatggctcagcggatgacaacacagctgctgctccttctagtgtgggtggctgtagtaggggaggctcagacaaggattgcatgggccaggactgagcttctcaatgtctgcatgaacgccaagcaccacaaggaaaagccaggccccgaggacaagttgcatgagcagtgtcgaccctggaggaagaatgcctgctgttctaccaacaccagccaggaagcccataaggatgtttcctacctatatagattcaactggaaccactgtggagagatggcacctgcctgcaaacggcatttcatccaggacacctgcctctacgagtgctcccccaacttggggccctggatccagcaggtggatcagagctggcgcaaagagcgggtactgaacgtgcccctgtgcaaagaggactgtgagcaatggtgggaagattgtcgcacctcctacacctgcaagagcaactggcacaagggctggaactggacttcagggtttaacaagtgcgcagtgggagctgcctgccaacctttccatttctacttccccacacccactgttctgtgcaatgaaatctggactcactcctacaaggtcagcaactacagccgagggagtggccgctgcatccagatgtggttcgacccagcccagggcaaccccaatgaggaggtggcgaggttctatgctgcagccatgagtggggctgggccctgggcagcctggcctttcctgcttagcctggccctaatgctgctgtggctgctcagctgacctccttttaccttctgatacctggaaatccctgccctgttcagccccacagctcccaactatttggttcctgctccatggtcgggcctctgacagccactttgaataaaccagacaccgc

SEQ ID NO: 2377 - DNA, 2232 bp, Homo sapiens; identical to SEQ ID NO: 540

SEQ ID NO: 2378 - DNA, 3293 bp, Homo sapiens
atgaagccaggagcgcctcaaagtccagcctgctgttgaccaacactaacagatgagcaaggagctggcagcaatggggcctggagcttcaggggacggggtcaggactgagacagctccacacatagcactggactccagagttggtctgcacgcctacgacatcagcgtggtggtcatctactttgtcttcgtcattgctgtggggatctggtcgtccatccgtgcaagtcgagggaccattggcggctatttcctggccgggaggtccatgagctggtggccaattggagcatctctgatgtccagcaatgtgggcagtggcttgttcatcggcctggctgggacaggggctgccggaggccttgccgtaggtggcttcgagtggaacatgaggaaatcaaggtctggaggagacagagggatccatccaaggtcacacgggaggactggggtcaggtcccaggcaacctggctgctcctggcccttggctgggtcttcgtccctgtgtacatcgcagcaggtgtggtcacaatgccgcagtatctgaagaagcgatttgggggccagaggatccaggtgtacatgtctgtcctgtctctcatcctctacatcttcaccaagatctcgactgacatcttctctggagccctcttcatccagatggcattgggctggaacctgtacctctccacagggatcctgctggtggtgactgccgtctacaccattgcaggtggcctcatggccgtgatctacacagatgctctgcagacggtgatcatggtagggggagccctggtcctcatgtttctgggctttcaggacgtgggctggtacccaggcctggagcagcggtacaggcaggccatccctaatgtcacagtccccaacaccacctgtcacctcccacggcccgatgctttccacattcttcgggaccctgtgagcggggacatcccttggccaggtctcattttcgggctcacagtgctggccacctggtgttggtgcacagaccaggtcattgtgcagcggtctctctcggccaagagtctgtctcatgccaagggaggctccgtgctggggggctacctgaagatcctccccatgttcttcatcgtcatgcctggcatgatcagccgggccctgttcccagacgaggtgggctgcgtggaccctgatgtctgccaaagaatctgtggggcccgagtgggatgttccaacattgcctaccctaagttggtcatggccctcatgcctgttggtctgcgggggctgatgattgccgtgatcatggccgctctcatgagctcactcacctccatcttcaacagcagcagcaccctgttcaccattgatgtgtggcagcgcttccgcaggaagtcaacagagcaggagctgatggtggtgggcagagtgtttgtggtgttcctggttgtcatcagcatcctctggatccccatcatccaaagctccaacagtgggcagctcttcgactacatccaggctgtcaccagttacctggccccacccatcaccgctctcttcctgctggccatcttctgcaagagggtcacagagcccggagctttctggggcctcgtgtttggcctgggagtggggcttctgcgtatgatcctggagttctcatacccagcgccagcctgtggggaggtggaccggaggccagcagtgctgaaggacttccactacctgtactttgcaatcctcctctgcgggctcactgccatcgtcattgtcattgtcagcctctgtacaactcccatccctgaggaacagctcacacgcctcacatggtggactcggaactgccccctctctgagctggagaaggaggcccacgagagcacaccggagatatccgagaggccagccggggagtgccctgcaggaggtggagcggcagagaactcgagcctgggccaggagcagcctgaagccccaagcaggtcctggggaaagttgctctggagctggttctgtgggctctctggaacaccggagcaggccctgagcccagcagagaaggctgcgctagaacagaagctgacaagcattgaggaggagccactctggagacatgtctgcaacatcaatgctgtccttttgctggccatcaacatcttcctctggggctattttgcgtgattccacagacctggcttcagtgtagacagattaaacaaagcccaagcctgtcagccacagaaacaggctctcctcttactttgctgtctaaactggagatcacagaagtcaagactgcaagctcccctgaagagaatccaactcaacctgcacacttgacaagtggagaaacagaagcccagagagagcactgggtttgttcaggaccacccagaaggtgtcacacggggtttccccactctttctgatatattgccttacagacctacctcaaacacactgtttccaccctcttcttgaatgtattcagtagcctttactgaatgtgtgtcttgagagtagaaaaatggaggatacaagaaaaggagcaggaagaaatttgcaaaaatccaagagcacctttgctcccccttatcctccttcctcttcccctttctagttcccctacctctctatctttctattctcaccaataatctctttgttgcatgaatttacccaggagagtcctatatttccattggtggctccacagtggtggctgtcagacccgaaggggtggggagccaagggtggactttaagcatggtgacagatggtattttgggcagaaagctcttagacaatggactatccaaagcactatttaaattctgcctcttcctactctctaacccaaatatgcacaaactctctatggccttgagaagcagttggagagacatgacttgttaaaacctcaaggaatcaagacatgttactctgtatttaagggtaagccccacagcgggcagcacaaacagcctgggagccactgtgcctgtgcttctctgtccttctccctttgcttgccatgaatccgcataccttggaatacactgtgaccccagttaagtgtcccttcgccaggaagctgccgcaacgtccagacctgggtcaagttcccactcctgctcccatagccttgacctgcttctgtcacagcactgatcacactgagatggaagactccagggggcaaggaccaagggccatatcccaagtgactttgtacccagaaaataacagctgttcaataaatgtgtattgagttaattagttaaaaaaaaaaaaaaaaaaa

SEQ ID NO: 2379 - DNA, 1849 bp, Homo sapiens
cgccgctctgggagccgctgctggtcccggccttgcggcctgcgggggaggctgcccggaggaggcagcggcggcggcagcgcgtcctcggtccccaggaccacggcttctttcctgccagatctatccatctggccatccatccgtgggggtctgcaatggccacctttagccgccaggaatttttccagcagctactgcaaggctgtctcctgcctactgcccagcagggccttgaccagatctggctgctccttgccatctgcctcgcctgccgcctcctctggaggctcgggttgccatcctacctgaagcatgcaagcaccgtggcaggcgggttcttcagcctctaccacttcttccagctgcacatggtttgggtcgtgctgctcagcctcctgtgctacctcgtgctgttcctctgccgacattcctcccatcgaggcgtcttcctatccgtcaccatcctcatctacctactcatgggtgagatgcacatggtagacaccgtgacatggcacaagatgcgaggggcacagatgattgtggccatgaaggcagtgtctctgggcttcgacctggaccggggcgaggtgggtacggtgccctcgccagtggagttcatgggctacctctacttcgtgggcaccatcgtcttcgggccctggatatccttccacagctacctacaagctgtccaaggccgcccactgagctgccggtggctgcagaaggtggcccggagcctggcactggccctgctgtgccttgtgctgtccacttgcgtgggcccctacctcttcccgtacttcatccccctcaacggtgaccgcctccttcgcaagtggctgcgagcctacgagagtgctgtctccttccacttcagcaactattttgtgggctttctttccgaggccacggccacgttggcgggggctggctttaccgaggagaaggatcacctggaatgggacctgacggtgtccaagccactgaatgtggagctgcctcggtcaatggtggaagttgtcacaagctggaacctgcccatgtcttattggctaaataactatgttttcaagaatgctctccgcctggggaccttctcggctgtgctggtcacctatgcagccagcgccctcctacatggcttcagtttccacctggctgcggtcctgctgtccctggcttttatcacttacgtggagcatgtcctccggaagcgcctggctcggatcctcagtgcctgtgtcttgtcaaagcggtgcccgccagactgttcgcaccagcatcgcttgggcctgggggtgcgagccttaaacttgctctttggagctctggccatcttccacctggcctacctgggctccctgtttgatgtcgatgtggatgacaccacagaggagcagggctacggcatggcatacactgtccacaagtggtcagagctcagctgggccagtcactgggtcacttttggatgctggatcttctaccgtctcataggctgaggcacatctgtggaccctcataaccctcttaagacccctctcagggtgccactgatgggggatgagggaaggccctctctctactccttgaccccctccatccttgacccccaacacctcaacacacacacacacacacacacacaaaatcacaccattttcatgcctgtcaatccccaccccaccacaaggcaggaagggggtggtgcctgctggggcctagagggggatgcttggggaaacagagaaggggagatccagggcctccccgccttccttcttcctttttatatacaatttgttattgtcaaataaaagtaggaaatattcaataggct

SEQ ID NO: 2380 - DNA, 4870 bp, Homo sapiens; identical to SEQ ID NO: 586

SEQ ID NO: 2381 - DNA, 2018 bp, Homo sapiens; identical to SEQ ID NO: 1870

SEQ ID NO: 2382 - DNA, 694 bp, Homo sapiens; identical to SEQ ID NO: 1857

SEQ ID NO: 2383 - DNA, 2805 bp, Homo sapiens; identical to SEQ ID NO: 2107

SEQ ID NO: 2384 - DNA, 2358 bp, Homo sapiens; identical to SEQ ID NO: 1648

SEQ ID NO: 2385 - DNA, 5180 bp, Homo sapiens; identical to SEQ ID NO: 594

SEQ ID NO: 2386 - DNA, 2267 bp, Homo sapiens; identical to SEQ ID NO: 630

SEQ ID NO: 2387 - DNA, 2869 bp, Homo sapiens; identical to SEQ ID NO: 109

SEQ ID NO: 2388 - DNA, 4426 bp, Homo sapiens
actccggcttctgtgatgtcagcgccggaacctggaatcccggctccgcgagggaaggccggggaggcggcggcggcggcggcggctggagagggtcctcggcagcctctgaggagcgcggggcgcggccatgagcgagtccagcggcagtgcgctccagcccggcaggcccagccggcagccggcggtccatccagagaacctctctctagactccagttgcttctcttctccacctgtgaacttcctccaagaattgccaagctaccggtccattgcacgtaggagaacgactgtccattcccgggacaagcaaagcggaactttgctaaagccaaccgactcttacagctcccagctggaggacagaatcgctgaaaacctcagcagccattctcttcgaaattatgcactgaacatctctgagaagcggagactaagggacattcaagagacacaaatgaagtatctctccgaatgggaccagtggaagcggtatagcagcaagtcttggaagaggttcctagagaaggctcgagagatgacgacccacctggagctgtggcgggaggacatccgcagcatagaagggaaatttggcactgggattcagtcctatttctccttcttgagattcctggtgttgctgaatttggtgatatttctgatcatctttatgctggttttgctcccagtcttactcacgaaatacaagatcaccaacagcagcttcgtgctcattcctttcaaagacatggataaacaatgtacagtctatccagtaagcagttctggactcatttacttttacagttatatcatagacttgctttctggcactggtttcctggaggaaactagcctcttttacggacattacaccattgatggggtgaaatttcagaacttcacctatgatctgcccctggcgtatttgttaagcacaatcgcctccctggccctgagccttctttggatagtgaaaaggtcggtggaaggattcaaaatcaacctgattcggagtgaggagcactttcagagttactgcaacaagatatttgccggctgggacttctgcatcactaaccgcagcatggcggatctgaagcacagcagcttgcggtacgagctccgagcagatctggaggaagaaagaatgcggcagaaaatagcagaaaggacctcagaagaaacaatacgcatttactctttgagactgtttttgaactgtattgttctggctgttttaggggcatgcttttatgcaatatacgtagcaactgtcttctcgcaagagcacatgaaaaaggaaatcgacaagatggtttttggagagaacctcttcatattgtatctaccgtctattgtgatcacgctggccaattttatcaccccaatgatctttgccaagatcatccgctatgaggattattctccaggctttgagatccgtctgacaatccttaggtgtgtctttatgcggctggccaccatatgtgtcctggtgttcacgctgggctccaagatcacatcctgtgatgatgacacatgtgacctttgcggctacaaccagaaactctacccgtgctgggagacccaagttgggcaggaaatgtacaagctgatgatcttcgacttcatcatcatcttggctgtgacactcttcgtggattttcctagaaagctcctggtgacctactgttcctcttgcaagctgattcagtgctgggggcagcaggagtttgccattcctgataacgtcctggggatagtttacgggcaaaccatctgctggatcggagcctttttctcaccccttctccctgcaattgcaaccctgaaattcattatcatcttctatgtgaaagagtggagtctgctttacacctgcagaccctcccccaggccgttcagagcatccaattctaatttcttcttcctgttggtgttgttgatcgggctgtgtttggcaataatacctctgacaatcagcatatcacgcatcccttcctcgaaagcctgtgggccgttcaccaacttcaacaccacctgggaggtcatccccaagacggtgagcaccttccccagctcgctgcagtccttcatccatggtgtcacatccgaagcctttgcagttcctttcttcatgattatttgcctcatcatgttttacttcattgccttagctggagcacacaaacgggtggtcatccagctccgagagcagctatccctggaaagtcgtgacaagtgctacctaatccagaaactaacagaagcccaaagggacatgaggaactaactagactgagcgtgaagatggtgctgcctgttgcttctaagctgacctagtgattctgctgagcctacagagtctacctgggttttgagtggacatttaaaaatatatttttcttgagtttaggcttttccatatgtgcagctgtgtttacctaacccagcccttaattagggcttcagtgacttagaaaagcaggggaaacccaaggctttgcctgcagaccggccactctgtgacaactctaccaaaaaccaacaagccattcaagcttttacaagaatgaaagagcggagacggtagtttagtatttgagccacgagtttatgtgcacaagtgttttgggttgtggactgaagctcagcctgttaatcagaccagcccatgagtgtataacaaacagaattggaggctggtttcttaaacacacacgtccacattttttagggttgttttcctgtgcttacaatttttaatgcatgtgcctttatttcacaaaacatgtggctgggcgcagcggctcacgcctgttatcccaacactttgggaggccgaggcaggcggagcacctaagttggggagttcaagaccagcctgaccaacgtggagaaactccgtctccactaaaatacaaaattagctgggtgtggtggcacatgcctgtaatatcagctactcaggaggctgaggcaggagaattgcttgaacccaggaggtggagtttgcagtgagctgagatcacaccattgcactccagcctgggcaaaaagagcaaaactctccctaaaaaaaaaatgtagaatatctcttaagatttccgttatggtaaaaaccatatgcaataaatacctcattgtaagcttacccaaaattgatagatgtcaaccttttaacagaagaacagaagtttaagttattgtttaatgtaatcagttttcattttaatatctttgaaatctttttcaaaggactgtagttttgtaatggacttttcaagccttccttccattgtttttcttccgttcactggctccacacgtttcctggggagtagcctggaatttaaagttgggtgcaggttttagaaagctgttgctgttaacaataattctcccggccatctccactccactactcaaaaatgcctgaatccttgctcagaggagcaaaggtatcttctcgtccctttcttacagccattttcttgcttttccacaaagatattatttaaagtggaatatttttgtaactgggataccaatgagcttttcggtcttttcctgacttggtaaggtttatgggtttctaaatctaataactacagtcataccaccctgaaaatgcctgatctcgtctaaatctaataactggtgtcatggaattttgagtaaccaaagattcattccagtctcacttaaaaaaataaattctgctgggcacagtggctcatgcctgcaatcccagaactttgggagtccaaggagggcagatcacctgaagtcagaagtttgagaccagcctggtcaatgtggcaagaccccgtctctactaaaagtacaaaaattagccaggcatggtggcgtgtgcctgtaatcccagctacttgggaggctgaggcatgagaatcacttgaacctgggaggtgaaggctgcagtgtgcgagaccgtgccactgtactccagcctaggtgacagagggagaccctatctcaaaaaaaaagataggtgaaaagaaaaaaaaagttgtaattgtaaacatttctgcccagtgcctttatatttatataacattttcactgtgaccagacttgatgatattcaagttttctatttgtgtgtgtgtgtgtgtgtgtgtgtgatgaacacaacgaaaacgtactgcgttttttttcctattataaaagtgatactgaaatatgctaattaatatattaattttagttaaatgctgctaatatgcatacctcttacttgaaggtttttaatatgttttgataactttaataacttcaggtgatgtctgtataacttttaaagtgcagctctctctaacaaatgtgccttacaactcctgattaaacggcgtcttgaaggttttaaaaaaaaaaaaaaaaaaaaaaaaaaaaa

SEQ ID NO: 2389 - DNA, 1412 bp, Homo sapiens; identical to SEQ ID NO: 1890

SEQ ID NO: 2390 - DNA, 4345 bp, Homo sapiens
cgcctaatcttcacccgctgctaggctcgtttaatgagtcttctgagagctaaggagtcctcggattcattcaaagcattctacaatgaacgctaggggggaaaaagaacaaacaaaatacatttcaaatataggattcaattacttttcactactcaatgatgtgtcaaaggcacgctgtgttttgttttgagggcggggagatgacaggagggaatcctgggcccccattggctcgccgctcgccgctgcagttgagctccagccgctccgagagcattattgatctgaagggtaaatgtggagggagccacagagaggggtccaggcttttctgagaagagaggcagcctcttccaggaagaaagtggtgtctactggctgcccggcctggagaaccttctttgaatgaaaacggacaaaatgcaaagcagtgtgttggcacagtgatttggaaaggggaaacagaagagaagggtctcaccttccgcgcaaggctgagctgttggcaccctgctgcggccgtcggtgctgctgctcctgcagctgccttttctgccatcagctttgttacctaacagcttggctcttttgggaaatatagacaagctggaacccaggagcagttgggagttttaaagaatgccagcctttttaaagctttgatgtccagtgctatagaatcaagttactgtggaggtcaaaacaatttgagatacataagctggccttagaaaataaattgcctctaacttacagtgaggagctcaacataacagggaaaaggagcacaggatgcagctacttggagggtgttgattgaaaacttcgatctccccaccccattcacggttgatttgacggatttctcaccttgttcacagagaaaatttcaattaaggcccctttagatggaatataatacagcagaagccttttcatcaaaaggattaatgcctgcatcatcatttctgcaataaaacaagaagctaagtggtggaggccacagacacctcaaacctggattccacaattctacgttaagtgttggagtttttattactctgctgtaggaaagcctttgccaatgcttacaaggaactgtttatccctgcttctctgggttctgtttgatggaggtctcctaacaccactacaaccacagccacagcagactttagccacagagccaagagaaaatgttatccatctgccaggacaacggtcacatttccaacgtgttaaacgtggctgggtatggaatcaattttttgtgctggaagaatacgtgggctccgagcctcagtatgtgggaaagctccattccgacttagacaagggagagggcactgtgaaatacaccctctcaggagatggcgctggcaccgtttttaccattgatgaaaccacaggggacattcatgcaataaggagcctagatagagaagagaaacctttctacactcttcgtgctcaggctgtggacatagaaaccagaaagcccctggagcctgaatcagaattcatcatcaaagtgcaggatattaatgataatgagccaaagtttttggatggaccttatgttgctactgttccagaaatgtctcctgtgggtgcatatgtactccaggtcaaggccacagatgcagatgacccgacctatggaaacagtgccagagtcgtttacagcattcttcagggacaaccttatttctctattgatcccaagacaggtgttattagaacagctttgccaaacatggacagagaagtcaaagaacaatatcaagtactcatccaagccaaggatatgggaggacagcttggaggattagccggaacaacaatagtcaacatcactctcaccgatgtcaatgacaatccacctcgattccccaaaagcatcttccacttgaaagttcctgagtcttcccctattggttcagctattggaagaataagagctgtggatcctgattttggacaaaatgcagaaattgaatacaatattgttccaggagatgggggaaatttgtttgacatcgtcacagatgaggatacacaagagggagtcatcaaattgaaaaagcctttagattttgaaacaaagaaggcatacactttcaaagttgaggcttccaaccttcaccttgaccaccggtttcactcggcgggccctttcaaagacacagctacggtgaagatcagcgtgctggacgtagatgagccaccggttttcagcaagccgctctacaccatggaggtttatgaagacactccggtagggaccatcattggcgctgtcactgctcaagacctggatgtaggcagcagtgctgttaggtacttcatagattggaagagtgatggggacagctactttacaatagatggaaatgaaggaaccatcgccactaatgaattactagacagagaaagcactgcgcagtataatttctccataattgcgagtaaagttagtaaccctttattgaccagcaaagtcaatatactgattaatgtcttagatgtaaatgaatttcctccagaaatatctgtgccatatgagacagccgtgtgtgaaaatgccaagccaggacagataattcagatagtcagtgctgcagaccgagatctttcacctgctgggcaacaattctcctttagattatcacctgaggctgctatcaaaccaaattttacagttcgtgacttcagaaacaacacagcggggattgaaacccgaagaaatggatacagccgcaggcagcaagagttgtatttcctccctgttgtaatagaagacagcagctaccctgtccagagcagcacaaacacaatgactattcgagtctgtagatgtgactctgatggcaccatcctgtcttgtaatgtggaagcaatttttctacctgtaggacttagcactggggcgttgattgcaattctactatgcattgttatactcttagccatagttgtactgtatgtagcactgcgaaggcagaagaaaaaagacaccctgatgacctctaaagaagacatcagagacaacgtcatccattacgatgatgaaggaggtggggaggaagatacccaggctttcgacatcggggctctgagaaacccaaaagtgattgaggagaacaaaattcgcagggatataaaaccagactctctctgtttacctcgtcagagaccacccatggaagataacacagacataagggatttcattcatcaaaggctacaggaaaatgatgtggatccaactgccccaccatacgattcactggccacatatgcctacgaagggagtgggtccgtggcagagtccctcagctctatagactctctcaccacagaagccgaccaggactatgactatctgacagactggggaccccgctttaaagtcttggcagacatgtttggcgaagaagagagttataaccctgataaagtcacttaagggagtcgtggaggctaaaatacaaccgagaggggagatttttaaaaaagaaaaagaaacacaaatattaatagaaatctctctcacacacacacacacacacaaacacacacacacacacacacactctgggacaagattcctttgattacctggtttctagtaagttactaaattaatcatattgtcagttttggtttattctgccaacaagagatacatcctataatgtgtacttgctttgttttgttgttttgttttttcacaatcacactgagacaagctcaggcctattcaatacaatttactgacatgacaacctagaacgaagatagctatgtggcatcacggtggaagagtgttagatttttcttaattccactaaagtgcctattgaaactcttatcatttaaagtggtgtacagtacactctgctgtgatggtattgcgggattcagagataaagacataaaacaaagacaccgtctttatgtcaagaagcaatagcgacactctgactctcctcattccttttgagaacaaaagaagaacactttctgatctccaccttcttctaattcaaaaggttttctttttcttttttaaactgtatgctaaaacgtatttgtttatcctatcctttcagaaaattgaaataaatatgaaaatatcaagttcaatatgtaagtcccaaattctagaaacaatgtttgatcttaacattagttcacattaaagctgttcattaaaatgttactttcttttccaaaaaaaaaagaaagaaaaaaaagaaaaaatattcctctttataaagagaggcctcagggctcaaattacacattaaaataaatattggttttgcttaatattgta

SEQ ID NO: 2391 - DNA, 6330 bp, Homo sapiens; identical to SEQ ID NO: 616

SEQ ID NO: 2392 - DNA, 4234 bp, Homo sapiens; identical to SEQ ID NO: 1629

SEQ ID NO: 2393 - DNA, 4633 bp, Homo sapiens; identical to SEQ ID NO: 611

SEQ ID NO: 2394 - DNA, 4053 bp, Homo sapiens; identical to SEQ ID NO: 120

SEQ ID NO: 2395 - DNA, 9685 bp, Homo sapiens
ccgtcgccggccgcgtcctccgggcatggaaggaggcggcaagcccaactcttcgtctaacagccgggacgatggcaacagcgtcttccccgccaaggcgtccgcgacgggcgcggggccggccgcggccgagaagcgcctgggcaccccgccggggggcggcggggccggcgcgaaggagcacggcaactccgtgtgcttcaaggtggacggcggtggcggcggtggcggcggcggcggcggcggcgaggagccggcggggggcttcgaagacgccgaggggccccggcggcagtacggcttcatgcagaggcagttcacctccatgctgcagcccggggtcaacaaattctccctccgcatgtttgggagccagaaggcggtggaaaaggagcaggaaagggttaaaactgcaggcttctggattatccacccttacagtgatttcaggttttactgggatttaataatgcttataatgatggttggaaatctagtcatcataccagttggaatcacattctttacagagcaaacaacaacaccatggattattttcaatgtggcatcagatacagttttcctattggacctgatcatgaattttaggactgggactgtcaatgaagacagttctgaaatcatcctggaccccaaagtgatcaagatgaattatttaaaaagctggtttgtggttgacttcatctcatccatcccagtggattatatctttcttattgtagaaaaaggaatggattctgaagtttacaagacagccagggcacttcgcattgtgaggtttacaaaaattctcagtctcttgcgtttattacgactttcaaggttaattagatacatacatcaatgggaagagatattccacatgacatatgatctcgccagtgcagtggtgagaatttttaatctcatcggcatgatgctgctcctgtgccactgggatggttgtcttcagttcttagtaccactactgcaggacttcccaccagattgctgggtgtctttaaatgaaatggttaatgattcttggggaaagcagtattcatacgcactcttcaaagctatgagtcacatgctgtgcattgggtatggagcccaagccccagtcagcatgtctgacctctggattaccatgctgagcatgatcgtcggggccacctgctatgccatgtttgtcggccatgccaccgctttaatccagtctctggattcttcgaggcggcagtatcaagagaagtataagcaagtggaacaatacatgtcattccataagttaccagctgatatgcgtcagaagatacatgattactatgaacacagataccaaggcaaaatctttgatgaggaaaatattctcaatgaactcaatgatcctctgagagaggagatagtcaacttcaactgtcggaaactggtggctacaatgcctttatttgctaatgcggatcctaattttgtgactgccatgctgagcaagttgagatttgaggtgtttcaacctggagattatatcatacgagaaggagccgtgggtaaaaaaatgtatttcattcaacacggtgttgctggtgtcattacaaaatccagtaaagaaatgaagctgacagatggctcttactttggagagatttgcctgctgaccaaaggacgtcgtactgccagtgttcgagctgatacatattgtcgtctttactcactttccgtggacaatttcaacgaggtcctggaggaatatccaatgatgaggagagcctttgagacagttgccattgaccgactagatcgaataggaaagaaaaattcaattcttctgcaaaagttccagaaggatctgaacactggtgttttcaacaatcaggagaacgaaatcctcaagcagattgtgaaacatgacagggagatggtgcaggcaatcgctcccatcaattatcctcaaatgacaaccctgaattccacatcgtctactacgaccccgacctcccgcatgaggacacaatctccaccggtgtacacagcgaccagcctgtctcacagcaacctgcactcccccagtcccagcacacagaccccccagccatcagccatcctgtcaccctgctcctacaccaccgcggtctgcagccctcctgtacagagccctctggccgctcgaactttccactatgcctcccccaccgcctcccagctgtcactcatgcaacagcagccgcagcagcaggtacagcagtcccagccgccgcagactcagccacagcagccgtccccgcagccacagacacctggcagctccacgccgaaaaatgaagtgcacaagagcacgcaggcgcttcacaacaccaacctgacccgggaagtcaggccactctccgcctcgcagccctcgctgccccatgaggtgtccactctgatttccagacctcatcccactgtgggcgagtccctggcctccatccctcaacccgtgacggcggtccccggaacgggccttcaggcagggggcaggagcactgtcccgcagcgcgtcaccctcttccgacagatgtcgtcgggagccatccccccgaaccgaggagtccctccagcaccccctccaccagcagctgctcttccaagagaatcttcctcagtcttaaacacagacccagacgcagaaaagccacgatttgcttcaaatttatgatccctgctgattgtcaaagcagaaagaaatactctcataaactgagactatactcagatcttattttattctatctcctgatagatccctctagcctactatgaagagatattttagacagctgtggcctacacgtgaaatgtaaaaatatatatacatatactataaaatatatatctaaattcccaagagagggtcaaaagacctgtttagcattcagtgttatatgtcttcctttctttaaatcattaaaggatttaaaatgtcgttgtaagattatttatttctaacctacttttacttaagtcctttgatatgtatatttctctattttatgaagagttcttggattcaatggaaacaaaactgattttaaaaaggcaactcaaatgaactagtaaatagcaccaatcaaaactttctttcattagctgtgtctctgcatctaaattgttaatcattaatggtggagaattaaataacaaatcccattttatagatctaaattgtatttcggtgctttcaatttcaaattaggttaaagaatgcactacttgcttggccaccgtaggagactagcattgccactgtttgttaagaatatcactaacctcaaacatgttcattgatctttcagaaagctgagggaaaattaatatttgtcttcatgtgttatcggacttttaccaagactcgatcaatgttagttgtaaataactttttcaacccaaataaaaatagctattctgtgttgtatgaaggtaaaagtcattgtttaagaatttagttttattgcttcacttcaaaacttagagttttaaattttacaaaacctgattgtgagaattattcaattgtaatgcaatggcttgaaacctacaatattattttaacctgcaatgttttatgcaaaattgtatgctcgaatctacaaattgcttgtattacaccaaaaatcgttacttttctttcttcttgccataatcaagcatctgaaaatagtccctgcatgcttctggggaaaaaaaaataggttcaaatcagtcattgtagagaaaggcttacagtatttctcgtttctagaaaagcataacaattcattaattgcctatcttataattcctataaggctgacttggatctctgacttaagtctagaagtgaggttttcacttttatttaatattattgctattattatttaaataattatttgtaaaccacagcttgatttggagttaagtgttgtctgtgtcttcactgtagctggtaatttactatggtattaatttaaagaaataaattcaatacagcatcacgtctgtttgggaacacacattttgctctatgtatattgtaactaaatggttagtaaactttaaggcatgtggtgactaacgtagcccttagataggaggtttgtcatttttaatgtgttgaaaatagtacagacatggtgacagaaagcaggggtaaagttgaacgtctatgagcattgtctgtctgttttcttaactctttacatgatctgtgagcacctgcttcttctcaaagaactcccttagtaatcatttgtgcctaatgcatcccacacatgtggagtatgactggaacacaattgaaagattcctaacaactggctgcggtaaataacccaagttaagagcatgacttaaagtggaggtcttcagtatctctggcactggcaatacatttaagaacatacagagatcacacattatgtgggacagggcctgcagatagacttgaggacagaaaacaaaaacaaaagcagaaactctaaagtggatccttgctgcctgttatgccttttgtggatataatacctataataccaaaatgagttgttatgtttaatttcaaacaaatcccaactggtgtggaagtaattaactgctagtcgatgtaatgtaatcatcaatatgctggtgacatatgatggcatgtcaggaatactgttgtaagaaagggattgttcagtctacctagaacctatgggaaagctgcaagaccatttacatatcagtacaaaactcctttattttattaaaatatgagaattaacttcaatttattaagattacgtattggtcctttaaattattaaaggtttacatttgataggattaatggatttggtagtgaaatatttttatatatataaatttttggttttttattttgagcactattgggaaacataagcaaaattgaaatgcatggtctttcagtgcaaccatacaatttttattcactttgtaatagaatggacaaaaaaactaaggtttatatattaaactaataaaaaggtacagggtaaattatatacatatatgtatgaatgtatatatacttagattaagaaaaaaaaatgactcacattcctgtaatataaaggtccattgctagttgaaaagtgacctcttttctctgtacatagtgaagcccgtatgtatggagttttaatctgtacagaaagaaatgtattattcattggtctttctgctgctggaaagataatagaatagctgattcttacaacaactgtatgatcagggatgagttagagtatttcttttgtctttgctcaaagccatacatatataaatatatataaagattattaataaattcaacaaaaaataaactacaatcatgaatattttattttatcaatatatgctaatcaaatgttttattttattaatgagtacagctttgcctctatttttacatcataaaatttccaagagcttatacttgataatcacataaaatcaattatattctataattctggaatgagaggactttaaatagaacatggatttttcaaccacttctttgtttacctttttcgtatagtaaaatatgagcttattttcttttttgctctgtgcctttttagaatgtggttgttctccaacttcaaaacacaaccattttgtgtaattattggatatacagatgagaaataattttcctgtaataatggtaaataattgtcctgtaatatatttatacaaacctattttgttataatagttctatgacatacctattttgttataatagttttataacatacctattttgttataatagggccttgggctctattataacaaaacaggtttatataaatacattcatatttatagccttaaacaaaataggtttgtatagtaggcccaaggccctattataacaaaataggtttgtataaatatattcatatttatagccttgggccctgcaaagttatttggagagtgatagaacctccccacacaagtgggttttaaatgatacctaaaagcctgagatagagtttatcataatgagaataagtagtgaagcattcctgaaaacaaggaggataaatagtagcaatggcaatatattctattcaccaaaaaagtagcttgtctccaggtctggatgacctcttcataagtgaacaattccctgatgaatgctgttccactttaaagagatggttattttgcaatttataaacttaactgagcatactattttcaggacactacaaagtacatagtcaagttattaccgtcattcctataggacagagaatgatttaaacaatatgacatgtttaaaattttagatgatttatttcaaatcctgaattatgtctacttcaaattatgagcaatctctattatctttcaggactatttaaaaaatctccatacctcctctttcagcttaggtttttatatttgttaattttactatgttactttgcttctatggccctcacttgcactgtttataatgttaacctgtttgaatgagatatctctccattatatctttatctttttagaacatgtgccataaaacccatgtggttattttgttcatatgcactacaactagcaaacttttattttatgttcacctactttaaaaagtactcatactgtaccatgggaaagaaacatgggccttatagaatggaatgctgagctattttgagtcctgaaaacaatggccaaaaatttaaggaactgtggttgctgcatgcaccaaattgtagcacatacaaataaataaaatacagttctataactgtattcaatatggttattttcaaggaaaaataggatagaaattttctttgaaagatttgctattgtacttagggaagtacacctgctattacccctcaaaagcaatgactttcttaagcaatttcaatttttttcctttttaacaaccctgcacttgcacaaccctgcatctcttgtctcaccctaatgctgaccctgcttccaattcaggctttgacagggacaaatggagattttaaggttttttaatgagagaagccttgctgacactccccgcatcccaccttgaaaattatttaaagatgatcttaaaagaacctacagataatgctctgaatttgtttacaaggtccttgatgtggagagaatgagtaatacattaaatgctggggaaataattatcatttagtgaaaaattaagcatgcttttctaaaatgtggatgtttaacagagcacagctgattgggaacactggcagttcaatgcagctggagtgtctcacagggtgaagaggaacccagatcaagtgggaaatagggatttcaaaaaccttctgaaaggcttttaacatcagggcaaaggttttacagtgttgtactttatattcttaatttaagcttatcaacggggaggattcacattgaaatgtctgttttgctaatgtaacaaggaataaaataatttatgacacagcaaaaactgggggctatttacaaccccaccctgccttgtgaggatgctgggtcctaaggaaggtcctaggtttgctaaatagagtaatgggaataggaaactgaaagtttacttgctttgcgtaagataatatattgcggcagggaaggggtacaagaagataagagctagaacctgtgagaagggaaagaagtgataaaataattttggctaaaataaagcaagttctcaggccaggcgtggtggctcatgcctgtaatcctagcactttgggaggccaaagtgggaggaatgcttgaggccaggaattggagaccaaccagggcagcatgtcaagacctggtctctacaaggaaaaaaaatttttttaattgaccagtatatacttacatacctgcagtgtttagaaaacccgactataggtggtgtattcctgtagtcctagttactcagaaagttaaggcaggaggatcgcttgaacttaggaggtcaaggctgcagtgagccctgttcgttccactgcactccagcttgggggacagagcaaaaccctttctcaagaaaaacccaaacaaacaaaaaagtgaagccagttctttaatttctattggagatatcacacacgctccaaagagtggcaaaggtgaacattctttggagctattatatttctaatgtaacatcaatggccatttactcccaaagggaaacatctttttttttttttttttttaagatggagtctggctctgtcacccaggtgggagtgcaatggcaggatcttggcccactgcaacatcagcctcccaggtttaagcaattctcctgcatcagcctccagagtagctgggattacaggtgcccgccaccatggctagctaaatttttgtaatttttagtagagacagggttttaccatgttggccaggccggtctcgaacccctaacctcaagtgatccgcccgcctcaccctccagaagtgctaggattacaggcctgagccaccgcacccggccctgctatttttttctatgtagttgtttcagtaataccatatgagcagagaatactattgattcattcaattgaagaaatctgaataaattagtaaatataataattcttcaaaagaggaccactttatgtttccaatagattatataattgaattcaggtaacgtagagttattcagacttttttttttaaataacggaattttgcaaaaaaacaggttgcatcgttttctacagagaatattcagatgtgtagaggcaaagagactttcttgaaaggtttttatttcctgttaaatttgtgaggaaaactcctgagaaaggaaagatttacttttgaaggaagaaagaacataacccaaagaaatttgaaagattcaaaaagagttttccaaatgtattctcatttctttctcatatttgttcaaggtcttagtttccaagcattcaaaattaaatcttgtttgcctaactcttctaacatctattaccaacctaacatattacaattctgtttaaaatgtgcagttctaaatgttcttgcgtgcctcactgtggaaagtgtggtgcatggaactgcagcgtcagtatcacccagaagtataattacaagaagtgcagagtccttggccttaccctgtacctacagaagtccgcttttgggcaagatccccagatgattcatatgtgtattaatattgaaaaaattggaactagtaagtcctagaggaggtaaattttaagggctttttaagggaacttccaagtgtgaagacatttctggagatgacaagtcaacatagcatgggatcttggctagacaaggaaagcgagagaacattaaataaacacaagcaacgacaaaccacctatgttataattttatcctggaccatccaaagtttactcttggtcacgctgtctaacccagcctgcctcctggcacttgctagttagaaccagggaagagaaaactaatatgtgttaggtattataatttccttatgtcacataaattttggtgccatagctagcaatgtttcttaatatcacatcagtacaatgtgtccattgccttctgtaacatttttaatgctatcaataatacattgacattataaaaataaatgaatgtggtcaaaaaaaaaaaaaaaaaa

SEQ ID NO: 2396 - DNA, 4955 bp, Homo sapiens
gcttaaaaaagcacagggagatcgcgggcagctttgcagtcgctgccttctcgcgcctgaccatgcacccctgcatcttcctgctgggccacaggcgagcgctttatttctggagctgagggctaaaacttttttgacttttcttctcctcaacatctgaatcatgccatgtgcccagaggagctggcttgcaaacctttccgtggtggctcagctccttaactttggggcgctttgctatgggagacagcctcagccaggcccggttcgcttcccggacaggaggcaagagcattttatcaagggcctgccagaataccacgtggtgggtccagtccgagtagatgccagtgggcattttttgtcatatggcttgcactatcccatcacgagcagcaggaggaagagagatttggatggctcagaggactgggtgtactacagaatttctcacgaggagaaggacctgttttttaacttgacggtcaatcaaggatttctttccaatagctacatcatggagaagagatatgggaacctctcccatgttaagatgatggcttcctctgcccccctctgccatctcagtggcacggttctacagcagggcaccagagttgggacggcagccctcagtgcctgccatggactgactggatttttccaactaccacatggagactttttcattgaacccgtgaagaagcatccactggttgagggagggtaccacccgcacatcgtttacaggaggcagaaagttccagaaaccaaggagccaacctgtggattaaaggacagtgttaacatctcccagaagcaagagctatggcgggagaagtgggagaggcacaacttgccaagcagaagcctctctcggcgttccatcagcaaggagagatgggtggagacactggtggtggccgacacaaagatgattgaataccatgggagtgagaatgtggagtcctacatcctcaccatcatgaacatggtcactgggttgttccataacccaagcattggcaatgcaattcacattgttgtggttcggctcattctactcgaagaagaagagcaaggactgaaaatagttcaccatgcagaaaagacactgtctagcttctgcaagtggcagaagagtatcaatcccaagagtgacctcaatcctgttcatcacgacgtggctgtccttctcaccagaaaggacatctgtgctggtttcaatcgcccctgcgagaccctgggcctgtctcacctttcaggaatgtgtcagcctcaccgcagttgtaacatcaatgaagattcgggactccctctggctttcacaattgcccatgagctaggacacagcttcggcatccagcatgatgggaaagaaaatgactgtgagcctgtgggcagacatccgtacatcatgtcccgccagctccagtacgatcccactccgctgacatggtccaagtgcagcgaggagtacatcacccgcttcttggaccgaggctgggggttctgtcttgatgacatacctaaaaagaaaggcttgaagtccaaggtcattgcccccggagtgatctatgatgttcaccaccagtgccagctacaatatggacccaatgctaccttctgccaggaagtagaaaacgtctgccagacactgtggtgctccgtgaagggcttttgtcgctctaagctggacgctgctgcagatggaactcaatgtggtgagaagaagtggtgtatggcaggcaagtgcatcacagtggggaagaaaccagagagcattcctggaggctggggccgctggtcaccctggtcccactgttccaggacctgtggggctggagtccagagcgcagagaggctctgcaacaaccccgagccaaagtttggagggaaatattgcactggagaaagaaaacgctatcgcttgtgcaacgtccacccctgtcgctcagaggcaccaacatttcggcagatgcagtgcagtgaatttgacactgttccctacaagaatgaactctaccactggtttcccatttttaacccagcacatccttgtgagctctactgccgacccatagatggccagttttctgagaaaatgctggatgctgtcattgatggtaccccttgctttgaaggcggcaacagcagaaatgtctgtattaatggcatatgtaagatggttggctgtgactatgagatcgattccaatgccaccgaggatcgctgcggtgtgtgcctgggagatggctcttcctgccagactgtgagaaagatgtttaagcagaaggaaggatctggttatgttgacattgggctcattccaaaaggagcaagggacataagagtgatggaaattgagggagctggaaacttcctggccatcaggagtgaagatcctgaaaaatattacctgaatggagggtttattatccagtggaacgggaactataagctggcagggactgtctttcagtatgacaggaaaggagacctggaaaagctgatggccacaggtcccaccaatgagtctgtgtggatccagcttctattccaggtgactaaccctggcatcaagtatgagtacacaatccagaaagatggccttgacaatgatgttgagcagcagatgtacttctggcagtacggccactggacagagtgcagtgtgacctgcgggacaggtatccgccgccaaactgcccattgcataaagaagggccgcgggatggtgaaagctacattctgtgacccagaaacacagcccaatgggagacagaagaagtgccatgaaaaggcttgtccacccaggtggtgggcaggggagtgggaagcatgctcggcgacatgcgggccccacggggagaagaagcgaaccgtgctgtgcatccagaccatggtctctgacgagcaggctctcccgcccacagactgccagcacctgctgaagcccaagaccctcctttcctgcaacagagacatcctgtgcccctcggactggacagtgggcaactggagtgagtgttctgtttcctgtggtggtggagtgcggattcgcagtgtcacatgtgccaagaaccatgatgaaccttgcgatgtgacaaggaaacccaacagccgagctctgtgtggcctccagcaatgcccttctagccggagagttctgaaaccaaacaaaggcactatttccaatggaaaaaacccaccaacactaaagcccgtccctccacctacatccaggcccagaatgctgaccacacccacagggcctgagtctatgagcacaagcactccagcaatcagcagccctagtcctaccacagcctccaaagaaggagacctgggtgggaaacagtggcaagatagctcaacccaacctgagctgagctctcgctatctcatttccactggaagcacttcccagcccatcctcacttcccaatccttgagcattcagccaagtgaggaaaatgtttccagttcagatactggtcctacctcggagggaggccttgtagctacaacaacaagtggttctggcttgtcatcttcccgcaaccctatcacttggcctgtgactccattttacaataccttgaccaaaggtccagaaatggagattcacagtggctcaggggaagaaagagaacagcctgaggacaaagatgaaagcaatcctgtaatatggaccaagatcagagtacctggaaatgacgctccagtggaaagtacagaaatgccacttgcacctccactaacaccagatctcagcagggagtcctggtggccacccttcagcacagtaatggaaggactgctccccagccaaaggcccactacttccgaaactgggacacccagagttgaggggatggttactgaaaagccagccaacactctgctccctctgggaggagaccaccagccagaaccctcaggaaagacggcaaaccgtaaccacctgaaacttccaaacaacatgaaccaaacaaaaagttctgaaccagtcctgactgaggaggatgcaacaagtctgattactgagggctttttgctaaatgcctccaattacaagcagctcacaaacggccacggctctgcacactggatcgtcggaaactggagcgagtgctccaccacatgtggcctgggggcctactggagaagggtggagtgcagcacccagatggattctgactgtgcggccatccagagacctgaccctgcaaaaagatgccacctccgtccctgtgctggctggaaagtgggaaactggagcaagtgctccagaaactgcagtgggggcttcaagatacgcgagattcagtgcgtggacagccgggaccaccggaacctgaggccatttcactgccagttcctggccggcattcctcccccattgagcatgagctgtaacccggagccctgtgaggcgtggcaggtggagccttggagccagtgctccaggtcctgtggaggtggagttcaggagagaggagtgttctgtccaggaggcctctgtgattggacaaaaagacccacatccaccatgtcttgcaatgagcacctgtgctgtcactgggccactgggaactgggacctgtgttccacttcctgtggaggtggctttcagaagaggactgtccaatgtgtgccctcagagggcaataaaactgaagaccaagaccaatgtctatgtgatcacaaacccagacctccagaattcaaaaaatgcaaccagcaggcctgcaagaaaagtgccgatttactttgcactaaggacaaactgtcagccagtttctgccagacactgaaagccatgaagaaatgttctgtgcccaccgtgagggctgagtgctgcttctcgtgtccccagacacacatcacacacacccaaaggcaaagaaggcaacggttgctccaaaagtcaaaagaactctaagcccaaa

SEQ ID NO: 2397 - DNA, 2653 bp, Homo sapiens
ctcaaaaggggccggatttccttctcctggaggcagatgttgcctctctctctcgctcggattggttcagtgcactctagaaacactgctgtggtggagaaactggaccccaggtctggagcgaattccagcctgcagggctgataagcgaggcattagtgagattgagagagactttaccccgccgtggtggttggagggcgcgcagtagagcagcagcacaggcgcgggtcccgggaggccggctctgctcgcgccgagatgtggaatctccttcacgaaaccgactcggctgtggccaccgcgcgccgcccgcgctggctgtgcgctggggcgctggtgctggcgggtggcttctttctcctcggcttcctcttcgggtggtttataaaatcctccaatgaagctactaacattactccaaagcataatatgaaagcatttttggatgaattgaaagctgagaacatcaagaagttcttatataattttacacagataccacatttagcaggaacagaacaaaactttcagcttgcaaagcaaattcaatcccagtggaaagaatttggcctggattctgttgagctagcacattatgatgtcctgttgtcctacccaaataagactcatcccaactacatctcaataattaatgaagatggaaatgagattttcaacacatcattatttgaaccacctcctccaggatatgaaaatgtttcggatattgtaccacctttcagtgctttctctcctcaaggaatgccagagggcgatctagtgtatgttaactatgcacgaactgaagacttctttaaattggaacgggacatgaaaatcaattgctctgggaaaattgtaattgccagatatgggaaagttttcagaggaaataaggttaaaaatgcccagctggcaggggccaaaggagtcattctctactccgaccctgctgactactttgctcctggggtgaagtcctatccagatggttggaatcttcctggaggtggtgtccagcgtggaaatatcctaaatctgaatggtgcaggagaccctctcacaccaggttacccagcaaatgaatatgcttataggcgtggaattgcagaggctgttggtcttccaagtattcctgttcatccaattggatactatgatgcacagaagctcctagaaaaaatgggtggctcagcaccaccagatagcagctggagaggaagtctcaaagtgccctacaatgttggacctggctttactggaaacttttctacacaaaaagtcaagatgcacatccactctaccaatgaagtgacaagaatttacaatgtgataggtactctcagaggagcagtggaaccagacagatatgtcattctgggaggtcaccgggactcatgggtgtttggtggtattgaccctcagagtggagcagctgttgttcatgaaattgtgaggagctttggaacactgaaaaaggaagggtggagacctagaagaacaattttgtttgcaagctgggatgcagaagaatttggtcttcttggttctactgagtgggcagaggagaattcaagactccttcaagagcgtggcgtggcttatattaatgctgactcatctatagaaggaaactacactctgagagttgattgtacaccgctgatgtacagcttggtacacaacctaacaaaagagctgaaaagccctgatgaaggctttgaaggcaaatctctttatgaaagttggactaaaaaaagtccttccccagagttcagtggcatgcccaggataagcaaattgggatctggaaatgattttgaggtgttcttccaacgacttggaattgcttcaggcagagcacggtatactaaaaattgggaaacaaacaaattcagcggctatccactgtatcacagtgtctatgaaacatatgagttggtggaaaagttttatgatccaatgtttaaatatcacctcactgtggcccaggttcgaggagggatggtgtttgagctagccaattccatagtgctcccttttgattgtcgagattatgctgtagttttaagaaagtatgctgacaaaatctacagtatttctatgaaacatccacaggaaatgaagacatacagtgtatcatttgattcacttttttctgcagtaaagaattttacagaaattgcttccaagttcagtgagagactccaggactttgacaaaagcaacccaatagtattaagaatgatgaatgatcaactcatgtttctggaaagagcatttattgatccattagggttaccagacaggcctttttataggcatgtcatctatgctccaagcagccacaacaagtatgcaggggagtcattcccaggaatttatgatgctctgtttgatattgaaagcaaagtggacccttccaaggcctggggagaagtgaagagacagatttatgttgcagccttcacagtgcaggcagctgcagagactttgagtgaagtagcctaagaggattctttagagaatccgtattgaatttgtgtggtatgtcactcagaaagaatcgtaatgggtatattgataaattttaaaattggtatatttgaaataaagttgaatattatatataaaaaaaaaaaaaaaaaaa

SEQ ID NO: 2398 - DNA, 3318 bp, Homo sapiens; identical to SEQ ID NO: 133

SEQ ID NO: 2399 - DNA, 1678 bp, Homo sapiens; identical to SEQ ID NO: 645

SEQ ID NO: 2400 - DNA, 2371 bp, Homo sapiens
gcctcgcctcggcgccgcggccggcatttctcctcgcagctcgctgcctcctctatccctgcctccctctcccccctctgtttttctcccttccttccctctccgaccctcttcctctccctcccgatcctttccctcctcctctcatctttcccctgtctctccgttctagctcgtcccccaccccaccttttcttctttctcctcctctccttcctctccccctctcctctgtctccttccaccgtctcccctgcctccctgtctttcagtccctgtttttcagccccgtctccctctcggtttctctcccccaccctccctccgggtttcctccccggtgccctccctcctctctccctcccctccccctccgcccctcgcagccccgccgctcgcagctcccagtctgcctccccgaaccggcgccgccgcccgcactcgccgcaggaccggcccgcccggctcccggggtgcgccctcctcggtcccgcgccctccgggctcgcagggacgtctcctccctcccggctcgcggccccgcccggcccggcccccgcccagagccccagcgcgccgaggatgtgagtcctgctcgcctctggcggagcagcagccactcgcgcgcggagccggagcgcagcgcagcgcagccgcgggcgctctccgggccgctcgcgcgagtgccgcgctcttgccctagcggcgtcccccggcctctcgccggcgccaccgccgcagcagcccgcgggccgtccccggccggccgcccccggccccagcgccgctgaccctgtccgccgcgggcggggacgcgggcggaggaggcgccgcggcggagcccccggacgcgaccatgtcggaggtgctgccctacggcgacgagaagctgagcccctacggcgacggcggcgacgtgggccagatcttctcctgccgcctgcaggacaccaacaacttcttcggcgccgggcagaacaagcggccgcccaagctgggccagatcggccggagcaagcgggttgttattgaagatgataggattgatgacgtgctgaaaaatatgaccgacaaggcacctcctggtgtctaactcccccaaagacaatgagttaagggagagaataagaacggcggtaacagttattggcaaaaagcatgaaaagagaaagcactttgaaatttattactagcttgctacccacgatgaaatcaacaacctgtatctggtatcaggccgggagacagatgaggcgagaggaggaggaggaggaggagaaggctctgggctcctctgcaaaaataaaaataaaaaaataaataaaattttaaaaataataaaaattcactatatacacatataaagaaataaaaagaagtctcagttgcagctatttgtcaaaattaatatccatttctttttatatacggtgaatattgcgcaattatagatctggattttgaaccacttaatgaagcggcaacaccaggtgttttgaggtgttggcattcttcgctgatttggctgttcccaatgtttacattatttaatcttgcaaaaatggttctgtgcacttggatgtgaaatgctgtccagttttattttttttatgttgttatccttggatgtacaaaaaattcagaaaatgatctctgtagatattctgttttattttggtcatctttagaagttatcaggaatgtgtttaaaacaagaagagaacttttctaaggaatgatacatagaaaagattttattttaaaatgagttgtaaagcttgtgtttctttgttgctgcaagctatctgcccaagttaatgcaaatggacacattttttatgtcagaaaaacacacacacacacacacacacacacacacacacacgaaaaacaaagaaaaaaatgcttgagctttttctaacttccccttgcagtctgttgtgtgagcagcctgtttatttctctaatattatgtcagtttattctctttaatggactgtaaaaaaatgtaatcacaagagtgccaaatatcttgaaatgccaaaaggcattttagtttcttttctctgtgctctgagtccacgtacaggaatgcttggagtgtcttttctgttatttatagggattctcttaaggcacaccagctgcctgttttgcatggtatttgcaaaaatgcctcttgcgtgaggaaatcttttaccattttttgtttgcaactttggacctcaagaggtttcccttcccttccccgttccctcttttcttaattcaatattctgtatgttgcaccttgaaccagcacacagggctatttctccaatgtacaataaaagaattgttcctgtgtctcaaaaaaaaaaaaaaaaaaaaa

SEQ ID NO: 2401 - DNA, 5843 bp, Homo sapiens; identical to SEQ ID NO: 590

SEQ ID NO: 2402 - DNA, 4928 bp, Homo sapiens
gcgggccgaatgcaggtgagaaaaggcacggactctgcggctgcgaacccaaacttgggcaccgcacggtgcgcactgctcagccttcgcccccgtgggcgaaaggctgctgcggtttcaggcggctgcttcgtgactaatgaccttgcgcagagttgttaagaaaaaagagaaacccgcgctctccggggtgagaagggactgactctgggcgtctctgaagatggctcgggcttctctttggcgcgccggggggaccctgacactgaccgctctgtgacgcgagtagtctcccctgcaccgtgcccgaagcgacgtgccgggggatttttcattctcgatctgttgactggctcccccgctgcatgagcagagtcggagttgagactggcttgttgctggccccagcgcctggtgcaggaagcgactcacgtttgtctgggtggccggagccggagcagagcctgggtttggagtgagtgcctggaacgtgaattggactcaactcgagtagcagcaaagaccagcgggctggcaggcgggggaggctgcaggctcattccccacctcttcccagccccactgcccgtctgccggagcggttctggccccttccgacagagcggggactagagccggggattctccgcccgctgaggggatgactctgggttgggggagcgccgaacccgcggcgcgcagtgtcccgtgaactgtgagtactgcgactgaacggcggcaggcgagcgggcgattagcacccattgcatgaattatgaaacaataactttcggaagaagcaggaggaaaaaaagaagcatctatcgctgccctcccacccccattcccggccaactctccacgccgcttttgccccctccctcccctccctctcgctccttcctttccgggagaggggagaggactcgggggagggcaggcggccggccccggaggaggggggcgccgagggggctgtggttagaaggagcagtagcagcagcagcaggagaagatgctgaggatgcggaccgcgggatgggcgcgcggctggtgcttgggctgctgcctcctcctgccgctctcgctcagcctggcggccgccaagcagctcctccggtaccggctggccgaggagggccccgccgacgtccgcatcggcaacgtggcttcagacctgggcatcgtgaccggatcgggtgaggtgactttcagcctggagtccggttccgagtacctgaagatcgacaacctcactggcgagctgagcacgagcgagcggcgcatcgaccgcgagaagctgccccagtgtcagatgatcttcgacgagaacgagtgcttcctggacttcgaggtgtcggtgatcgggccctcgcagagctgggtggacctgtttgagggtcaggtcatcgtgcttgacatcaacgacaacacgcccaccttcccgtcgcccgtgctcacgctcacggtggaggagaatcggccggtgggcacactttacctgctgcccacagccaccgaccgcgacttcggccgcaacggcatcgagcgctacgagctgctccaggagcccggaggcggcggcagcggcggcgagagccggcgcgccggggcggccgacagcgccccctaccccgggggcggcgggaacggcgcgagcggcggcggctcgggaggctccaagcggcggctggacgcatcagagggcggcggcggcaccaaccccggcggccgcagcagcgtgttcgagctgcaggtggcggacaccccggacggcgagaagcagccgcagctgatcgtgaagggggcgctggaccgcgagcagcgcgactcctacgagctgaccctgcgagtgcgcgacggcggcgacccgcctcgctcctcgcaggccatcctacgggtcctcatcaccgacgtgaacgacaacagcccccgcttcgagaagagcgtgtacgaggccgacttggctgagaacagcgccccggggacccccatcctgcaactgcgcgcagccgacttggacgtgggggtcaacgggcagatcgaatacgtgttcggggcggccaccgagtcggtgaggcggctgctgcgccttgacgagacgtccggctggctcagcgtcctgcaccggatcgaccgcgaggaggtgaaccagctgcgcttcacggtcatggcccgcgaccgcgggcagccccccaagaccgacaaggccaccgtggtccttaacatcaaagacgagaacgacaacgtgccgtccattgaaatccgcaagattgggcgcatccccctcaaggacggggtggccaacgtggccgaggacgttctggtcgacacccccatcgctctggtgcaggtgtccgaccgagaccaaggcgagaacggggtggtcacctgcaccgtggtgggcgacgtgcccttccagctcaagccagccagcgacaccgagggcgaccagaacaagaaaaagtacttcttgcacacctcgacccctctggactatgaggccacccgggagttcaacgtggtcatcgtggcggtggactcaggcagccccagcctctcgagcaacaactccctgattgtcaaggtgggagacaccaacgacaacccgcccatgttcggccagtcggtggtggaggtttacttccctgagaacaacatcccgggcgagagggtggccacggtgctggcgacagacgcagacagcggtaagaacgccgagatcgcctactcgctggactcctctgtgatggggatctttgccatcgatcccgattctggggacatcctggtcaataccgtgctggaccgcgagcagactgacaggtatgagtttaaagttaacgccaaagacaaaggcatccccgtgctgcagggcagcactacggtgattgtgcaggtggctgataaaaatgacaatgaccctaagtttatgcaggacgtcttcaccttttatgtgaaagaaaacttgcagcccaacagccctgtggggatggtcaccgtgatggatgctgacaaggggcggaatgcagagatgagcctgtacatagaggagaacaataacattttttctattgaaaatgacacggggaccatttactccacaatgtcttttgaccgggaacatcagaccacatacactttcagagtcaaggctgtggatgggggagatcctcccagatctgccacagctacagtctcgctttttgtgatggatgaaaatgacaatgctcccacagttacccttcccaaaaacatttcctacactttactgccaccttcgagtaatgtcaggacagtagtagctacagtgttggcaacagacagtgatgatggcatcaatgcagacctgaactacagcattgtgggaggaaatcccttcaagctgtttgaaattgatcccactagtggtgtggtttccttagtgggaaaactcacccaaaagcattatggcttgcacaggttggtggtgcaagtgaatgacagtgggcagccttcccagtccaccacgactctggtgcacgtgtttgtcaatgaaagtgtttctaatgcaactgcgattgactcccagatagctagaagtttgcacatcccactcacccaggatatagctggtgacccaagctatgaaattagcaaacagagactcagtattgtcattggcgtggttgctggcattatgacggtgattctaatcatcttaattgtagtgatggcaaggtactgcaggtccaaaaataaaaatggctatgaagccggcaaaaaagatcacgaagacttttttacaccccaacagcatgacaaatctaaaaagcctaaaaaggacaagaaaaacaaaaaatctaagcagcctctctacagcagcattgtcactgtggaggcttctaagccaaatggacagaggtatgatagtgtcaatgagaagctgtcagacagcccaagcatggggcgatacaggtccgttaatggtgggcccggcagtcctgacctggcaaggcattacaaatctagttccccattgcctactgttcagcttcatccccagtcaccaactgcaggaaaaaaacaccaggccgtacaagatctaccaccagccaacacatttgtgggagcaggagacaacatttcaattggatcagatcactgctctgagtacagctgtcaaaccaataacaagtacagcaaacaggtaagatgtatcccaaatatatttaaatatcccagggagggctaataactctgagacagattatcttctgtaaagttttgtcttctcgtttttaaagttattaaaattttaacagtaggaatttaatgttaatttttgcaccattaatttagcaaaggccatctacaagaggtataccactgtattttgcaaattagaattaaggttcactaaactactgaaagaagtattcagagtaggcagtgtttggcagttctctttgcacttgacatccctaattcatactacatttttttgtttccagaataaatatgtgtgtattacttagatggttagttttcacctgaaattattttcttctgtggcaactaagtggataattacatccagagaaaaagtttctaaagttactactggtgtctatgcaaattggattccatagaagttttagctatgttatttacaatgcaggattttacagataaatagatgctgattcatgcagatgtagtactaagtctgagatattgaaatactgactactttgatgaaactgctggtttaaaaatatttactgatatgcaaatgtcatgcaaaactccactttcaatcttttatatctataataatcgatacctataacaattagtgttctataatgatatgcaattaccatttgcattctttctgtttggtattaaaagtttgcaaacaaaaatacattgcatgagccatttat

SEQ ID NO: 2403 - DNA, 1047 bp, Homo sapiens; identical to SEQ ID NO: 73

SEQ ID NO: 2404 - DNA, 2132 bp, Homo sapiens; identical to SEQ ID NO: 1898

SEQ ID NO: 2405 - DNA, 6313 bp, Homo sapiens
ttctgcgtttctctagtgcagtgcctggagatgaccaccaaacggaaaatcatcggccgtctggtgccatgccgatgtttccgaggtgaagaagaaatcatctcagttttagattactcccactgcagtcttcagcaggtgccaaaggaggtctttaacttcgaacgaacattagaggagctttatctagatgccaatcaaattgaagaactacccaagcaattgttcaactgtcaagctctacgaaaactaagtattcctgataacgacctttcaaatctgccaaccactattgctagtttagttaatcttaaagaactcgacatcagtaaaaatggtgtacaagaatttccagaaaacataaagtgctgtaagtgtttaacaattattgaagccagtgtcaatcccatttctaaactacctgatggcttcacacagctcctaaacctgacccagctctacctgaatgacgcctttcttgaatttcttccagccaattttggaagacttgtcaaattgcggatcttggagttaagagaaaatcacttgaaaactctaccaaagtcaatgcacaaactggcccagttggaaagacttgacctaggcaataatgaattcggtgagctgcctgaagttctggatcaaatacaaaatttgagggagttatggatggataataatgcattacaagtgttacctgggtctatagggaagttaaagatgttggtatacctggatatgtcaaaaaacagaatagaaacagttgacatggacatttctggatgtgaagcccttgaggacctcttattgtcatccaatatgttgcaacaattgcctgattctataggacttttgaaaaaactaacaactctaaaagtagatgacaatcaacttacaatgctacccaatacaattggaaatttatctttattagaagaatttgactgtagctgtaatgaactggagtcactaccttctactattggctaccttcatagtcttcggacattagcagttgatgagaatttccttccagaattacccagagaaattggaagttgtaagaatgtaacagtcatgtctctacgctccaacaaattagaatttcttcctgaagagattggacagatgcagaaactaagagtcctaaatttgagtgacaacagattgaagaatttaccattctcatttaccaaacttaaagagcttgcagctttgtggctttctgacaatcagtccaaagcccttatccctttacaaacagaagcccatccagaaacaaagcaaagagtattgactaactacatgtttccccagcagcctcgtggtgatgaagatttccagtcagacagtgacagctttaaccctacactgtgggaagagcagagacaacaacgcatgactgttgcctttgaatttgaagacaaaaaagaagatgacgaaaatgctgggaaagttaaggatctctcctgccaagccccctgggaaaggggccagcgtgggattactctccaacctgccagactgtctggcgattgctgcacaccatgggccaggtgtgatcagcagatccaagatatgcccgtcccccagaatgacccacagctggcatggggttgtataagtggcctccagcaggaaaggagcatgtgtactccattgccagttgcagcacaatccaccactcttccctctctaagtggcagacaggttgaaataaacctaaaacgatatccaactccttacccagaggatttaaagaatatggtaaaatctgttcaaaatttggtgggtaagccaagccatggagtgcgtgttgagaattcaaatccaactgctaacacggagcaaactgtgaaagaaaaatatgaacacaagtggccggtagccccaaaggagattacagtggaggattcttttgttcatccagctaatgaaatgaggattggggaacttcacccttcattagctgagacccctctgtacccacccaaacttgttctgctagggaaggacaaaaaagaatcaactgatgagtctgaagttgacaaaactcactgtctgaataacagtgtttcctcaggcacttactcagactactcgccttcccaggcttcctcaggatcctctaatacccgggttaaagtggggtccttgcagacaacagctaaagatgcagtacataattctttgtggggtaacaggattgcaccatctttcccacagcctcttgattcaaagccattactcagccagcgggaggctgttcccccaggcaatataccacagcgtcctgaccggctgcccatgagtgatactttcactgacaactggactgatggctcgcattatgacaacacagggtttgttgctgaggaaaccacagccgagaatgccaacagtaatcctctcttaagttcgaaatctagaagcacatcttcgcatggacgcaggcctttgatcaggcaagacaggattgttggtgttcccctggaactcgagcagtctacacacagacacacaccagaaacagaagtgcctccttccaatccttggcagaattggaccagaacccctagtccgtttgaagacaggaccgcttttccttccaaattagagacaacccccactaccagcccattgcctgaaaggaaagaacatataaaggaatctactgaaatacctagtcctttttctccaggcgtaccatgggagtatcatgattccaatcccaacaggagtcttagtaatgtcttttctcaaatccactgccgcccggaatcttctaaaggtgttatttcaattagcaaaagcacagagaggctttcccccctaatgaaagatatcaagtctaataaattcaaaaagtcacagagtatcgatgagattgacattggtacatataaggtgtataacataccattagaaaactatgcttctgggagtgatcacttaggaagccacgaacgaccggataagatgctgggaccagagcatggtatgtccagtatgtctcgaagccagtcagtcccaatgctggatgatgagatgctcacctacggaagtagtaaggggccacaacaacaaaaagcttctatgacaaaaaaagtctatcagtttgaccaaagcttcaatcctcaaggatcagtggaagtgaaagccgaaaagaggataccacccccttttcaacacaatcccgagtacgtgcaacaggccagcaaaaacatcgccaaggatttgattagtcctagagcttacagaggatacccaccgatggagcaaatgttttcattttctcagccatctgtgaatgaggatgctgtggtgaatgcccagttcgcaagccaaggggccagggcgggcttcctgagaagggccgactccctggtgagcgccacagaaatggccatgtttagaagggtcaatgagcctcatgagctgcccccaactgataggtacggcagacccccatataggggagggctggatcgccaaagcagcgttacagtgactgagtcccagttcctgaaaaggaatggcaggtatgaagatgaacacccttcatatcaagaagtgaaagctcaggcgggaagttttccggttaaaaaccttacccaaaggaggccattgtctgcgagaagctacagtacagagagttacggtgcctcccaaaccaggccagtttcagctaggcctactatggcagctcttttggaaaaaataccatctgactataacttgggtaactatggtgacaagccatcagataacagtgatttaaagacgaggcctactcctgtgaagggagaggagagctgtggtaaaatgcctgcagactggagacaacagctgcttagacatatagaagctagacggttagacaggaatgctgcttacaaacacaatacagttaaccttggcatgctgccctatggaggtatttcagcaatgcatgcaggcagaagcatgactttaaacttgcagactaagtctaaatttgatcatcaagaactacctcttcagaaaaccccgtcccagcaaagcaacattttagacaatggacaagaagatgtatctcctagtggccaatggaatccttatccacttgggaggcgggatgtacctccggacaccattactaagaaggcaggcagccacatccagacgttgatggggtcccaaagccttcagcatcgcagccgggagcagcagccgtatgaaggaaatataaacaaagtgaccatccagcaatttcagtcaccattgcctattcagatcccctcttcacaggccacccggggacctcagcctggacggtgcttaattcaaactaaagggcaaaggagtatggatggatatccagagcagttttgtgtgagaatagaaaagaatcctggccttggatttagtatcagtggtggaattagtggacaaggaaatccattcaaaccttctgacaagggtatctttgttactagggttcagcctgatgggccagcatcaaacctactgcagcctggtgataagatccttcaggcaaatggacacagttttgtacatatggaacatgaaaaagctgtattactactgaagagtttccagaacacagtagacctagttattcaacgtgagcttactgtctaaatattttttataaatagtgaagatacgtctagccagacctaatgttcaaaaataaatttatacatagaaacaaattttgccaattgctggaccaatggcaaacattagtgccaaatgtataatactatatgttagcactgaccatccttaaaaaatgttaactctataaatatgatgttcatgtggttatgtattagttttaattgtcagcctctggctgtgcattggtgcagttttgtttctgtttttgtttttgtttttaatcaaataagtttcttctcaaaatggatttcatataatttcggagcacggaagcacacacaagctctttatgaattctgctctccatcagaaacactgcctcaaagttgtatatgcctttatatagaaaatacaaatataaagaattgtaattcccataaaatatttctagcacaaggtatatgttggcatatatacaaaaagaatatagagaaaaacaatattttcataaactaaacatctcagatagagaaaaaatatatcttaaaataagactttactatattgaatctttttcaataaaaattacatgataatgccttatgaaagtaactgtacatatggtataaagtgtttatatttggttccatattcatttgctaaattctcatgacacagagtgaaatatttcataaattagccatttatctctgggacccaaataaaaataggatgaactaatttgttcaatgcctttagctaattacaatacatgcagagtttagaaacagactaaaggtcattgtagttaagtctttttcaccacaaatttaagcagtggatgatgggtggcaggaaaggtattgctttatttctttcaagttcatgttgattataaactgtagcccctgtgatttctttacttgtaaatgtggaatttatttgtgtgttgcttaatctaatttgctgctttttaaattatttaaaacgaattttggaaattgataaaatttatcattacgaaagactgctgttagaaagttatggtaggtgattttaaatccttggtatttaaatatgaaacttcaaatataatttctcagagctgtggtctacctgtatcattaatttcaatggctgtttttctgggcagaaatagataaaatactttttttccaaaaacagtttcaaggtatgtaaaatcctgaatgctttttcactgaagagaaagacaagcatggttaatgtagaattatttacttttccattgaaactattttcctgcataaatgatcaaaatttattttataatcctttaaaatacttatctttcatattagtcattaatttaattacaatattaatttgaatttccaggataatttcccggagttggttgcatgcattatctttcataattttacatagttcttttgttatataatgaatttactttacatgctagtgtttcaagtattgtatgaggattttcacaatagtatcactgaatgatgtcaccagagctctgagaataatatttgtaagttaactgttttatggggacattgaaaatattgtatttttgtagggtctattaaaatgagtgtcacttattagaaaaaaaaaaaaaaaaaaaaaaaaaaaaaaaaaaaaaaaaaaaaaaaaaaaaaaaaaaaaaaaaaaaaaa

SEQ ID NO: 2406 - DNA, 1740 bp, Homo sapiens
gaggccaggggagggtgcgaaggaggcgcctgcctccaacctgcgggcgggaggtgggtggctgcggggcaattgaaaaagagccggcgaggagttccccgaaacttgttggaactccgggctcgcgcggaggccaggagctgagcggcggcggctgccggacgatgggagcgtgagcaggacggtgataacctctccccgatcgggttgcgagggcgccgggcagaggccaggacgcgagccgccagcggtgggacccatcgacgacttcccggggcgacaggagcagccccgagagccagggcgagcgcccgttccaggtggccggaccgcccgccgcgtccgcgccgcgctccctgcaggcaacgggagacgcccccgcgcagcgcgagcgcctcagcgcggccgctcgctctccccctcgagggacaaacttttcccaaacccgatccgagcccttggaccaaactcgcctgcgccgagagccgtccgcgtagagcgctccgtctccggcgagatgtccgagcgcaaagaaggcagaggcaaagggaagggcaagaagaaggagcgaggctccggcaagaagccggagtccgcggcgggcagccagagcccagccttgcctccccgattgaaagagatgaaaagccaggaatcggctgcaggttccaaactagtccttcggtgtgaaaccagttctgaatactcctctctcagattcaagtggttcaagaatgggaatgaattgaatcgaaaaaacaaaccacaaaatatcaagatacaaaaaaagccagggaagtcagaacttcgcattaacaaagcatcactggctgattctggagagtatatgtgcaaagtgatcagcaaattaggaaatgacagtgcctctgccaatatcaccatcgtggaatcaaacgagatcatcactggtatgccagcctcaactgaaggagcatatgtgtcttcagagtctcccattagaatatcagtatccacagaaggagcaaatacttcttcatctacatctacatccaccactgggacaagccatcttgtaaaatgtgcggagaaggagaaaactttctgtgtgaatggaggggagtgcttcatggtgaaagacctttcaaacccctcgagatacttgtgcaagtgcccaaatgagtttactggtgatcgctgccaaaactacgtaatggccagcttctacagtacgtccactccctttctgtctctgcctgaataggagcatgctcagttggtgctgctttcttgttgctgcatctcccctcagattccacctagagctagatgtgtcttaccagatctaatattgactgcctctgcctgtcgcatgagaacattaacaaaagcaattgtattacttcctctgttcgcgactagttggctctgagatactaataggtgtgtgaggctccggatgtttctggaattgatattgaatgatgtgatacaaattgatagtcaatatcaagcagtgaaatatgataataaaggcatttcaaagtctcacttttattgataaaataaaaatcattctactgaacagtccatcttctttatacaatgaccacatcctgaaaagggtgttgctaagctgtaaccgatatgcacttgaaatgatggtaagttaattttgattcagaatgtgttatttgtcacaaataaacataataaaaggagttcagatgtttttcttcattaaccaaaaaaaaaaaaaaa

SEQ ID NO: 2407 - DNA, 6721 bp, Homo sapiens
ggaactatctcctgagtgctgcaagttgtaacgggcaccgctgagcctgtttccctttggagcacttcttatctagaagcagtgtttagtttcttccaaactgggccacttcgtccacctactctgttctgagtaaggaaacagcctccaagcatcagcagagcccagatgagcacgggccgcggagccgcttagcagtctcccgggacccagctccggaggagccgcaagcatgcaccctgggttgtggctgctcctggttacgttgtgcctgaccgaggaactggcagcagcgggagagaagtcttatggaaagccatgtgggggccaggactgcagtgggagctgtcagtgttttcctgagaaaggagcgagaggacgacctggaccaattggaattcaaggcccaacaggtcctcaaggattcactggctctactggtttatcgggattgaaaggagaaaggggtttcccaggccttctgggaccttatggaccaaaaggagataagggtcccatgggagttcctggctttcttggcatcaatgggattccgggccaccctggacaaccaggccccagaggcccacctggtctggatggctgtaatggaactcaaggagctgttggatttccaggccctgatggctatcctgggcttctcggaccacccgggcttcctggtcagaaaggatcaaaaggtgaccctgtccttgctccaggtagtttcaaaggaatgaagggggatcctgggctgcctggactggatggaatcactggcccacaaggagcacccggatttcctggagctgtaggacctgcaggaccaccaggattacaaggtcctccagggcctcctggtcctcttggtcctgatgggaatatggggctaggttttcaaggagagaaaggagtcaagggggatgttggcctccctggcccagcaggacctccaccatctactggagagctggaattcatgggattccccaaagggaagaaaggatccaagggtgaaccagggcctaagggttttccaggcataagtggccctccaggcttcccgggccttggaactactggagaaaagggagaaaagggagaaaagggaatccctggtttgccaggacctaggggtcccatgggttcagaaggagtccaaggccctccagggcaacagggcaagaaagggaccctgggatttcctgggcttaatggattccaaggaattgagggtcaaaagggtgacattggcctgccaggcccagatgttttcatcgatatagatggtgctgtgatctcaggtaatcctggagatcctggtgtacctggcctcccaggccttaaaggagatgaaggcatccaaggcctacgtggcccttctggtgtccctggattgccagcattatcaggtgtcccaggagccctagggcctcagggatttccagggctgaagggggaccaaggaaacccaggccgtaccacaattggagcagctggcctccctggcagagatggtttgccaggcccaccaggtccaccaggcccacctagtccagaatttgagactgaaactctacacaacaaagagtcagggttccctggtctccgaggagaacaaggtccaaaaggaaacctaggcctcaaaggaataaaaggagactcaggtttctgtgcttgtgacggtggtgttcccaacactggaccacccggggaaccaggcccacctggtccatggggtctcataggccttccaggccttaaaggagccagaggagatcgaggctctgggggtgcacagggcccagcaggggctccaggcttagttgggcctctgggtccttcaggacccaaaggaaagaagggggaaccaattctcagtacaatccaaggaatgccaggagatcggggtgattctggctcccagggcttccgtggtgtaataggagaaccaggcaaggacggagtaccaggtttaccaggtctgccaggccttccgggtgatggtggacagggcttcccaggtgaaaaggggttacctggacttcctggtgaaaaaggccatcctggtccacctggcctcccaggaaatgggttaccaggacttcctggaccccgtgggcttcctggagataaaggcaaggatggattaccgggacaacaaggccttcccggatctaagggaatcaccctgccctgtattattcctgggtcatacggtccatcaggatttccaggcactcccggattcccaggccctaaagggtctcgaggcctccctgggaccccaggccagcctgggtcaagtggaagtaaaggagagccagggagtccaggattggttcatcttcctgaattaccaggatttcctggacctcgtggggagaagggcttgcctgggtttcctgggctccctggaaaagatggcttgcctgggatgattggcagtccaggcttacctggttccaagggagccactggtgacatctttggtgctgaaaatggtgctccgggggaacaaggcctacaaggattaacagggcacaaaggatttcttggagactctggccttccaggactcaagggtgtgcacgggaagcctggcttactaggccccaaaggtgagcggggcagccctgggacaccaggacaggtgggacagccaggcaccccaggatctagtggtccatatggcatcaagggcaaatctgggctcccaggagcaccaggcttcccaggcatctcaggacatcctggaaagaaaggaacaagaggcaagaaaggtcctcctggatcaattgtaaagaaagggctgccagggctaaaaggccttcctggaaatccaggcctagtaggactgaaaggaagcccaggctctccaggggtcgctgggttgccagccctctctggacccaagggagagaaggggtctgttggattcgtaggttttccaggaataccaggtctgcctggtattcctggaacaagaggattaaaaggaattccaggatcaactggaaaaatgggaccatctggacgtgctggtactcctggtgaaaagggagacagaggcaatccggggccagtcggaatacctagtccaagacgtccaatgtcaaacctttggctcaaaggagacaaaggctctcaaggctcagccggatccaatggatttcctgggccaagaggtgacaaaggagaggctggtcgacctggaccaccaggcctacctggagctcctggcctcccaggcattatcaaaggagttagtggaaagccagggccccctggcttcatgggaatccggggcttacctggcctgaaggggtcctctgggatcacaggtttcccaggaatgccaggagaaagtggttcacaaggtatcagagggtcgcctggactcccaggagcatctggtctcccaggcctgaaaggagacaacggccagacagttgaaatttccggtagcccaggacccaagggacagcctggcgaatctggttttaaaggcacaaaaggaagagatggactaataggcaatataggcttccctggaaacaaaggtgaagatggaaaagttggtgtttctggagatgttggccttcctggagctccaggatttccaggagttgccggcatgagaggagaaccaggacttccaggttcttctggtcaccaaggggcaattgggcctctaggatcccccggattaataggacccaaaggcttccctggatttcctggtttacatggactgaatgggcttccgggcaccaagggtacccatggcactccaggacctagtatcaccggtgtgcctgggcctgctggtctccctggacccaaaggagaaaaaggatatccaggaattggcatcggagctccagggaagccgggcctgagagggcaaaaaggtgatcgaggtttcccaggtctccagggccctgctggtctccccggtgccccaggcatctccttgccctcactcatagcaggacagcctggtgaccccgggcgaccaggcctagatggagaacgaggccgcccaggccccgctggacccccaggtccccctgggccatcctcgaatcaaggcgacaccggagaccctggcttccctggaattcctggacctaaagggcctaagggagaccaaggaattccaggtttttctggcctccctggagagctaggactgaaaggcatgagaggtgagcctggcttcatggggactccaggcaaggttgggccacctggagacccaggatttcccggaatgaaggggaaggcagggccaagaggctcttctggcctccaaggtgatcctggacaaacaccaactgcagaagctgtccaggttcctcctggacccttgggtctaccagggatcgatggcatccctggcctcactggggaccctggggctcaaggccctgtaggcctacaaggctccaaaggtttacctggcatccccggtaaagatggccccagtgggctcccaggcccacctggggctcttggtgatcctggtctgcctggactgcaaggccctccaggatttgaaggagctccagggcagcaaggccccttcgggatgcctggaatgcctggccagagcatgagagtgggctacacgttggtaaagcacagccagtcggaacaggtgcccccgtgtcccatcgggatgagccagctgtgggtggggtacagcttactgtttgtggaggggcaagagaaagcccacaaccaggacctgggctttgctggctcctgtctgccccgcttcagcaccatgcccttcatctactgcaacatcaacgaggtgtgccactatgccaggcgcaatgataaatcttactggctctccactaccgcccctatccccatgatgcccgtcagccagacccagattccccagtacatcagccgctgctctgtgtgtgaggcaccctcgcaagccattgctgtgcacagccaggacatcaccatcccgcagtgccccctgggctggcgcagcctctggattgggtactctttcctcatgcacactgccgctggtgccgagggtggaggccagtccctggtctcacctggctcctgcctagaggactttcgggccactcctttcatcgaatgcagtggtgcccgaggcacctgccactactttgcaaacaagtacagtttctggttgaccacagtggaggagaggcagcagtttggggagttgcctgtgtctgaaacgctgaaagctgggcagctccacactcgagtcagtcgctgccaggtgtgtatgaaaagcctgtagggtggcacctgccactctgccccttgccctcccctgcccctcacaacagtcacctcacaaacctgaatggtctgaagaaggaaggcctgagcccctttgcctgtcaagttgtacattggagtctcatttgggctagactaccggacactcgtcaccccagccctcgggtccatagagatgagcccaccctgctgagatctgctgtcctgtttctgtcaagctggtgctactgtttgatttggatgattgtgtgactattcatggctacctcagaaagatttgatgggccacaactgtcttagactgctagctttctccttaccgtcttgatcggaaagctcttcctaatcgctaatcagtcatttcttcatgtacagaggtcagcacacattatttggcttaaaccagaacccagtgtttccacacttaaattctctaaccgaatattcatggatggctcaagtctgcacagagcaagtcctcactcttcaaggaggcccactgtgtctaggcaggcaagagaattgaaatgaggtgccacccagtagcccagagtgagctttagctctctctagaatgagcaagactgggccccacatggcttagagaggcttgaaggccagcagctgggttgggggtggtggtcattaatggcatatggtcctagacaaaccatctcctccttgccggctccccctccagccagagacagaggatgtggcctggttcaaagtaaagcagaggatgcaacaaatgtggccaagcctatcaaaggaaatgagaatgacagccttttttcctgggccagaagtagaggggtgggtgcgtaaggatgtgtgagttttgcttttgactccaggaacaaaaaggtaaatcccacatcccagtttctcagaagtccctgtttattccaaatgccatccagatgtgtgcaatgtggcaaactgaagctgcacagtgttggtttccttgtattctgaggatgttaaagactttgttaaatggttatccaattgctctttcacaggtagcctattaaactattttaatatgtttttttaaacctcataaaaatctagcacactcttctcttgagcagttagcagacctaaagcaagcctgaattggctatgcagtacattgtattctgtttgggggaatttgttttagccattttctttaattaccagttttccagaacactcttagctatgttgacatgaggcagttccttccaggtgattctgtttccttaagtattatataaactgtgccaatacagacaaagcataatcaatataatctgaattattgttatctttacctcctgagtaataagcatggtgtcagttttgtacatagcaaataaaataaatgaaatctgaacatgtgaaaaaaaaaaaaaaaaaaaaaaaa

SEQ ID NO: 2408 - DNA, 2798 bp, Homo sapiens; identical to SEQ ID NO: 1462

SEQ ID NO: 2409 - DNA, 3757 bp, Homo sapiens; identical to SEQ ID NO: 145

SEQ ID NO: 2410 - DNA, 3595 bp, Homo sapiens; identical to SEQ ID NO: 626

SEQ ID NO: 2411 - DNA, 790 bp, Homo sapiens
agagtggactgagcagccagtaggggagagagcagttaaggcacacagagcaccagctccctcctgcctgaagatgttccaccaaatttgggcagctctgctctacttctatggtattatccttaactccatctaccagtgccctgagcacagtcaactgacaactctgggcgtggatgggaaggagttcccagaggtccacttgggccagtggtactttatcgcaggggcagctcccaccaaggaggagttggcaacttttgaccctgtggacaacattgtcttcaatatggctgctggctctgccccgatgcagctccaccttcgtgctaccatccgcatgaaagatgggctctgtgtgccccggaaatggatctaccacctgactgaagggagcacagatctcagaactgaaggccgccctgacatgaagactgagctcttttccagctcatgcccaggtggaatcatgctgaatgagacaggccagggttaccagcgctttctcctctacaatcgctcaccacatcctcccgaaaagtgtgtggaggaattcaagtccctgacttcctgcctggactccaaagccttcttattgactcctaggaatcaagaggcctgtgagctgtccaataactgacctgtaacttcatctaagtccccagatgggtacaatgggagctgagttgttggagggagaagctggagacttccagctccagctcccactcaagataataaagataatttttcaatcctcaaaaaaaaaaaaaaaaaaaaaaaaaaaaaa

SEQ ID NO: 2412 - DNA, 1600 bp, Homo sapiens; identical to SEQ ID NO: 121

SEQ ID NO: 2413 - DNA, 887 bp, Homo sapiens; identical to SEQ ID NO: 1635

SEQ ID NO: 2414 - DNA, 1150 bp, Homo sapiens
gcaggggagctccgagtgtccacaggaagggaactatcagctcctggcatctgtaaggatgctgtccatgctgaggacaatgaccagactctgcttcctgttattcttctctgtggccaccagtgggtgcagtgcagcagcagcctcttctcttgagatgctctcgagggaattcgaaacctgtgccttctccttttcttccctgcctagaagctgcaaagaaatcaaggaacgctgccatagtgcaggtgatggcctgtattttctccgcaccaagaatggtgttgtctaccagaccttctgtgacatgacttctgggggtggcggctggaccctggtggccagcgtgcacgagaatgacatgcgtgggaagtgcacggtgggtgatcgctggtccagtcagcagggcaacaaagcagactacccagagggggatggcaactgggccaactacaacacctttggatctgcagaggcggccacgagcgatgactacaagaaccctggctactacgacatccaggccaaggacctgggcatctggcatgtgcccaacaagtcccccatgcagcattggagaaacagcgccctgctgaggtaccgcaccaacactggcttcctccagagactgggacataatctgtttggcatctaccagaaatacccagtgaaatacagatcagggaaatgttggaatgacaatggcccagccatacctgtggtctatgactttggtgatgctaagaagactgcatcttattactcaccgtatggtcaacgggaatttgttgcaggattcgttcagttccgggtgtttaataacgagagagcagccaacgccctttgtgctgggataaaagttactggctgtaacactgagcatcactgcatcggtggaggagggttcttcccacagggcaaaccccgtcagtgtggggacttctccgcctttgactgggatggatatggaactcacgttaagagcagctgcagtcgggagataacggaggcggctgtactcttgttctatagatgagacagagctctgcggtgtcagggcgagaacccatcttccaaccccggctatttggagacggaaaaactggaattctaacaaggaggagaggagactaaatcacatcaatttgca

SEQ ID NO: 2415 - DNA, 3399 bp, Homo sapiens
gcggacggtctcccgacacgccggctgagagcccttttcgactgtgagctgcggcagctgagcagaggcggcggcgcgggacctgcagtcgccagggattccctccaggtgacgatgctctggttctccggcgtcggggctctggctgagcgttactgccgccgctcgcctgggattacgtgctgcgtcttgctgctactcaattgctcgggggtccccatgtctctggcttcctccttcttgacaggttctgttgcaaaatgtgaaaatgaaggtgaagtcctccagattccatttatcacagacaacccttgcataatgtgtgtctgcttgaacaaggaagtgacatgtaagagagagaagtgccccgtgctgtcccgagactgtgccctggccatcaagcagaggggagcctgttgtgaacagtgcaaaggttgcacctatgaaggaaatacctataacagctccttcaaatggcagagcccggctgagccttgtgttctacgccagtgccaggagggcgttgtcacagagtctggggtgcgctgtgttgttcattgtaaaaaccctttggagcatctgggaatgtgctgccccacatgtccaggctgtgtgtttgagggtgtgcagtatcaagaaggggaggaatttcagccagaaggaagcaaatgtaccaagtgttcctgcactggaggcaggacacaatgtgtgagagaagtctgtcccattctctcctgtccccagcaccttagtcacatacccccaggacagtgctgccccaaatgtttgggtcagaggaaagtgtttgacctcccttttgggagctgcctctttcgaagtgatgtttatgacaatggatcctcatttctgtacgataactgcacagcttgtacctgcagggactctactgtggtttgcaagaggaagtgctcccaccctggtggctgtgaccaaggccaggagggctgttgtgaagagtgcctcctacgagtgcccccagaagacatcaaagtatgcaaatttggcaacaagattttccaggatggagagatgtggtcctctatcaattgtaccatctgtgcttgtgtgaaaggcaggacggagtgtcgcaataagcagtgcattcccatcagtagctgcccacagggcaaaattctcaacagaaaaggatgctgtcctatttgcactgaaaagcccggcgtttgcacggtgtttggagatccccactacaacacttttgacggtcggacatttaactttcaggggacgtgtcagtacgttttgacaaaagactgctcctcccctgcctcgcccttccaggtgctggtgaagaacgacgcccgccggacacgctccttctcgtggaccaagtcggtggagctggtgctgggcgagagcagggtcagcctgcagcagcacctcaccgtgcgctggaacggctcgcgcatcgcgctcccctgccgcgcgccacacttccacatcgacctggatggctacctcttgaaagtgaccaccaaagcaggtttggaaatatcttgggatggagacagttttgtagaagtcatggctgcgccgcatctcaagggcaagctctgtggtctttgtggcaactacaatggacataaacgtgatgacttaattggtggagatggaaacttcaagtttgatgtggatgactttgctgaatcttggagggtggagtccaatgagttctgcaacagacctcagagaaagccagtgcctgaactgtgtcaagggacagtcaaggtaaagctccgggcccatcgagaatgccaaaagctcaaatcctgggagtttcagacctgccactcgactgtggactacgccactttctaccggtcctgtgtgacagacatgtgtgaatgtccagtccataaaaactgttattgcgagtcatttttggcatatacccgggcctgccagagagagggcatcaaagtccactgggagcctcagcagaattgtgcagccacccagtgtaagcatggtgctgtgtacgatacctgtggtccgggatgtatcaagacgtgtgacaactggaatgaaattggtccatgcaacaagccgtgcgttgctgggtgccactgtccagcaaacttggtccttcacaagggaaggtgcatcaagccagtcctttgtccccagcggtgacctttgtttcgatccttaagactctgaaatctggtgactttgacactgaagcggaagagccaatgaaggactgcagtatttgtgtgcccgattctgtaaacacacacacacagagtatatatgtgtatatatatatagatatattcaaaaacattgcatcatttatatgaactatagggggattattatatgtatattttttgctataagacatgtattgtttctaggatcctaacctgtaagccattgaacatgttgtataaatacaccaggtgtttttaatttaataaggtggcatgcagatacattggatagtgttaacatcacatacatttgtcatttttaaggaagttttctaagagccctcaattgcctgcctgtattaattttagttttgagtcaggatttgtaatggagtgggaaatgtgtttctctggagaagggcacatttatctaggggcatttcaggtttccaaagaaaggaatgtatgcctgggaaagacagcaggagattggtgaccggccctaatggtgcatgaaaagcgagtgataggctgttagaatgtattaggtcatgggctaacattatttccaaaattgattggctggttgccaagaaatatatatttgtcactagggcataaccgaagaatcaagtgatttcttgccatccttgcgtagtcctcaagtcttctaatcatctatgtgtgtatgatggatgtgaccatttatatgtcatgtgttgaaattaaagggtgtctggatgccatgttaattttattgagcatgagaaagtatttgaagaaactgttgcacaacatatgatgaaattttgatttctctgaatctcagagtaatttaagatgggcaaatccaatgagttgatgtaacccatctacattttgtggctatttcatgtataaaatgaaaggctttagttatttctagaggagtcccatccaacactatttggcgactgttaatatgttataattattagacagtggaaaagcctttattgactaattgatttaacctcagtccaaagaacagtctctatacttgccctcatttactgataggctgctactagttaccatttgattgtcttgactttcgtcttcagttgaattggtgaaaacatcaacaaaaacaaaacccactgtgtcttaaaataaaatgttctgcattgtagtcaataaagggcttaagatgtaaaacaatgca

SEQ ID NO: 2416 - DNA, 918 bp, Homo sapiens; identical to SEQ ID NO: 52

SEQ ID NO: 2417 - DNA, 3677 bp, Homo sapiens; identical to SEQ ID NO: 576

SEQ ID NO: 2418 - DNA, 11998 bp, Homo sapiens; identical to SEQ ID NO: 131

SEQ ID NO: 2419 - DNA, 8169 bp, Homo sapiens; identical to SEQ ID NO: 210

SEQ ID NO: 2420 - DNA, 3310 bp, Homo sapiens
agagccactccatctgagggtggctgcgtgtccacatacgaggggacagggctgaggatgaggagaaccctggggacccagaagaccgtgccttgcctggaagtcctgcctgtaggcctgaaggacttgccctaacagagcctcaacaactacctggtgattcctacttcagccccttggtgtgagcagcttctcaacatgaactacagcctccacttggccttcgtgtgtctgagtctcttcactgagaggatgtgcatccaggggagtcagttcaacgtcgaggtcggcagaagtgacaagctttccctgcctggctttgagaacctcacagcaggatataacaaatttctcaggcccaattttggtggagaacccgtacagatagcgctgactctggacattgcaagtatctctagcatttcagagagtaacatggactacacagccaccatatacctccgacagcgctggatggaccagcggctggtgtttgaaggcaacaagagcttcactctggatgcccgcctcgtggagttcctctgggtgccagatacttacattgtggagtccaagaagtccttcctccatgaagtcactgtgggaaacaggctcatccgcctcttctccaatggcacggtcctgtatgccctcagaatcacgacaactgttgcatgtaacatggatctgtctaaataccccatggacacacagacatgcaagttgcagctggaaagctggggctatgatggaaatgatgtggagttcacctggctgagagggaacgactctgtgcgtggactggaacacctgcggcttgctcagtacaccatagagcggtatttcaccttagtcaccagatcgcagcaggagacaggaaattacactagattggtcttacagtttgagcttcggaggaatgttctgtatttcattttggaaacctacgttccttccactttcctggtggtgttgtcctgggtttcattttggatctctctcgattcagtccctgcaagaacctgcattggagtgacgaccgtgttatcaatgaccacactgatgatcgggtcccgcacttctcttcccaacaccaactgcttcatcaaggccatcgatgtgtacctggggatctgctttagctttgtgtttggggccttgctagaatatgcagttgctcactacagttccttacagcagatggcagccaaagatagggggacaacaaaggaagtagaagaagtcagtattactaatatcatcaacagctccatctccagctttaaacggaagatcagctttgccagcattgaaatttccagcgacaacgttgactacagtgacttgacaatgaaaaccagcgacaagttcaagtttgtcttccgagaaaagatgggcaggattgttgattatttcacaattcaaaaccccagtaatgttgatcactattccaaactactgtttcctttgatttttatgctagccaatgtattttactgggcatactacatgtatttttgagtcaatgttaaatttcttgcatgccataggtcttcaacaggacaagataatgatgtaaatggtattttaggccaagtgtgcacccacatccaatggtgctacaagtgactgaaataatatttgagtctttctgctcaaagaatgaagctccaaccattgttctaagctgtgtagaagtcctagcattataggatcttgtaatagaaacatcagtccattcctctttcatcttaatcaaggacattcccatggagcccaagattacaaatgtactcagggctgtttattcggtggctccctggtttgcatttacctcatataaagaatgggaaggagaccattgggtaaccctcaagtgtcagaagttgtttctaaagtaactatacatgttttttactaaatctctgcagtgcttataaaatacattgttgcctatttagggagtaacattttctagtttttgtttctggttaaaatgaaatatgggcttatgtcaattcattggaagtcaatgcactaactcaataccaagatgagtttttaaataatgaatattatttaataccacaacagaattatccccaatttccaataagtcctatcattgaaaattcaaatataagtgaagaaaaaattagtagatcaacaatctaaacaaatccctcggttctaagatacaatggattccccatactggaaggactctgaggctttattcccccactatgcatatcttatcattttattattatacacacatccatcctaaactatactaaagcccttttcccatgcatggatggaaatggaagatttttttttaacttgttctagaagtcttaatatgggctgttgccatgaaggcttgcagaattgagtccattttctagctgcctttattcacatagtgatggggtactaaaagtactgggttgactcagagagtcgctgtcattctgtcattgctgctactctaacactgagcaacactctcccagtggcagatcccctgtatcattccaagaggagcattcatccctttgctctaatgatcaggaatgatgcttattagaaaacaaactgcttgacccaggaacaagtggcttagcttaagtaaacttggctttgctcagatccctgatccttccagctggtctgctatgagtggcttatcccgcatgagcaggagcgtgctggccctgagtactgaactttctgagtaacaatgagatacgttacagaacctatgttcaggttgcgggtgagctgccctctccaaatccagccagagatgcacattcctcggccagtctcagccaacagtaccaaaagtgatttttgagtgtgccagggtaaaggcttccagttcagcctcagttattttagacaatctcgccatctttaatttcttagcttcctgttctaataaatgcacggctttacctttcctgtcagaaataaaccaaggctctaaaagatgatttcccttctgtaactccctagagccacaggttctcattccttttcccattatacttctcacaattcagtttctatgagtttgatcacctgatttttttaacaaaatatttctaacgggaatgggtgggagtgctggtgaaaagaggtgaaatgtggttgtatgagccaatcatatttgtgattttttaaaaaaagtttaaaaggaaatatctgttctgaaaccccacttaagcattgtttttatataaaaacaatgataaagatgtgaaactgtgaaataaatataccatattagctacccaccaaa

SEQ ID NO: 2421 - DNA, 2195 bp, Homo sapiens; identical to SEQ ID NO: 1463

SEQ ID NO: 2422 - DNA, 3077 bp, Homo sapiens
attagttatgagcttatcacaggaaaggtcagtttcctggcatcacatttcaaaaccacatcattaggcgatgacctagacaagctgctggaaaaaatgcaacaaagaagaggagacagtgtggttacccctttcgatggagaccttaatgaatgtgtgtcaccccaggaggctgctgctatgattcccacacaaaacctggatttagataatgaaaccttccacatttatcaaccgcagctaacagttgccagaaaactcttatcccaggtgtgtgctatagcggacagtggcagccagagcctggacctcggtcacttcagcaaagtagacttcatcatcattgttcccagatcggaggtgttggttcagcaaactcttcagcggattcgacaatcaggtgtccttgtagacttgggtctggaggaaaatgggacagcccatcagagagcagaaaaatatgttgttcgtctagacaatgagattcaaaccaagtttgaagtttttatgaggagagtgaaacagaacccgtacacactgtttgtgctagttcatgacaactcccatgtggaactaacgagtgtcatttcaggctctttgtcacatagcgaacccagtcatgggctagctgatagagtcattaattgcagagaagttctggaagctttcaacctcctggtgctccaggtcagctccttcccatacactctgcagacccaacagtcccgcattagctctagcaatgaggttcactggatacagctggatactggggaggacgtgggctgcgaggagaagctgtactttggcttgagtgagtacagcaagtctctgcagtgggggatcacgagcccacttctgagatgtgacgagacttttgaaaaaatggtgaacacactcttggagaggtaccccaggctgcacagcatggtcgtccgctgctatcttctcatccagcagtactctgaggccctgatggctctcaccaccatggcgtcactccgcgaccacagcacaccagaaacactcagcattatggatgacctcatcagctccccaggcaaaaacaaaagcgggaggggacacatgctcattatcagggtgccctcggtgcagctggcgatgttagccaaggagcggctacaggaggtgcgcgacaaactgggtctgcagtatcggtttgagatcatccttgggaacccggccaccgaactcagtgttgcaactcactttgtggcgcgattaaagagttggagaggaaatgaaccagaagagtggatccctcggacataccaagatttagacggtctaccttgtattgtgatattaactggcaaagatcctcttggagaaacctttcccaggtctttgaagtactgtgacctccggttaattgactcaagctatttaactcgcacggccttggagcaggaggtgggtctggcatgctgctatgtctcaaaagaggtcatccggggacccactgttgccctggaccccagcgggaaggagcaggagagagctgctgtcagtgagaatgactccgatgagctgctcatcgacctggagcggccccagagcaacagcagcgctgtcacagggacctcgggttccatcatggagaatggagtgagctcttccagcacagctgacaagtcccagaagcagtccctgacccccagctttcagagcccagccaccagcttggggctggatgaaggggtctccgccagctcagctggagccggagccggggagactctgaagcaggagtgtgactccctgggcccccagatggcgagcagcaccacctccaagccgtcatcatcatcctcaggacccaggaccctcccatggccgggacagcccatcagaggctgccggggcccacaggcagccctgccaccagtggtgatcctatccaaagcggcctacagtctcctgggctcccagaagagtggcaagctgccatcctcctcctccctgctgccccacgccgacgtggcctgggtgagctccctgcggccactcctgaacaaggacatgagcagtgaggagcagtccctctactacaggcagtggaccttggcccggcagcaccacgctgactatagcaaccagctggacccggcctctggcacccgaaacttccacccccgacggctcctgctgacagggcccccacaggtgggaaagacgggctcctatttacagttcctcaggatcctcttccgcatgctcatcaggctcctggaggtggacgtgtatgatgaggaggagatcaacaccgatcacaatgaaagcagtgaagtgagccagtcagagggagagccctggcctgacatcgagagcttcagtaaaatgccttttgatgtcagtgtgcatgaccccaagtacagtttgatgagcctggtgtatactgagaagctggcaggggtcaaacaagaagtgataaaggaatccaaagttgaagagcccaggaaacgggaaactgtatccataatgctgaccaaatatgcagcctataacacctttcaccactgtgaacagtgccgccagtacatggacttcacctctgcctcccagatgtctgactccacccttcatgccttcacattctcttcttctatgctgggagaagaggttcagctctatttcatcattcccaaatccaaagagagtcattttgtcttcagcaagcagggcaagcacctggagagcatgcggctgcccctggtttcagacaagaatttgaatgcagtcaagagccctattttcactccttccagtggtcgacatgagcacggactcctaaaccttttccacgccatggagggcatcagccaccttcacctcctggtggtcaaagagtatgagatgcctctgtaccgcaagtactggcccaaccacatcatgctggtgcttcccggcatgttcaataatgcaggcgtgggtaaggggcccccctgggatggggagaagggcttcgaagataaactgagctccattcccctggcatgaaactttcagattcccctgcctctagaaattgtcctgccctcctcaccactcttcgg

SEQ ID NO: 2423 - DNA, 3038 bp, Homo sapiens
tcaatcagaaagcccttttcattgcaggagaagaggacaaagatactcagagagaaaaagtaaaagaccgaagaaggaggctggagagaccaggatccttccagctgaacaaagtcagccacaaagcagactagccagccggctacaattggagtcagagtcccaaagacatgggcttgttagagtgctgtgcaagatgtctggtaggggccccctttgcttccctggtggccactggattgtgtttctttggggtggcactgttctgtggctgtggacatgaagccctcactggcacagaaaagctaattgagacctatttctccaaaaactaccaagactatgagtatctcatcaatgtgatccatgccttccagtatgtcatctatggaactgcctctttcttcttcctttatggggccctcctgctggctgagggcttctacaccaccggcgcagtcaggcagatctttggcgactacaagaccaccatctgcggcaagggcctgagcgcaacggtaacagggggccagaaggggaggggttccagaggccaacatcaagctcattctttggagcgggtgtgtcattgtttgggaaaatggctaggacatcccgacaagtttgtgggcatcacctatgccctgaccgttgtgtggctcctggtgtttgcctgctctgctgtgcctgtgtacatttacttcaacacctggaccacctgccagtctattgccttccccagcaagacctctgccagtataggcagtctctgtgctgatgccagaatgtatggtgttctcccatggaatgctttccctggcaaggtttgtggctccaaccttctgtccatctgcaaaacagctgagttccaaatgaccttccacctgtttattgctgcatttgtgggggctgcagctacactggtttccctgctcaccttcatgattgctgccacttacaactttgccgtccttaaactcatgggccgaggcaccaagttctgatcccccgtagaaatccccctttctctaatagcgaggctctaaccacacagcctacaatgctgcgtctcccatcttaactctttgcctttgccaccaactggccctcttcttacttgatgagtgtaacaagaaaggagagtcttgcagtgattaaggtctctctttggactctcccctcttatgtacctcttttagtcattttgcttcatagctggttcctgctagaaatgggaaatgcctaagaagatgacttcccaactgcaagtcacaaaggaatggaggctctaattgaattttcaagcatctcctgaggatcagaaagtaatttcttctcaaagggtacttccactgatggaaacaaagtggaaggaaagatgctcaggtacagagaaggaatgtctttggtcctcttgccatctataggggccaaatatattctctttggtgtacaaaatggaattcattctggtctctctattaccactgaagatagaagaaaaaagaatgtcagaaaaacaataagagcgtttgcccaaatctgcctattgcagctgggagaagggggtcaaagcaaggatctttcacccacagaaagagagcactgaccccgatggcgatggactactgaagccctaactcagccaaccttacttacagcataagggagcgtagaatctgtgtagacgaagggggcatctggccttacacctcgttagggaagagaaacagggtgttgtcagcatcttctcactcccttctccttgataacagctaccatgacaaccctgtggtttccaaggagctgagaatagaaggaaactagcttacatgagaacagactggcctgaggagcagcagttgctggtggctaatggtgtaacctgagatggccctctggtagacacaggatagataactctttggatagcatgtctttttttctgttaattagttgtgtactctggcctctgtcatatcttcacaatggtgctcatttcatgggggtattatccattcagtcatcgtaggtgatttgaaggtcttgatttgttttagaatgatgcacatttcatgtattccagtttgtttattacttatttggggttgcatcagaaatgtctggagaataattctttgattatgactgttttttaaactaggaaaattggacattaagcatcacaaatgatattaaaaattggctagttgaatctattgggattttctacaagtattctgcctttgcagaaacagatttggtgaatttgaatctcaatttgagtaatctgatcgttctttctagctaatggaaaatgattttacttagcaatgttatcttggtgtgttaagagttaggtttaacataaaggttattttctcctgatatagatcacataacagaatgcaccagtcatcagctattcagttggtaagcttccaggaaaaaggacaggcagaaagagtttgagacctgaatagctcccagatttcagtcttttcctgtttttgttaactttgggttaaaaaaaaaaaaagtctgattggttttaattgaaggaaagatttgtactacagttcttttgttgtaaagagttgtgttgttcttttcccccaaagtggtttcagcaatatttaaggagatgtaagagctttacaaaaagacacttgatacttgttttcaaaccagtatacaagataagcttccaggctgcatagaaggaggagagggaaaatgttttgtaagaaaccaatcaagataaaggacagtgaagtaatccgtaccttgtgttttgttttgatttaataacataacaaataaccaacccttccctgaaaacctcacatgcatacatacacatatatacacacacaaagagagttaatcaactgaaagtgtttccttcatttctgatatagaattgcaattttaacacacataaaggataaacttttagaaacttatcttacaaagtgtattttataaaattaaagaaaataaaattaagaatgttctcaatcaaaaaaaaaaaaaaa

SEQ ID NO: 2424 - DNA, 7930 bp, Homo sapiens
gcctgtccaagctacagaacgcagaggctaaaatgggtgccagtgatgtcccgtgccttccagatatgaacaaaaggggaccatgagttggatcttctctcagggataaacttgcaccagccatgcttaagtgagctggtgcttaatcacttttccttcatggacagaggatctagactcattcttctgtgcttgtttgtgttattctttgacagcctgaaggtattgaaaaggaaaggacccagagtttccttatctgtacagaaggtgccaaagcctccaagcagggagttttggacttgccaaacgatgtagtagaagggtcagccagaggctttttcactgttgtgggggatattctaggacttgccttgcagaatctggttgttctccaaatgccctatggaagtggagagcagaatgctgccctactagcatctgatacttatgttctggactatctgaaatctactgagcaactgacagaggaagttcaatctaaggctttctttctcttatctaatggttatcaaaggcaattatctttcaaaaactctgatggttcctatagtgtgttttggcagcagagtcagaaaggaagcatatgactcagtgctcttacttttaagacattggagagaatgaaaaaatatgtattcattgatgaaaatgttcaaaaacagaccttaatctggctttcaagccaacagaaaacaagcggctgctttaagaatgatggccagcttttcaaccacgcctgggaggtgagagaggagaagcaccaggctttccttgttcctgggcattgcctgccttgccctgcctctggctttcctgatctggaatatgaatattcttcctgtgcatatgaaaccttctgaggcactacagtcctgggcctgtggtgggttggtcagcagcaccattcctgctttgtgcatgtttaactacagcctggatgtgacttcttctgagtctcttgtctgccttattcagtctctagtccttcccgagtcagtcctcttcagaaattaaactagaaatagaagggaggggagagaaagggaacctagaaaagaaactttcataaatttggagacagtcaatgtataaagggagggggctgtgagtgtatgaggaaggaaagtttattcctgtccatgaatggcaagaaagttctggggagaatatctagtaattcatattgtttcaatgaagcaagtttttctaagaccctctcaaggaaaaattcaaaggccaagcttgccccggggccaaagtacaaatgaggtgaagtatatccttggcaaaatccaacccttttcctgtccatatttacgtaaatccctcccttccaacttcctttctttgcagatacctgtccatctccagcccattttctatctcctttcccctcctttttttccctgtggttgctcaaaatctcctatcatggcattttagcatgctctgatggcccctgaaataccctgagcttttcttcagcatccttcctcataatcatcactcctgttcttgaaacccagaatgcatatctaatccacacactctgatatttaatttgcatgcaaattgtattcaaattgctttgtggtatttttaatgtattccaaacttattccttacaacaggaggaccctgatggagatgagctcttactccttcatagaaaaatcaaaaactttcccacgttctcttctaaaacatcttcacatctttcttcttattggattcattactggtgaatcattgctgattactgctacagtttgtctgatcttacctagtattttctctataattaaatatctgtgtgggtgggtgtctgtgtgtgttttgagttgagagaaataaaaatgcaagggaaaaatcaaagcttacactgcagaggaatggtgatcctacttgctgtaatttagatgtactgacagtccccgtacctcatgttagtgtctaccatatgctgttatttccatcttaaacacttggtttctcagaagtatttcttttctgaagaagacaggagttgtcctttgcttaaatagataaaatgggaagcttctacaagatcagtagatcccagatgccattctgaatgctatttgcatcagagtcactagagcacccattaaaatgcatttcgctgtcgtattcccaagttttttgaaccagaatctctgtgtagacactggttgatttaaataccccaggggacttttatgcacagtcagtttgcaaaccacatgatttataaatgagtttctcattttacactgtaagaatctgagacttgattctggtgatctcctagggtgcttttccaggaatttccaggaatcttcacggcaactttctgcttcacctcattagaaattctttgttggcttttttcagatttataccaagcggagacaaatagagtcctgtgaattccttagaatgcatgcttaacaccaggccacataaatacgattgaaattaattgttataacaacttaataattatgatttaattattgcatagagtctgaatgaattcttgcttagatagtatgattattaaccatctaatttaaaaactacacatgttcgggtgtttttatgaataatggtatttgttccagtatttttttcatacctagttttacttcaaaagaatacttgctattttgtgctctgctgtcccgaatgactcattgttcctttgttttcagggtggagatgaagaggacatttcactcactgcgtatgttgttgggatgttctttgaagctgggctcaatttcactgtatggattcccgtcatttctgatttcaggcagctgaatgcacattcaatagactgtagagtcagagtcacttgagattctaagactggatgaaaccccgagataacatttagtttattaccaccctttaaattcatgctgttcaaactgtttttcattcatagacagctttgaaaaacaggattgggtttctccctagggagaatacacatatgcacacaaaaaagagttattcacacaattgcaggcattcacatctctcctgaagttcagccatgaatttcagattaagaaccactgttctaagtaaagccgtggcctagtattctgtttctctctaaacaataagtgagtaaacattttcaacttaagtgtggctcaccctagccacctcccaatccatagattagatttccaaaatctattcctgaactaagatgctaggaattgtcagggtcattagtataccctgaaaattatcttcacaaatgtaagcctctattttaggcattagaaaaaaaaaaaaactcttaggcctatgataaatttggatgctttgccgcatagaagacattcataactaaaatatcactgatcaaatataaaaactgccattttcttactaaatttcattgggcctggcatggtggttcatgtttataatccaagcactttgggaggctgaggtgggtggattacctgaggtcaggagttcaagaccagcctggccaacatggtgaaaccctatctctactaaagatacaaaaattagctgggcttggtggtgcatgcctgtgatcccagctactcagaagatggaggcaggagaatcgcttgaacctgggaggtggaggttgcagtgagctgagatcatgccactgcactccagcctgggtaacagagcaagaccctatctcaaaaaaaaattattgcttaggtactaataatgacattataaatttattttaatgatatttttgaaggataaaatatatgtgtatatataaatggatttgtatgtaaaatatactttgaggatatattatatatattataaacaatgattagtttaaatgttcaacaagttcatggaatgttcgggtatcagtttacaatatatgattcttcttcctgaccaacagtttcctgctctacgaaacgcactcttttgccttgaagcggcattggacagtggtgtcactaatggctataatcatgcaattctagcttatgcttttgccttagctggaaaagagaagcaagtggaatctttactccaaaccctggatcaatctgccccaaaactaaataatgtcatctactgggaaagagaaaggaaacccaagacagaagaatttccatcctttattccctgggcaccttctgctcagactgagaagagttgctacgtgctgttggctgtcatttcccggaaaattcctgacctcacctatgctagtaagattgtgcagtggcttgcccaacggatgaattcccatggaggcttttcttccaaccaggctccggtagattgcaaacgacctgctttctttgtgatcccggctgcattcggacccctgtcagacagtaaatcccaagtaaggtacctgccatcggcagatctgagctttcttctcggacacctaatacccacagtcctccacttgggtcctaagggtcttaggatccgcgatgggggtaataaccagcgggggaagaggggctggctctcagtccccgcctcgcggggggtgcctcccccctctgcgatgggggttccaagagccagggggggaagaggggctggctctcagtcactgcctcgtgggggatgcctcccccccctgcgatgggggtcctaagagccaggggggtaagagggactggctctcagtccccgcctcgcgggggggtgcctcatccccctgcgatgggggtcctaagagccaggaggggaagagggggagaggatgatactaatttcagcatcgccggctgtgttcacccagcctgtgaaattattaatatcctgaaagggagagaatgatattactccccataatagacagatacgactccgcataatagagcacgaggtgtacacccaccctgtgatattcttcctcatattcagaagccaagaagttgatattactcgtaatatcgcaggacgtatacaccctcgtgttagatggtccttaataatattccagggcggagtgggtgatgtgactacatatatggcagaaagtggaaacccccctgagatattgttcccacggtcctggagggaagaaaatgatattactttcaatatgacagaaggtggacacgcccccactgatattgtttctaattgcaacgtgggagaggaggatatgacacgcgatatcgcagggagtagaaacacccctgtgatactgttcttaatattcagggaggaagaggatgatattactcccaatacagatgggtgtacgccctctgtacactgagggtgtacacccgtctgtgaaacagttcataatctccagaggtctccagagggggagatgatattactcacaatatggtaaacaggctgtgagtccaccgtggatcctaagagccagcgggggaagaggggctggctctcagtcaccacagcatggggggcctttatgttcaggttttgcccaagagtcagcttatttgcttctagtactagcagggtagatgctgccaaggccctcaaacaggggggccatcccttagaaaccctgtctagttgtttagagacgtaggccaccggcctcagccaggtccccacagtttgggttaaaagtccagctgccatcttttctccctctgacacatacaatgggaaaggctttgtcagttcgggtagccccagggctggggctgccagaagtttttcctttaactcatgaaagccttgctgttgttggcatcccctttccaaagcttcccggtccctgccccttttgtgacctcatacaaaggcttggctaatactgcaaagtttggaatccacagtctccaaaaccccacagctcctaagaattctgtcacctgccttctgcccttaggctcccgtagattgcaaaggacatgctttctttgtgatcccgggctgcattcggacccctgtcggatagtgaattccaaataatgtacctaccgtcggcagatctgagctttcttcttggacacctaatacccacagtcctccagtgaaggatccagtgagattttccaggttaacggtcataaccgcctactggtccaacgttcagaagtaacacaggcacctggacaatacacagtagatgtggaaggacacggttgtacatttatccaggccacccttaagtacaatgttctcctacctaagaaggcatctggattttctctttccttggaaatagtaaagaactactcttcgactgcttttgacctcacagtgaccctcaaatacactggaattcgcaataaatccagtatggtggttatagatgtaaaaatgctatcaggatttactccaaccatgtcatccattgaagagcttgaaaacaagggccaagtgatgaagactgaagtcaagaatgaccatgttcttttctacttggaaaatggttttggtcgagcagacaatttccctttttctgttgagcagagcaaccttgtgttcaacattcagccagccccagccatggtctacgattattacgaaaaaggtaggcaagcaacagccatgccctaaggttattgaatgtggtatttatatctaacattccctgagctactaaactttccaaaatcaacctccgtcttcacagagtaaacaatagatggcattactttgtatactggtttctttatcccatgatgtgtcttctgactgaacccattttccagttaccagagtttttcaacaccagaatccttgcaatataacctgacagggctccacttgaacttgaaatacaggccacactaagcttccaggtctttttgttattgtcattgttgttcatgctaagactgactgttccaagctactgctgtggactttgacttaaaaagaggagtggggaatattctgaaatgctaactaacttaaaaatttgatagattaatttctaaaacatatacaaagatgttgtagagaccacacaactgttccctggaaggttggtactatttatttcttgttgaatgctgtgtgaagtttgtggagtgttcgaattctgtctctatcaatcatttactaatagaatatatttcatcaagtgtcttaaatattattagcatatttctggatgtataaaatgggaaagtaattgtctctatttcaaaattattggaaggattagatctaatgtgcttatatcatctatttaataaaaatacatgttccctttattttttcagaagaatatgccctagctttttacaacatcgacagtagttcagtttcccagtgagacaaagcaattactggaagaggtgaagaaattttattacgtcataaaccattgaaaacacatctagtaagaaaatgaaaacctgaataagataggacagtagttgaagaaagaaaagtgtctggtacttcattagacttgtgtagctgtgtactgcatgagtaatctgataatcattaagattatattaatttctttaaaaatagctttaaagaattcacagctatatatgtaccttttataaatctctcatttttgttttgtaagttgacaggtcagtaaaaatttaggcatatatatttgtacatatgtgtgtgtatgtacatgtctatgtgcctatatatgcatgattttatatctaaatatctatttatatatacatacaaacgtgtttattgtttaaacgatgttttaaatcccaggtggaaaagcatttcttgtaacaaaccgattcttctgtatcaaacctggaaaaaaatcatgaaccatctgacctcgtgaacagtttgcagtgggctatggtttcttgtcaagtcttatttccttatcatcccattaaatgttgtcattttgaaaaaaaaaaaaaaaaaaaaaaaaaaaaaaaaaaaaaaaaaaaaaaaaaaaaaaaaaaaa

SEQ ID NO: 2425 - DNA, 4678 bp, Homo sapiens
ttaggctgtaattaggggatttgggaggagaactttcctggtgacgctttgcttttcttctgctcttggtgagaaagtgcctccttcttcccaggatcaggacctctgccatccagcgccacaaagagacattctgcacacacactcacacacgcacacacacacacactctcacactcgcccagagacaaacttaaggtgaggagaaagagcgctagcttcacttgatctccagcttccaacttaagcagaacttgagagcatccgaactcctggatttcaggacaagtgaagaagattctttgggctataaagatgaagagtctacttcttctggtgctgatttcaatctgctgggctgatcatctttcagacaactatactctggatcatgacagagctattcacatccaagcagaaaatggcccccatctacttgtggaagcagagcaagccaaggtgttttcacacagaggtggcaatgttacactgccatgtaaattttatcgagaccctacagcatttggctcaggaatccataaaatccgaattaagtggaccaagctaacttcggattacctcaaggaagtggatgtttttgtttccatgggataccacaaaaaaacctatggaggctaccagggtagagtgtttctgaagggaggcagtgatagtgatgcttctctggtcatcacagacctcactctggaagattatgggagatataagtgtgaggtgattgaaggattagaagatgatactgttgtggtagcactggacttacaaggtgtggtattcccttactttccacgactggggcgctacaatctcaattttcacgaggcgcagcaggcgtgtctggaccaggatgctgtgatcgcctccttcgaccagctgtacgacgcctggcggggcgggctggactggtgcaatgccggctggctcagtgatggctctgtgcaatatcccatcacaaagcccagagagccctgtggggggcagaacacagtgcccggagtcaggaactacggattttgggataaagataaaagcagatatgatgttttctgttttacatccaatttcaatggccgtttttactatctgatccaccccaccaaactgacctatgatgaagcggtgcaagcttgtctcaatgatggtgctcagattgcaaaagtgggccagatatttgctgcctggaaaattctcggatatgaccgctgtgatgcgggctggttggcggatggcagcgtccgctaccccatctctaggccaagaaggcgctgcagtcctactgaggctgcagtgcgcttcgtgggtttcccagataaaaagcataagctgtatggtgtctactgcttcagagcatacaactgaatgtgcccttagagcgcatcagttttaaagtcattaagaacatgtgaaaggtgttttttttttccaatatgaactcatgcaagttaccaaaactgtgataacccttttttacttactgtaaagagtcattttcataaagatcaattcattgatttgttttttgtaaagctatcattcaatatatattataaattaatataaatttaagggaagctctatgtaaggagacttagagccaaactgtttaagctgtatcatcccaacaaagtatcctttcatgaacggggcatgcaatagcttaagaattgctaggattaaattaaggaaagtaaagctactcagagcagcaggttccacaagcacaaactttacacatttgtacaattttgaaatgcactacaataaacaaattagagcaacacatttgaaatacaggcttctttacataaactgagaggttatacaaaactcagtttcacaagggaacaatctatacctttctaaaagttaatatttcaagtctctaataggcagaatattttactctttaaaatcctgcctttctgaccaaaaaaaaaaaaaaaaattcatatggattccaatccatagtaacaagcacagttaaaactcctcaataatcccatttatatgaagcatgacacataaataagcagataatatttaaccaatgaaaaagacttctaccttcttataattaaaattacacatgtctaagaggaattgttttatcttttgagtagctttaccgagttgtatttaaattctaagggccatttgctaagcagcatttagcatctactcagggcagttatatagataaactgctggacagaaaaattgtaaaatttagcagcttgattttctgttagcctatgaaatgttattgtcctataaaaataactttaaactgatttaatatttcatatttacattatatgaaaatcaattacattataaaaggaatccctaatgcagaaacaaagatgcaactttcaaaattcttattattcctatttgtatatacacgagagaacccaaccagtgcctgtgtttggggggaaaagtcaacagtgtagttctaaaccttatcccaaacagaaaatgtggttaatgatgtcactttccttgctggtcatcattaggcttaaattaaatgctgaagctgtcatcaaagagtttacactaaaatcttcagggctttaaataaaaggttaagtccagcttccaaacacaattttccacattagcagctccaatcttcttaaataaagctctgttttcctatatttttatgactgctgagaccccacagggaccaatatttgtattcaaattacatttcatggtttcccattgtttcacaatgagttctaataaatgggatttactataataatccaagtatgacatagccggtatgctttcatgaatgtttttatgtagattttcctcccatgaacatgagtaaataaatctgtttcctgaatggattgtggttgcatttaaagctctgtaataattctaataaatttactctatagagttctgtgtgtggaaggtatagaacaattggaagtccatgaaaccataactataatcatatattattcagacaaaatattgtaataaaagtaggtcctttctttcatcaaaaacatatctgaaaattttcagatgctttaatattaaaagatgacaatgttatgtatgcacatttttaagttaggttggatatgcaaactgtacaaaactataaatccaaagagtttgtaaagtttaaactcaaacactggtggtataaatagaacttgcacttctaaattaaggaagatacctaaatggtctaggatgagatgatatattatttaaagaggggactatctcccaaataacaactttaacacctcaaatatgggggctagctcattgaaagaagtccatacttgaactattattatgtatgttccgataattttgttgaaaatacaagtgggaacaaatttctattgaagcaaacatctaattttcagttatgtccagaactctactttataatgttaaatgtagtagtatttcttaacttttaaatacttactactataggaattggtgctgatcaaaatctctggagtgactgttagctgattaaaatctataccacttacacatcatttttccattcgtgtaaaaaacaaaaaatcttaacacagtgaatactgctgagcagaattttttcttctcattttgctcaaaggaccagaatttccatgccctttatactcatacttgaatgagtctttttaatgttctcattttgctgtttttccaccaaatgtctattttcctacttcattccccaagatgtctcactgagcaggtctgaaaaagaaaggttattctaatacaattcctaacagaaagttggtacaacactggctaattcagaaatcgctcctcagacttagattccaagagtatcaaagagattagatgggaggctgggccaggaacccttgttttaatgtatttgtccataattaacactggtgaccatataaggaacaaagtatatctgcacatttcactgagacatctacattggaaaacccaaacaaaaagaagcaattcaaataaaaagacaacataagaacgaaaataagttggtcacattaacactggaagccatctttaagtgagtgctgtcatattgtgtcacagtaatttttagccaaatatggcgtttgtaaatttaaactttctctcatggaaagggggctggtacctgtcaaagtgttattttatgcaacaatatagtcactttttattttggcaattagaagtagactcaaaggagattacaatttggttgctggcagccattctgggtttcttgattttagtactccaaagaatatggtggtctcatggagtagctgaccactaaggaggggaggattaaaagggaatcacttatcagtttttagcataggatgcattaagaaatatcaacggataactgacatcgttttgttaagaagttaactgtatcgtagctcactactgccagagcggcaatggatgtacaacgaaagagatgaaaaatacaaaagttattaagccacctgattaaaagaaaaccaatatttaaaggcatttaatagatatcaagtataactttgaggagaagaatcaatctgtattaccaaaaaaaaaatgttttgattttctgtaagatacaatgaactggtacattaaaagtcaattttgtgttactgca

SEQ ID NO: 2426 - DNA, 6644 bp, Homo sapiens
attggagtgtggagcaagcggccggtctgcagtcggagacttgcaggcagcaaacacggtgcgagcgaacaggagtgggggggaaattaaaaaaagctaaacgtggagcagccgatcggggaccgagaaggggaatcgatgcaaggagcacaataaaacaaaagctacttcggaacaaacagcatttaaaaatccacgactcaagataactgaaacctaaaataaaacctgctcatgcaccatggtttttcaaactcggtacccttcatggattattttatgctacatctggctgctccgctttgcacacacaggggaggcgcaggctgcgaaggaagtactactgctggattctaaagcacaacaaacagagttggagtggatttcctctccacccaatgggtgggaagaaattagtggtttggatgagaactataccccgatacgaacataccaggtgtgccaagtcatggagcccaaccaaaacaactggctgcggactaactggatttccaaaggcaatgcacaaaggatttttgtagaattgaaattcaccctgagggattgtaacagtcttcctggagtactgggaacttgcaaggaaacatttaatttgtactattatgaaacagactatgacactggcaggaatataagagaaaacctctatgtaaaaatagacaccattgctgcagatgaaagttttacccaaggtgaccttggtgaaagaaagatgaagcttaacactgaggtgagagagattggacctttgtccaaaaagggattctatcttgcctttcaggatgtaggggcttgcatagctttggtttctgtcaaagtgtactacaagaagtgctggtccattattgagaacttagctatctttccagatacagtgactggttcagaattttcctctttagtcgaggttcgagggacatgtgtcagcagtgcagaggaagaagcggaaaacgcccccaggatgcactgcagtgcagaaggagaatggttagtgcccattggaaaatgtatctgcaaagcaggctaccagcaaaaaggagacacttgtgaaccctgtggccgtgggttctacaagtcttcctctcaagatcttcagtgctctcgttgtccaactcacagtttttctgataaagaaggctcctccagatgtgaatgtgaagatgggtattacagggctccatctgacccaccatacgttgcgtgcacaaggcctccatctgcaccacagaacctcattttcaacatcaaccaaaccacagtaagtttggaatggagtcctcctgcagacaatgggggaagaaacgatgtgacctacagaatattgtgtaagcggtgcagttgggagcagggcgaatgtgttccctgtgggagtaacattggatacatgccccagcagactggattagaggataactatgtcactgtcatggacctgctagcccacgctaattatacttttgaagttgaagctgtaaatggagtttctgacttaagccgatcccagaggctctttgctgctgtcagtatcaccactggtcaagcagctccctcgcaagtgagtggagtaatgaaggagagagtactgcagcggagtgtcgagctttcctggcaggaaccagagcatcccaatggagtcatcacagaatatgaaatcaagtattacgagaaagatcaaagggaacggacctactcaacagtaaaaaccaagtctacttcagcctccattaataatctgaaaccaggaacagtgtatgttttccagattcgggcttttactgctgctggttatggaaattacagtcccagacttgatgttgctacactagaggaagctacaggtaaaatgtttgaagctacagctgtctccagtgaacagaatcctgttattatcattgctgtggttgctgtagctgggaccatcattttggtgttcatggtctttggcttcatcattgggagaaggcactgtggttatagcaaagctgaccaagaaggcgatgaagagctttactttcattttaaatttccaggcaccaaaacctacattgaccctgaaacctatgaggacccaaatagagctgtccatcaattcgccaaggagctagatgcctcctgtattaaaattgagcgtgtgattggtgcaggagaattcggtgaagtctgcagtggccgtttgaaacttccagggaaaagagatgttgcagtagccataaaaaccctgaaagttggttacacagaaaaacaaaggagagactttttgtgtgaagcaagcatcatggggcagtttgaccacccgaatgttgtccatttggaaggggttgttacaagagggaaaccagtcatgatagtaatagagttcatggaaaatggagccctagatgcatttctcaggaaacatgatgggcaatttacagtcattcagttagtaggaatgctgagaggaattgctgctggaatgagatatttggctgatatgggatatgttcacagggaccttgcagctcgcaatattcttgtcaacagcaatctcgtttgtaaagtgtcagattttggcctgtcccgagttatagaggatgatccagaagctgtctatacaactactggtggaaaaattccagtaaggtggacagcacccgaagccatccagtaccggaaattcacatcagccagtgatgtatggagctatggaatagtcatgtgggaagttatgtcttatggagaaagaccttattgggacatgtcaaatcaagatgttataaaagcaatagaagaaggttatcgtttaccagcacccatggactgcccagctggccttcaccagctaatgttggattgttggcaaaaggagcgtgctgaaaggccaaaatttgaacagatagttggaattctagacaaaatgattcgaaacccaaatagtctgaaaactcccctgggaacttgtagtaggccaataagccctcttctggatcaaaacactcctgatttcactaccttttgttcagttggagaatggctacaagctattaagatggaaagatataaagataatttcacggcagctggctacaattcccttgaatcagtagccaggatgactattgaggatgtgatgagtttagggatcacactggttggtcatcaaaagaaaatcatgagcagcattcagactatgagagcacaaatgctacatttacatggaactggcattcaagtgtgatatgcatttctcccttttaagggagattacagactgcaagagaacagtactggccttcagtatatgcatagaatgctgctagaagacaagtgatgtcctgggtccttccaacagtgaagagaagatttaagaagcacctatagacttgaactcctaagtgccaccagaatatataaaaagggaatttaggatccaccatcggtggccaggaaaatagcagtgacaataaacaaagtactacctgaaaaacatccaaacaccttgagctctctaacctcctttttgtcttatagactttttaaaatgtacataaagaatttaagaaagaatatatttgtcaaataaaatcatgatcttattgttaaaattaatgaaatattttccttaaatatgtgatttcagactattcctttttaaaatcatttgtgtttattcttcataaggactttgttttagaaagctgtttatagctttggacctttttagtgttaaatctgtaacattactacactgggtacctttgaaagaatctcaaatttcaaaagaaatagcatgattgaagatacatctctgttagaacattggtatcctttttgtgccattttattctgtttaatcagtgctgttttgatattgtttgctaattggcaggtagtcaagaaaatgcaagttgccaagagctctgatattttttaaaaagaatttttttgtaaagatcagacaacacactatcttttcaatgaaaaaagcaataatgatccatacatactataaggcacttttaacagattgtttatagagtgattttactagaaagaatttaataaactcgaagtttaggtttatgagtatataaacaaatgaggcacttcatctgaagaatgttggtgaaggcaagtctctgaaagcagaactatccagtgttatctaaaaattaatctgagcacatcaagattttttcattctcgtgacattaggaaatttaggataaatagttgacatatattttatatcctcttctgttgaatgcagtccaaacatgaaaggaaataattgttttatattataactctgaagcatgataaaggggcagttcacaattttcaccatttaaacacaaatttgctgcacagaatatcaccattgcagttcaaaacaaaacaaaacaaaaagtcttttgtttgtgaacactgatgcaagaaacttgttaaatgaaaggactctttaccctagaaggaagaggtgaaggatctggcttgtttttaaagctttatttattaaaccatattatttgattactgtgttagaatttcataagcaataattaaatgtgtctttatagatattgcaggaatgtatacatattgtgattaatgctttcaaaacttatgaaaatcatgaactaccccagaattgaactgttgtacttccaaagagaattgggctgtttataatgattttaatagagaaagatcccagggatcggtcataattggtcttgtttgataatgtgggcatccacaaacaaacaaacaaataacagaaacaaaatctgtaaatgttcctttgtaaaacttgtaaattttatttatactgtcttgttttgtacacacatttctctgtagtgggctctgaatacattgaaaatgcactatatttttctattttacttgcagagcatcacaaaagaacaggtattttcagtgctacataatgtgttttcccacatttaggaccaaagacggctatagaaaaactcaaatggattgcttcccaaacccctccccaccctttttttttggttttaaatcactgtacagtgttatttgatattttaatttattttttgattgactagaaaaatcattttaatttcactaaaatgttttttgtccctaaggaaaagtaatctgtaaaaataattttaattagcataatacagtcacctagacacttccatttgtaatctttgtaatagactgtaaatatatttttggaactataacacaatgtgcttgagggttatttttcagtgtctgcagtgtgtacaagtgtttatactaagtccagcactttacaattctaatcagtagcattggcctttgtgagaatgagtgaaagagtttgagtgagtgttcttaattccttttggattctagactcactaataatgaagttcttttcttgttcatagcttaaggtgcttattttttctattaaaattaaattaacaaaagccattctagaaatagaagacatagtatggtacatgcaaacggtgtctttcctgcttttttctagcactagatttatagttgagtagtctttcttgagtagaagggcagaataaaagtttttttgagtttttttcaaaaataaatttttccttcagcaatatacctcatctgccttaaattttttacagctctttacagggaaaggggagaagggatgggaaagacacacagcacaataggaagtgtatgattacatcactatctcgtttgtaagtttcttttcctaatcaacattatgatttcgaaatacatgtatgtgaaacaaatattaagagaaaaagaattaacattgtaatgctgattgtaatactctcttccagaaagagatgagatggtataacgataagaatgtacaacttgcaccttgaaatctttttttttaaataaattagtgctcaggggaggaaaagtagagaaagtgaacgtcaaaaatagaattccaaaattataaaaatgcaaaaggaaatggcctccttgctttaatagagccaccttttttagaacactgtcctcacacttgacctgtgttttgcattcagtactgaaataaaagtaacttgttctacatttgaatctaacattttctcagcaattgatctggtccttgtttactagaactggtggtttatgcttgtcagagcactattagttgaatcatattgtatacttatgtaatctacattagctagtactgtttaggactatattttaattgctcttcttatccgtgtttttaagacaattaaaatggtgtgattcacctctcttttttatttaggtaatgctgatattctcccttttgtttcttgagtagcctagaactatgctactcactgatgtgcatgttcaaataaattactgatgtgtatttttttgctatatgtggagaaatcatggggaactcggggcgagatgtgcttttcgttggttgaatttgtccctccttgcctaagaaatactacaggggtcatccttttataaggacaaactgcttttgaacagtgtcttcaatgtatcaagcacaaataactctttcttcaacatgaatcataagtctctttttaccagcttaaaataataaacaagtctattagacaatgtaaagaaaa

SEQ ID NO: 2427 - DNA, 2423 bp, Homo sapiens; identical to SEQ ID NO: 1443

SEQ ID NO: 2428 - DNA, 2925 bp, Homo sapiens; identical to SEQ ID NO: 205

SEQ ID NO: 2429 - DNA, 7930 bp, Homo sapiens; identical to SEQ ID NO: 2424

SEQ ID NO: 2430 - DNA, 4827 bp, Homo sapiens
caatcaggatgctggggctcggagatgatgggcggccgcctcctcactggagggattcctggagaagctgcagtgtggggatgctctagaccgagtactgcccccagtgtctttccacctcctcctgcagcagcggcagcggcagcagcagttagcagcggcaacttgaggctgcaccccgggcaagtccccagggtggtgctcagccgagaggggggcttggcgccccgaaggggtgtgtgtagggtgggggcgaccagctgggaccagctggtggccctggaaaacctcccacacacccacacccacacaccccttttgtgttgcaggctgcccctccaagagcggaggcagcgagagtacgcgtgtgcctcgcgccggtccacgcggggagagcactggggaccgagacccggcaccacctcccggtccgccctccagggaaaacgggaaaactagcaagagctagcaagaactagcaagagcttgaacaaacgcctggactcagattggaagactgctcatttgtctactgcctcattcctggaaattgcactggaactgtctgattaagaaaaacagaataattctgaaagaaagaaaacaaagaaaaacatactccagaattcctaatagaacacttcacctgaacctaaaatggtgagcgagagtcaccatgaggccctggcagccccgcctgtcaccactgtcgcgactgttctgccaagcaacgccacagagccagccagtcctggagaaggaaaggaagatgcattttctaagctgaaggagaagtttatgaatgagttgcataaaattccattgccaccgtgggccttaattgcaatagccatagtcgcagtccttttagtcctgacctgctgcttttgtatctgtaagaaatgtttgttcaaaaagaaaaacaagaagaagggaaaggaaaaaggagggaagaatgccattaacatgaaagatgtaaaagacttagggaagacgatgaaagatcaggccctcaaggatgatgatgctgaaactggattgacagatggagaagaaaaagaagaacccaaagaagaggagaaactgggaaaacttcagtattcactggattatgatttccaaaataaccagctgctggtagggatcattcaggctgccgaactgcccgccttggacatggggggcacatctgatccttacgtgaaagtgtttctgctacctgataagaagaagaaatttgagacaaaagtccaccgaaaaacccttaatcctgtcttcaatgagcaatttactttcaaggtaccatactcggaattgggtggcaaaaccctagtgatggctgtatatgattttgatcgtttctctaagcatgacatcattggagaatttaaagtccctatgaacacagtggattttggccatgtaactgaggaatggcgtgacctgcaaagtgctgagaaggaagagcaagagaaattgggtgatatctgcttctcccttcgctacgtacctactgctggtaagctgactgttgtcattctggaggcaaagaacctgaagaagatggatgtgggtggcttatccgatccttatgtgaagattcatctgatgcagaatggtaagaggctgaagaagaaaaagacaacaattaaaaagaacacacttaacccctactacaatgagtcattcagctttgaagtaccttttgaacaaatccagaaagtgcaggtggtggtaactgttttggactatgacaagattggcaagaacgatgccatcggcaaagtctttgtgggctacaacagcaccggcgcggagctgcgacactggtcagacatgctggccaaccccaggcgacctattgcccagtggcacaccctgcaggtagaggaggaagttgatgccatgctggccgtcaagaagtaaaggaaagaagaagcctttctgcatttgcccatatagtgctctttagccagtatctgtaaatacctcagtaatatgggtcctttcatttttccagccatgcattcctaacacaattcagtggtacttggaatcctgttttaatttgcacaaatttaaatgtagagagcccctaagtccttcatcataccactgccctccaaatctactcttcttttaagcaatatgatgtgtagatagagcatgaatgaaattatttattgtatcacactgttgtatataccagtatgctaaagatttatttctagtttgtgtatttgtatgttgtaagcgtttcctaatctgtgtatatctagatgtttttaataagatgttctattttaaactatgtaaattgactgagatataggagagctgataatatattatacggtaaatatagtatcgtctgcattccagcaaaaatatcaactcgtaaggcactagtacagttaaactgacatcttaaaggacaacttaaacctgagctttctattgaatcatttgagtaccaagataaacttacaccacatacttggtgggtgaatccaattttgtagaattcctacacaggcaaaatagcatgatctgagcagcagcatccaggctgacctcaaggaagcatagccacaaaacagaatagcacctgtctgtacatatttacaaagctaaaataatggcttcactcttatatttgaggaagcaactgaacaggagtcaatgatttcatattactgcatatagaataacaacaaggtgttccgtgtgtgtgtgtgtgtgtgtgtgtgtgtgtgtgtgcacatttgtttggggatgggggagaagaagctaaggggagaagtcaacatttatgaaatattgcctgactatttaaaaagaaaaaagtagctctccattatcacctttatacaaaatgtacatcctgtgaattctgttccagatttcacacctacaataattccaaaaggtttgcacattagagtttgtaacaaaatattttattatataaaaccaggttagaaggaatgcaggatatttttaacacaacaatctgtgcttattacacaaaattactttgtggtaaacagacagtattgtaatcccatcaaaagatgaaagaaaaacaaaaacaaaaaccaacaacaattagccatagttctgaatgcacttcaattaagccaaaacagacagctagtgatctttttatatgctctttttacttaagttttaatttgtcctttaaaaaaaggtgaaacaaaccaagaacaagttctagaaaactgaagcaacctcttatgtatactagatgcttgatttaggaggagtttttaaacgttttcaatgttattatgtagtaaatgacactattatgaagctactagtcattccataagagtcttaaaggactgctctgtgtaacactgtgactgccgtgtgtgcttagacccgtagtttcctcagtggatagcactcaatttattccgtagtgatattgtaacaatactgccattcccttctactgcactgcccaaggtgtgtgtagcacaaacagttctcattacaaaggaccaattcagaactgaaaagctatgcataggacaaggaagatacatagaatggggtggaacacagcattttgtcaagcactgtgcaatattccatatttttccccactatggtagacaaccatttcgtggaagggcagcctattatcccacactgcatctagccttttgtcccattcacttctgtgatccattttaatttccaggccacaagacagtagtgatgctctgaaatgaaagtttgtcttcacaaatatcaaaacaaaatggaggaaaactaagcattggcctcatgttcagtcttcaggatatcacaccacgtcttttcaaaaactaaagagaattcaaaaagggctgatggtaggctttgaacatggggttggctgtttcccagtaaaactggaattcctgtcgttactgtttccttatcaaagaaggggcaagctcttttgccttttaggccagacatagcaaacgctttataattggcatagacataaaggataaaaggaaaataaccgtctgccgatggtccgtacttcttaaaaaacataggtaatagaaaatatacacaagtcagaatgtgaaattaaataatggtttgaacagaaaattcaaacaagactctttccaatttaaagggccaaaccctaccaaagagagggagttgactggcttttaaaaagtatttaaataccacaaatgacatttaatttcactgtattcagctttaagttgttcacaatgaaaccacactttcaaacaagcaggttcaagctgctgaatagacattatttcttgcattaaaataccactaatgcattctcttgcaacactgccagacatgggattgtcaccatagaattagttggtactatgccatctttcactctttcacaagtcagtgatggaacctgctttatgaccaagattcatcctcaaataagccacatgtacccttctgacaaagctgtgtaaagtattagaatctgatgctctagaaagatcctagttgcctttgtgtatatttactgcctgcttgagtgtttctatgtgtgggttttccctgtatcttgtagaaatgttggggtgttttcctctgccatatggctcgtggcctgcgagccaactatttcagctgtattttaccttcatttttgatgaggtgatttaaattttgtttcactttgtgtagtgaattccacagtagttttctgattgttgttaaaaatgacttaacatattacacagatattcaataaaaatgttttatttcctgttgaaaaaaaaaaaaaaaaaa

SEQ ID NO: 2431 - DNA, 2304 bp, Homo sapiens
aactgagttcaaggcaattaaagtcaagagctaaggagggagggagagggtttagaaataccagcataataagtagtatgactgggtgctctgtaaattaactcaattagacaaagcctgacttaacgggggaagatggtgagaagcgctaccctcattaaatttggttgttagaggcgcttctaaggaaattaagtctgttagttgtttgaatcacataaaattgtgtgtgcacgttcatgtacacatgtgcacacatgtaacctctgtgattcttgtgggtatttttttaagaagaaaggaatagaaagcaaagaaaaataaaaaatactgaaaagaaaagactgaaagagtagaagataaggagaaaagtacgacagagacaaggaaagtaagagagagagagagctctcccaattataaagccatgagccccctttggtgggggtttctgctcagttgcttgggctgcaaaatcctgccaggagcccagggtcagttcccccgagtctgcatgacggtggacagcctagtgaacaaggagtgctgcccacgcctgggtgcagagtcggccaatgtctgtggctctcagcaaggccgggggcagtgcacagaggtgcgagccgacacaaggccctggagtggtccctacatcctacgaaaccaggatgaccgtgagctgtggccaagaaaattcttccaccggacctgcaagtgcacaggaaactttgccggctataattgtggagactgcaagtttggctggaccggtcccaactgcgagcggaagaaaccaccagtgattcggcagaacatccattccttgagtcctcaggaaagagagcagttcttgggcgccttagatctcgcgaagaagagagtacaccccgactacgtgatcaccacacaacactggctgggcctgcttgggcccaatggaacccagccgcagtttgccaactgcagtgtttatgatttttttgtgtggctccattattattctgttagagatacattattaggaccaggacgcccctacagggccatagatttctcacatcaaggacctgcatttgttacctggcaccggtaccatttgttgtgtctggaaagagatctccagcgactcattggcaatgagtcttttgctttgccctactggaactttgccactgggaggaacgagtgtgatgtgtgtacagaccagctgtttggggcagcgagaccagacgatccgactctgattagtcggaactcaagattctccagctgggaaactgtctgtgatagcttggatgactacaaccacctggtcaccttgtgcaatggaacctatgaaggtttgctgagaagaaatcaaatgggaagaaacagcatgaaattgccaaccttaaaagacatacgagattgcctgtctctccagaagtttgacaatcctcccttcttccagaactctaccttcagtttcaggaatgctttggaagggtttgataaagcagatgggactctggattctcaagtgatgagccttcataatttggttcattccttcctgaacgggacaaacgctttgccacattcagccgccaatgatcccatttttgtggttcttcattcctttactgatgccatctttgatgagtggatgaaaagatttaatcctcctgcagatgcctggcctcaggagctggcccctattggtcacaatcggatgtacaacatggttcctttcttccctccagtgactaatgaagaactctttttaacctcagaccaacttggctacagctatgccatcgatctgccagtttcagttgaagaaactccaggttggcccacaactctcttagtagtcatgggaacactggtggctttggttggtctttttgtgctgttggcttttcttcaatatagaagacttcgaaaaggatatacacccctaatggagacacatttaagcagcaagagatacacagaagaagcctagggtgctcatgccttacctaagagaagaggctggccaagccacagttctgacgctgacaataaaggaactaatcctcactgttccttcttgagttgaagatctttgacataggttcttctatagtgatgatgatctcattcagaagatgcttagctgtagtttccgctttgcttgcttgtttaacaaacccaactaaagtgcttgaggctacctctaccttcaaataaagatagacctgacaatttgtgatatctaataataaccccccccccaatattgattaagcctcctccttttctgaaagcatttaaaaaaaa

SEQ ID NO: 2432 - DNA, 2468 bp, Homo sapiens; identical to SEQ ID NO: 578

SEQ ID NO: 2433 - DNA, 4199 bp, Homo sapiens
agaaaaggaggaaggagaacattgctgtagcttggatctacaacctaagaaagcaagagtgatcaatctcagctctgttaaacatcttgtttacttactgcattcagcagcttgcaaatggttaactatatgcaaaaaagtcagcatagctgtgaagtatgccgtgaattttaattgagggaaaaagggacaattgcttcaggatgctctagtatgcactctgcttgaaatattttcaatgaaatgctcagtattctatctttgaccagaggttttaactttatgaagctatgggacttgacaaaaagtgatatttgagaagaaagtacgcagtggttggtgttttcttttttttaataaaggaattgaattactttgaacacctcttccagctgtgcattacagataacgtcaggaagagtctctgctttacagaatcggatttcatcacatgacaacatgaagctgtggattcatctcttttattcatctctccttgcctgtatatctttacactcccaaactccagtgctctcatccagaggctcttgtgattctctttgcaattgtgaggaaaaagatggcacaatgctaataaattgtgaagcaaaaggtatcaagatggtatctgaaataagtgtgccaccatcacgacctttccaactaagcttattaaataacggcttgacgatgcttcacacaaatgacttttctgggcttaccaatgctatttcaatacaccttggatttaacaatattgcagatattgagataggtgcatttaatggccttggcctcctgaaacaacttcatatcaatcacaattctttagaaattcttaaagaggatactttccatggactggaaaacctggaattcctgcaagcagataacaattttatcacagtgattgaaccaagtgcctttagcaagctcaacagactcaaagtgttaattttaaatgacaatgctattgagagtcttcctccaaacatcttccgatttgttcctttaacccatctagatcttcgtggaaatcaattacaaacattgccttatgttggttttctcgaacacattggccgaatattggatcttcagttggaggacaacaaatgggcctgcaattgtgacttattgcagttaaaaacttggttggagaacatgcctccacagtctataattggtgatgttgtctgcaacagccctccattttttaaaggaagtatactcagtagactaaagaaggaatctatttgccctactccaccagtgtatgaagaacatgaggatccttcaggatcattacatctggcagcaacatcttcaataaatgatagtcgcatgtcaactaagaccacgtccattctaaaactacccaccaaagcaccaggtttgataccttatattacaaagccatccactcaacttccaggaccttactgccctattccttgtaactgcaaagtcctatccccatcaggacttctaatacattgtcaggagcgcaacattgaaagcttatcagatctgagacctcctccgcaaaatcctagaaagctcattctagcgggaaatattattcacagtttaatgaagtctgatctagtggaatatttcactttggaaatgcttcacttgggaaacaatcgtattgaagttcttgaagaaggatcgtttatgaacctaacgagattacaaaaactctatctaaatggtaaccacctgaccaaattaagtaaaggcatgttccttggtctccataatcttgaatacttatatcttgaatacaatgccattaaggaaatactgccaggaacctttaatccaatgcctaaacttaaagtcctgtatttaaataacaacctcctccaagttttaccaccacatattttttcaggggttcctctaactaaggtaaatcttaaaacaaaccagtttacccatctacctgtaagtaatattttggatgatcttgatttgctaacccagattgaccttgaggataacccctgggactgctcctgtgacctggttggactgcagcaatggatacaaaagttaagcaagaacacagtgacagatgacatcctctgcacttcccccgggcatctcgacaaaaaggaattgaaagccctaaatagtgaaattctctgtccaggtttagtaaataacccatccatgccaacacagactagttaccttatggtcaccactcctgcaacaacaacaaatacggctgatactattttacgatctcttacggacgctgtgccactgtctgttctaatattgggacttctgattatgttcatcactattgttttctgtgctgcagggatagtggttcttgttcttcaccgcaggagaagatacaaaaagaaacaagtagatgagcaaatgagagacaacagtcctgtgcatcttcagtacagcatgtatggccataaaaccactcatcacactactgaaagaccctctgcctcactctatgaacagcacatggtgagccccatggttcatgtctatagaagtccatcctttggtccaaagcatctggaagaggaagaagagaggaatgagaaagaaggaagtgatgcaaaacatctccaaagaagtcttttggaacaggaaaatcattcaccactcacagggtcaaatatgaaatacaaaaccacgaaccaatcaacagaatttttatccttccaagatgccagctcattgtacagaaacattttagaaaaagaaagggaacttcagcaactgggaatcacagaatacctaaggaaaaacattgctcagctccagcctgatatggaggcacattatcctggagcccacgaagagctgaagttaatggaaacattaatgtactcacgtccaaggaaggtattagtggaacagacaaaaaatgagtattttgaacttaaagctaatttacatgctgaacctgactatttagaagtcctggagcagcaaacatagatggagagtttgagggctttcgcagaaatgctgtgattctgttttaagtccataccttgtaaataagtgccttacgtgagtgtgtcatcaatcagaacctaagcacagcagtaaactatggggaaaaaaaaagaagaagaaaaagaaactcagggatcactgggagaagccatggcattatcttcaggcaatttagtctgtcccaaataaaataaatccttgcatgtaaatcattcaaggattatagtaatatttcatatactgaaaagtgtctcataggagtcctcttgcacatctaaaaaggctgaacatttaagtatcccgaattttcttgaattgctttccctatagattaattacaattggatttcatcatttaaaaaccatacttgtatatgtagttataatatgtaaggaatacattgtttataaccagtatgtacttcaaaaatgtgtattgtcaaacatacctaactttcttgcaataaatgcaaaagaaactggaacttgacaattataaatagtaatagtgaagaaaaaatagaaaggttgcaattatataggccatgggtggctcaaaactttgaacatttgagcttaaacaaatgccactctcatgcattctaaattaaaaagttaaaatgattaatagttcaggtggaagaaataagcatactttttgggttttctacacattttgtgtagacaattttaatgtcagtgctgctgtgaactaaagtatgtcatttatgctcaaagtttaattcttcttcttgggatattttaaaaatgctactgagattctgctgtaaatatgactagagaatatattgggtttgctttatttcataggcttaattctttgtaaatctgaatgaccataatagaaatacatttcttgtggcaagtaattcacagttgtaaagtaaataggaaaaattattttatttttattgatgtacattgatagatgccataaatcagtagcaaaaggcacttctaaaggtaagtggtttaagttgcctcaagagagggacaatgtagctttattttacaagaaggcatagttagatttctatgaaatatttattctgtacagttttatatagttttggttcacaaaagtaattattcttgggtgcctttcaagaaaattaaaaatactactcactacaataaaactaaaatgaaaactcaaaaaaaaaaaaaaaaaa

SEQ ID NO: 2434 - DNA, 10210 bp, Homo sapiens
gtagtacggttccaactcccagctcgcacaccgctggcggacaccccagtaacaagtgagagcgctccaccccgcagtcccccccgcctctcctccctgggtcccctcggctctcggaagaaaaaccaacagcatctccagctctcgcgcggaattgtctcttcaactttacccaaccgacgacaaggaaccagcctcaaccttttaatgcacagcccggccacaggattgccttccatctcctcttggtccctcctggatgtggtttattgatgacttgcgagcccctcagagagctgtcttccctcctctggctccctccgtttccttgagttagttttctaaggttttaccggggctcgggatctcttggaccgaatggaactttttgctgcctgcttttgctgctgattctgtcagtggacaaggaaaaaggcttcgaaggcagcagaggcgcaggggaggtggagaaagaggtggaggaagaggacgaggaggaggaggaagccgaaggggctcggcgcgtgtgtgtgcatgtgtgcatgcgtgtgtgagtgcatgtgtgtgagtgctgccgctgcccgcgacccctggccccgaaggtgttggctgaaatatggagaatagtcttagatgtgtttgggtacccaagctggcttttgtactcttcggagcttccttgttcagcgcgcatcttcaagtaaccggttttcaaattaaagctttcacagcactgcgcttcctctcagaaccttctgatgccgtcacaatgcggggaggaaatgtcctcctcgactgctccgcggagtccgaccgaggagttccagtgatcaagtggaagaaagatggcattcatctggccttgggaatggatgaaaggaagcagcaactttcaaatgggtctctgctgatacaaaacatacttcattccagacaccacaagccagatgagggactttaccaatgtgaggcatctttaggagattctggctcaattattagtcggacagcaaaagttgcagtagcaggaccactgaggttcctttcacagacagaatctgtcacagccttcatgggagacacagtgctactcaagtgtgaagtcattggggagcccatgccaacaatccactggcagaagaaccaacaagacctgactccaatcccaggtgactcccgagtggtggtcttgccctctggagcattgcagatcagccgactccaaccgggggacattggaatttaccgatgctcagctcgaaatccagccagctcaagaacaggaaatgaagcagaagtcagaattttatcagatccaggactgcatagacagctgtattttctgcaaagaccatccaatgtagtagccattgaaggaaaagatgctgtcctggaatgttgtgtttctggctatcctccaccaagttttacctggttacgaggcgaggaagtcatccaactcaggtctaaaaagtattctttattgggtggaagcaacttgcttatctccaatgtgacagatgatgacagtggaatgtatacctgtgttgtcacatataaaaatgagaatattagtgcctctgcagagctcacagtcttggttccgccatggtttttaaatcatccttccaacctgtatgcctatgaaagcatggatattgagtttgaatgtacagtctctggaaagcctgtgcccactgtgaattggatgaagaatggagatgtggtcattcctagtgattattttcagatagtgggaggaagcaacttacggatacttggggtggtgaagtcagatgaaggcttttatcaatgtgtggctgaaaatgaggctggaaatgcccagaccagtgcacagctcattgtccctaagcctgctatcccaagctccagtgtcctcccttcggctcccagagatgtggtccctgtcttggtttccagccgatttgtccgtctcagctggcgcccacctgcagaagcgaaagggaacattcaaactttcacggtctttttctccagagaaggtgacaacagggaacgagcattgaatacaacacagcctgggtcccttcagctcactgtgggaaacctgaagccagaagccatgtacacctttcgagttgtggcttacaatgaatggggaccgggagagagttctcaacccatcaaggtggccacacagcctgagttgcaagttccagggccagtagaaaacctgcaagctgtatctacctcacctacctcaattcttattacctgggaaccccctgcctatgcaaacggtccagtccaaggttacagattgttctgcactgaggtgtccacaggaaaagaacagaatatagaggttgatggactatcttataaactggaaggcctgaaaaaattcaccgaatatagtcttcgattcttagcttataatcgctatggtccgggcgtctctactgatgatataacagtggttacactttctgacgtgccaagtgccccgcctcagaacgtctccctggaagtggtcaattcaagaagtatcaaagttagctggctgcctcctccatcaggaacacaaaatggatttattaccggctataaaattcgacacagaaagacgacccgcaggggtgagatggaaacactggagccaaacaacctctggtacctattcacaggactggagaaaggaagtcagtacagtttccaggtgtcagccatgacagtcaatggtactggaccaccttccaactggtatactgcagagactccagagaatgatctagatgaatctcaagttcctgatcaaccaagctctcttcatgtgaggccccagactaactgcatcatcatgagttggactcctcccttgaacccaaacatcgtggtgcgaggttatattatcggttatggcgttgggagcccttacgctgagacagtgcgtgtggacagcaagcagcgatattattccattgagaggttagagtcaagttcccattatgtaatctccctaaaagcttttaacaatgccggagaaggagttcctctttatgaaagtgccaccaccaggtctataaccgatcccactgacccagttgattattatcctttgcttgatgatttccccacctcggtcccagatctctccacccccatgctcccaccagtaggtgtacaggctgtggctcttacccatgatgctgtgagggtcagctgggcagacaactctgtccctaagaaccaaaagacgtctgaggtgcgactttacaccgtccggtggagaaccagcttttctgcaagtgcaaaatacaagtcagaagacacaacatctctaagttacacagcaacaggcctcaaaccaaacacaatgtatgaattctcggtcatggtaacaaaaaacagaaggtccagtacttggagcatgactgcacatgccaccacgtatgaagcagcccccacctctgctcccaaggacttgacagtcattactagggaagggaagcctcgtgccgtcattgtgagttggcagcctcccttggaagccaatgggaaaattactgcttacatcttattttataccttggacaagaacatcccaattgatgactggattatggaaacaatcagtggtgataggcttactcatcaaatcatggatctcaaccttgatactatgtattactttcgaattcaagcacgaaattcaaaaggagtggggccactctctgatcctatcctcttcaggactctgaaagtggaacaccctgacaaaatggctaatgaccaaggtcgtcatggagatggaggttattggccagttgatactaatttgattgatagaagcaccctaaatgagccgccaattggacaaatgcaccccccgcatggcagtgtcactcctcagaagaacagcaacctgcttgtgatcattgtggtcaccgttggtgtcatcacagtgctggtagtggtcatcgtggctgtgatttgcacccgacgctcttcagcccagcagagaaagaaacgggccacccacagtgctggcaaaaggaagggcagccagaaggacctccgaccccctgatctttggatccatcatgaagaaatggagatgaaaaatattgaaaagccatctggcactgaccctgcaggaagggactctcccatccaaagttgccaagacctcacaccagtcagccacagccagtcagaaacccaactgggaagcaaaagcacctctcattcaggtcaagacactgaggaagcagggagctctatgtccactctggagaggtcgctggctgcacgccgagccccccgggccaagctcatgattcccatggatgcccagtccaacaatcctgctgtcgtgagcgccatcccggtgccaacgctagaaagtgcccagtacccaggaatcctcccgtctcccacctgtggatatccccacccgcagttcactctccggcctgtgccattcccaacactctcagtggaccgaggtttcggagcaggaagaagtcagtcagtgagtgaaggaccaactacccaacaaccacctatgctgcccccatctcagcctgagcattctagcagcgaggaggcaccaagcagaaccatccccacagcttgtgttcgaccaactcacccactccgcagctttgctaatcctttgctacctccaccaatgagtgcaatagaaccgaaagtcccttacacaccacttttgtctcagccagggcccactcttcctaagacccatgtgaaaacagcctcccttgggttggctggaaaagcaagatcccctttgcttcctgtgtctgtgccaacagcccctgaagtgtctgaggagagccacaaaccaacagaggattcagccaatgtgtatgaacaggatgatctgagtgaacaaatggcaagtttggaaggactcatgaagcagcttaatgccatcacaggctcagccttttaacatgtatttctgaatggatgaggtgaattttccgggaactttgcagcataccaattacccataaacagcacacctgtgtccaagaactctaaccagtgtacaggtcacccatcaggaccactcagttaaggaagatcctgaagcagttcagaaggaataagcattccttctttcacaggcatcaggaattgtcaaatgatgattatgagttccctaaacaaaagcaaagatgcattttcactgcaatgtcaaagtttaagctgctagaatagtcatgggcctttgtcactgcagtgaccacactgtcataactaatacctatgttttcctttgtcaaggcctgttgtttaatgtgtaggtctagtcttacaaaatgcaagtgcattatttaagcctgtaccatgccatggcaaaccagtgcaagctcactattttgttttcaacttaaacatacaaagcacccatgggaatctctcatgccatagcaccaaaggattggatgttttccttacagcacaaaaagtaaatagtaaacaaacaaaaggcagagaatgcttatgtttgtaactcagtcattcatcttgcacaagtggtggatattagtgagtggctaaaaattcacctattttggcaagtatttgtaaatccacccttggttaatatgtatgtctggagtccaggaatataaaaatctgcaactagtggcattctgccagcagcagtacatttctggaaagaggatataatatgcaatcttctcagacacatggtaattatatgcttaagcttgtaataggacagttttcaatttgggtggcttttgtgccataccacactgtgatacaatttcaaagcttcactaaggccatcttccttaggagtttggccagaagaatgcccccaccccttcaccccatccctccctgagttctccttggcaactagcgttgggtgaaatggccagctccacatgtcatatggtgcactggccaatgtcgcctgtcttctaatcccgtagaaatggcagactccctgagagcaggaagagaaggaaaataaaaggtagcttctaacagtaccttctcttaaagaatgccaactctgcctacagggtcagtgttggcaagcattggccaccagacccttttgttaagggaaacttttacactacacctgtgtcagagtcagggggaagcagaggggcaggtgccacctgacacttccgacatgtaaatccagcagatacttttcaaagcagcatcttaaactgtggactacagttttaaacttctattgccatgtttatctacagcttggaactagctaaaattaagaacattttgtatgcagcattttagtttctgaattttcagctgcatttggagttaatccctgtttatgcagctgaatcgccaaaagggagctagtttgcatatttatcagttaggtgacttgaaaacccaatgagagagtttcagctgaattattcctttcagctctgcctttgatttcaagcttgagtaggtcataattttaaaagagcatggaagggataggatctttacaacctaatagctccttttattaggtgggtaattatatatgaatccctgaataaaatattttgagcaaaatggcactgtaacagaagtaataattcagtttatttttttacagttttatgtcgggaaggaaatctgatgtcaaagagagggctgttcaaatggttcattagaaagtccggtccatttgcgaatttgttccttcaacaagagtgctcattcaagttactcagattttctggaagtcttttctgaagagctatgtgatgttgttctatgggacagactactcttatttaacatctgggcacttaggtagacaaccttctactgacctggaataaagtgtttcctaacataatattgaattattcagaaataatccattacttcaaaaaagaaaatattcattgggctagcccaaccttctctaggccctaagaattattacctcccctttctaattctagcaaacatggaacattctccttaggcacttgacacccacgagggtaatcctgagtgctcagtttggaataggttgcaaatctcagattttagggattgagtcacaccttcaatctatagaatgaagttgaccaattaaaaaaaaaaaaaaaacctatcattttcacaaatttctagatccttctagtcaaaaataattatttaggaaataaaatttttaaaaatccatttaaatacatgttatttgtcttcagtggaagttatatttctgctgcatgcttttgaaactttcttcattaaatagaatggtttgtcttagtaactggcaatgccagtattagcaccatgcatttaatctataatacaatcaatttaaacatcctcaaaaaactctagtatcatttacctggtagtattaatatacaatgatgtcaccacaacttttgtataactctgttccctttaccctcaaatgattcatatatgtatataattgcctgcccaagttttcaggtaacttattaatttcccagtctcctgatctcttgacaagaagaaacctgtgaatactgcaaactagcctctgacttcctcctactgagtctagttcatggtatccaggactctttatgctcataactctctctgattcccattgggtgatacctgacagccaaccagccgctctgccaccagaactcatttctccctgaaaaagaagaaaatcatatttggcagagcattctctggtctgccctgtaatgtgcttaaatgtcaggcaacatcctcttttttttaaaaaaaatggtatttttctttaaatttcaccctaataagaaagctattttctctcctctgcagaaatttctgcatttgtgaaacttataaaaatttagatagttcaaatgtataaagaatatttggatgatgctctagccaaaagttaaatatttcgtagtgaatcatagccaataagaaaccagtcatacttgcctctttgaataacagagatataagcttctagaatatttaaataatgaagttttacatttgggtattataaaatgcatactcaattgaatgagctgaaaaaaataccaagccagtgatataagtggagatttattaaggattcctgttgagtatattcttagtttcctcaaaatagggattattcaaaattaggtgtatgttcaatctcctgctttggttccagctacacaaggagagccatcctgtgctagtgtgatgtttcagacaacattctgaaactaaaatgtttggcacttattggcttttccaataaagaatctcttaagtacaggtatttctggaagctgttggtgtctgtgcttgaagatgattgctgatacttatccaccctttgggtacttctgttgactttgtttaaataatcatcttatggttgtccccaaatgtaatatggtatctcagatatagcagctggactgtaattacaacaaaaggttacctctaaagataacatcttaccattttagataaaattgtgtcccagaattcttatggtttcggaatgtacatttctagtcaatgaaagaaagaaaaatggaaaaattgtctagtttcaggcatgtttaaagaaaacaaagtcatctgaactttaaaatagatgcagagcagggttactttccctttcactcagttcccttcatgcaaccacaggcagtcctgcaggccagaggttactatcctaacctgctcataaccatatactatacagagcccacaactttctggagatgcagaagcagccatacactcaagtctctgtttttgtaaatcacattcaaagcaacattttactcataatttgcatttctctggtgactttcagaaatcactttagtattgtacagaaaagctttttatttgagtctagtgtttaaaattaaattggatacttgggaaaatcatagataggtgttttgtatgatattccattccaatgcaaaatatatgtacccatgcctcaatgtatcttgctatctaaatacctgttgccaaaaagtattgatttgggaaaaaaaatgccaatttcctggtcagtgaggttatgtaaaagacaaaataccacacccatatcagcaaatgaatattactactcatctggactcttcgttgccactattgcataacgttcacgtggcagacttccagttgcactctctgaaggacttttttctcttactctcaatagagagcctttgtacattgtcatcctatgattgttgttggtagaagagcaagagcaaaactctgcaagatttaataaacacaggggcatgggccaagggatctcactgtgtgctgaacatgtattttcagatgcaagaaaggaatgatggagaggaggagaaatgctgttttttattattgtagggtaaatctgacaattctgaactttgtgaattgtcagcttgtttgggggaagggtgggcgggtatggggtgtactttttataagtaatatttaatttattatttagagtggcttctttttggataatttatgataaaaagggagatctggttgggatctagatacggctgttaaagctgcagtgttccatacctcagagggaccactttggaaatgaattgtccattgctgagtatgaagagatgtccagtccaggcaaagccttcactgaagttccatcatcgccacttctccctttttagggtcattcaaagaagataacaccaaacctaaataattctgaaagcattttgcagatcagtgctactcattcaaagggctttgcaactcaaacagattgttagtgtgctagtgataagtttatttggtagaaatgggtatactacagctttaactagccttagtgagaaaagaaattttttgttgttacaaaacaccttttttaacaaaaaggtattttgagcctacaaaaagtttctttaaactgtcagattctagcattgttaaccaaattagactagtgattgcaatatttaagtgtaaatcttgttctacaagaaaggaaacttgcttacagtttaaaacaatgactgtttctacacatgatcttgtatactactacacaaggaaaagggggttttgtaaacactgtagaacagtctcatattcatttttttatagaaatgttattccaatggtgcattttttgtttaataaataaagttttgatacaaagttc

SEQ ID NO: 2435 - DNA, 16179 bp, Homo sapiens
gggatttccctcaaagcccagggtccggggacctggaaagtagaagtggagggattcaattctccgcgcgattgaggcgctagcggcggagctggacggcctgggaaggcttcggctcctcggctgcggctccagcccggacggcgccgcgcaactttgccatccttctggcccagccccggctacaggaggaccccgcgggcaacgcgcggagttcctggcacttcccggcggtgtctcttgttgtctgcccggggaccgacttcgcatgctctcaggctgacctgtccaagcccgaacaccgggaccatgcactcagccgggactcccgggttatcctcgcgccggacaggcaactccaccagctttcaaccaggaccgccaccgccgccccggctgctgctgctgctgctgcttctcctgtcactggtaagccgcgtcccggcacagcccgctgccttcggcagggcgttgctgtcccctggtctcgcgggggctgcaggggtccctgctgaggaggccatagtgctggcgaaccgcggactccgggtgcctttcggccgtgaagtctggctggatcccctgcatgacctggtgttgcaggtgcagcccggggaccgctgcgcggtttcggtactagacaacgacgcactggcccagcgaccgggccgcctgagtcccaagcgcttcccgtgcgactttggccctggcgaggtgcgctactctcacctgggcgcgcgcagcccgtctcgggaccgcgtccggctgcagctgcgctatgacgcgcccggaggggcagtagtgctaccactggtactggaggtggaggtggtcttcacccagctggaggttgtgactcggaacttgcctctggtcgtggaagagctgctggggaccagcaatgccctggacgcgcggagcctggagttcgccttccagcccgagacagaggagtgccgcgtgggcatcctgtccggcttgggcgcgctgcctcgctatggagaactcctccactacccgcaggtccctggaggagccagagagggaggcgccccggagactctcctgatggactgcaaagctttccaggaactaggcgtgcgctatcgccacacagccgccagtcgctcaccaaacagggactggatacccatggtggtggagctgcgttcacgaggggctcctgtgggcagccctgctttgaaacgcgagcacttccaggttctggtgaggatccgaggaggggccgagaacactgcacccaagcccagtttcgtggccatgatgatgatggaggtggaccagtttgtactgacggccctgaccccagacatgctggcagccgaggatgctgagtctccctctgacctgttgatcttcaaccttacttctccattccagcctggccagggctacttggtgagcaccgatgatcgcagcctgcccctttcctccttcactcagagggatctgcggctcctgaagattgcctaccagcccccttctgaagactctgaccaggagcgcctctttgaactggaattggaggtagtggatctagaaggagcagcttcagacccttttgccttcatggtagtggtgaagcccatgaacacaatggctccggtggtcacccggaataccggtcttattctctatgagggtcagtctcggcccctcacaggccctgcaggcagtggtccgcaaaacttggtcatcagcgatgaggatgacctagaagcagtgcggctagaggtggtggctgggctccggcatggtcaccttgtcattctgggtgcttccagtggcagctctgctcccaagagctttacagtggctgagctggcagccggccaggtggtctaccagcatgatgacagagacggctcgctgagcgacaacctggtgcttcgcatggtggatggaggaggcaggcaccaggtacagtttctgttccccatcaccttagtgcctgtggatgaccagccacctgttctcaatgccaacacggggctgacactggcagagggtgaaacagtgcccatcctgcccctttccctgagtgcaactgacatggattcagatgattctctgctgctttttgtgctggagtcacccttcttaactacggggcatctgcttctccgccaaactcaccctccccatgagaagcaggaacttctcagaggcctttggaggaaggagggggcattttatgagcgaacagtgacagagtggcagcagcaggacataacagagggcaggctgttctatagacactctgggccccatagtcctgggccagtcacagaccagttcacatttagagtccaggataaccatgaccctcctaatcagtccgggctacagcggtttgtgattcgtatccatcctgtggatcgcctccctccggagctgggcagtggctgtccccttcgtatggtggtacaggaatcccagctcacaccactgaggaagaagtggctgcgctacactgacctggacacagatgaccgagaactacgttacacagtgactcagtcccccacagacacagacgaaaatcacctgccagccccactgggtaccttggtcttgactgacaacccctcagtcgtggtgacccattttacccaagcccagatcaaccatcataaaattgcttacagacccccgggtcaagaactgggcgtggctactcgagtggcccagttccagttccaggtggaagaccgagctgggaatgtggctccaggtacctttaccctttacttgcatcccgtggacaaccagccacctgagatcctcaacaccggcttcactattcaggagaagggtcaccacatcctgagtgagacagagttgcacgtgaatgatgtagacactgatgttgcccatatctctttcactctcactcaggcacccaaacatggccacatgagagtgtctggacagatcctgcatgtagggggtctcttccacttggaggacataaaacagggccgagtttcctatgcccataatggggacaagtccctgactgatagctgctccttggaagtcagtgacagacatcatgtggtgcccatcactctcagagtaaatgtccggccagtggatgatgaagtgcccatactgagccatcctactggcactctggagtcctatctagatgtcttagaaaatggggctactgaaatcactgccaatgttattaaggggaccaatgaggaaactgatgacttgatgttgactttcctcttggaagatccacctttgtatggggaaatcttggtcaatggcattccagcagagcagtttactcaaagggacatcttggagggctctgttgtatatacccacaccagtggtgagataggcctattgcctaaagcggattcttttaacctgagtctgtcagatatgtctcaagaatggagaattggtggcaatactatccaaggagttactatatgggtgaccatcctgcctgttgatagccaggccccagaaatctttgtaggtgaacagttgatagtaatggaaggtgataaaagtgttataacatcagtgcatataagtgctgaagatgtcgactccctgaatgatgacatcttgtgcactatagttattcagcctacttcaggttatgttgaaaacatttctccagcaccaggctctgagaaatcaagagcagggattgccataagtgctttcaacttgaaagatctcaggcagggccacataaactatgtccagagtgtccataaaggggtggaacctgtggaggaccgatttgtatttcgttgttctgatggcattaacttttcagagagacagttcttccccattgtaatcattcccaccaatgatgaacagccagagatgtttatgagagaatttatggtgatggaaggcatgagtctggtaattgatacacccattctcaatgctgctgatgctgatgttcccctggatgatttaactttcactattacccaattccccactcatggtcacatcatgaatcagctgataaatggcacggttttggtcgaaagcttcaccttggatcagatcatagagagttccagcattatttatgagcatgatgactccgagacccaggaagacagttttgtgattaaactaacagatgggaagcactctgtggaaaagacggtcctcattatagttatccctgttgatgatgagacgcccagaatgactatcaataatggactagaaatagaaattggggataccaagattatcaacaacaaaatattaatggcaacagatttagattcagaagacaaatctttggtttatattattcgttatgggccaggacatggcttattacagagacgaaaacctactggtgcctttgaaaatatcacactgggcatgaattttacccaggatgaagtagacagaaacttaattcagtatgtccatttggggcaagagggcattcgggacctaattaaatttgatgtgactgatggaataaatcccctcatagatcgttacttttatgtgtccatcgggagcattgacattgtcttccctgatgtgataagtaagggagtgtccttgaaagaaggtggcaaagtcactcttacaacagacctactaagcactagtgacttgaacagtcctgatgaaaacttggtttttaccatcaccagggctcccatgcgaggtcacctggaatgcacggatcagcctggtgtgtccatcacgtctttcactcagctgcaactggctggaaacaaaatctactacatccacacagctgatgatgaagtgaaaatggacagttttgagtttcaagtcaccgatggacgtaaccctgtctttcggacattccgtatctccattagcgatgtggacaataaaaagccagtggtcaccatccacaagctggttgtcagtgaaagtgaaaacaagctgattactccttttgagctcactgtcgaagacagagatactcctgacaagctcctgaaattcactatcacccaggtgcctattcatggccatctcctattcaacaataccagacctgtcatggtttttaccaagcaagacttgaatgaaaacttaatcagctacaaacatgatggcactgagtcaagtgaagatagcttctccttcacagtgactgatggcacccatacagacttctatgtttttcctgatacggtgtttgaaacaaggagaccccaagtgatgaagatccaggtcttggctgttgacaacagtgtcccccaaatcgcagtgaataagggggcctctacacttcgcactctagccactggccacttggggttcatgatcacaagcaaaatattgaaagtggaggacagagacagcttacacatttctcttagatttatcgtgacagaggcccctcaacatggatatcttctcaacctggacaaaggcaaccacagcatcactcagttcacacaagctgacattgatgacatgaaaatatgctatgtcttaagagaaggggctaatgccacaagtgatatgttctattttgcagttgaagatggtggtggaaacaagttaacgtaccagaattttcgtctgaattgggcatggatctcctttgaaaaggaatattacctggtcaatgaggactccaaatttctagatgttgttcttaaacgtagaggttacttgggagaaacttcttttataagtattggcacaagagacagaactgcagaaaaagacaaagacttcaagggcaaagcacagaaacaagtgcagttcaacccaggccagaccagggccacatggcgagtgcggatcctgagtgatggggagcatgagcagtctgaaacctttcaggtggtactctcagagcccgtgctggctgccttggaattccccacagtcgccactgttgagatcgttgatccaggagatgagccaactgtgtttattccccagtccaaatactccgttgaagaagatgttggtgagctgttcattcccatcaggaggagcggagatgtgagccaggagttgatggtggtctgttatacccaacaaggaacagcaactggaactgtgccgacttccgtgttgtcttactctgattacatatccaggcctgaggaccacaccagtgttgtccgctttgacaaagatgaacgggagaaactgtgtcggatagtcataattgatgactctttgtacgaggaggaggaaaccttccatgtccttctgagcatgcccatggggggaagaatcggatcagagttcccaggggctcaagttacaatcgttcctgacaaagatgatgaacccatcttttacttcggtgatgtggaatactctgtggatgagagtgctggctatgtggaagtgcaggtgtggagaacgggcactgacctgtccaagtcttctagtgtcacagtgaggtctcggaaaacagatcctccctctgcagatgctggaacagactatgtgggcatcagccgtaatttagattttgcacctggagtcaacatgcagcctgttcgtgttgtcattctggatgaccttggacaaccagcgctggagggaattgagaaatttgaactggtgcttcgcatgcctatgaacgcagcccttggcgagcccagcaaagccacagtgtccataaatgactctgtctccgatttgcctaagatgcaattcaaagaacgaatatatactggcagcgaaagtgatgggcagatagttacaatgatccataggactggggatgtccagtacagatcttcagtgagatgctacacccggcaggggtctgcacaggtgatgatggactttgaagaacgcccaaacactgatacctccatcatcacattcctccctggtgagacagaaaagccctgcattcttgagctgatggacgatgtgctctatgaggaggtagaggagctccgcctggtactcggcactccacaaagcaactctccctttggggctgcagttggtgaacaaaatgaaactctcataaggatccgagatgatgctgataagactgttattaaatttggagaaaccaaatttagtgtcactgaacccaaagaacctggagagtcggtggttataagaattccagtgattcgccaaggagacacttcaaaggtttccattgtgagagtccacaccaaggatggctcggccacctctggagaagactaccaccctgtgtcagaagaaattgagtttaaggaaggggaaacccagcacgtggttgaaatcgaagttacctttgacggggtgagagagatgagagaggccttcactgttcacctaaaacctgatgaaaatatgatagcagagatgcagttgacgaaagccattgtgtacatagaagaaatgagcagcatggcagatgtcacttttccttctgtccctcaaattgtatccctgttgatgtatgacgacacttccaaagctaaggagagtgctgaacccatgtctggctatcctgtcatctgtatcacagcttgcaaccccaaatattcagactacgataaaacaggctctatctgtgcaagtgagaacatcaatgacactttgacgcggtaccggtggctgattagtgcacctgcgggccctgacggtgtgaccagccctatgagagaagtggacttcgacaccttttttacgtcatccaagatggtcacactggactccatatactttcagcctggctcccgggtacagtgcgcagctcgtgctgtgaacaccaatggggatgaaggcctggagctcatgagccctattgtaaccatcagcagagaagaaggtctttgtcagccccgtgtacctggggttgttggagcagagccgttctcagctaaattgcgctacacaggccctgaggatgcagactacacaaaccttatcaagctcactgtcacaatgccacacatagatggcatgctccccgtgatctccactagagagctttccaactttgagctcaccctcagccctgatggcacaagagttggaaaccacaagtgctccaacctcctggattatactgaagtgaagactcattatggtttcttgactgatgctaccaaaaatccagaaataattggagagacatatccttaccagtacagcttgtccatcagaggttccactaccttgcgcttctaccggaacctgaacctagaggcctgtttatgggagttcgttagctactatgacatgtcagaactccttgctgactgtggtggcaccattggaacagatggacaggtcctaaacctagtgcagtcctatgtgacccttcgagtccctctgtatgtttcctacgtgttccattcccccgtgggggtaggaggctggcagcattttgacttgaagtcagagcttcgtctaacttttgtgtacgacaccgccatcttgtggaatgatggaattggcagccccccagaggctgaacttcaaggttctctctatccaaccagcatgcgcatcggtgatgaggggcgcttggccgtgcacttcaagacagaggctcagttccatggcttatttgtgctgtcacatcccgcatcctttacaagctcagtgatcatgtcagctgatcatccaggcctgacattttccctccgcctcataaggagtgaaccaacctataaccagccagtacagcagtggagctttgtctctgactttgccgtacgtgactactcagggacctatactgtgaagctggtgccatgcactgccccatcacatcaggaataccgcctgccagtcacctgcaaccccagagaacctgtcacctttgaccttgacatccgattccaacaggtcagtgatccagtggctgctgagtttagcttgaacacccaaatgtacctgctctctaagaagagtctctggttgtctgatggatccatgggattcgggcaagagagtgatgttgcttttgcagaaggtgatataatttatggtcgtgtcatggtggatcctgtccagaatctgggtgactccttttactgcagcattgagaaggtgtttctatgcactggagctgatggctatgttcccaagtatagtccaatgaatgcagaatatggctgcttagccgactctccttcactcttatatagatttaaaattgtggacaaagctcagccagagacacaagcgaccagttttggaaatgtcctatttaatgccaaactagcagtggatgaccctgaagccattctcttagtgaatcagcctggatctgatggatttaaagtcgactcaacaccactctttcaggtcgctctaggccgagaatggtatatacatacgatctatacagtgagatcgaaagacaatgccaatcgaggtattggcaaaagaagtgtggagtaccattctctggtgagtcaaggaaagccccaatccaccaccaagagccggaagaagagagagatcaggagcacaccctcactggcatgggagattggtgctgaaaacagtcgaggaacaaacatccagcacattgccctggaccgcaccaagaggcagatcccccatgggagagcacctccagatggcatcctcccctgggagctcaacagccccagctctgcagtcagcctggtcactgtggtgggaggcaccacggtagggttactcaccatctgcctcactgtcattgcagtgctgatgtgcaggggcaaggaaagtttcagggggaaggatgccccgaaaggctccagcagcagtgagcccatggtgcccccacagagccatcacaatgacagctcagaagtttgatgactgcaggtagaattcaaccttttccgtaagtgcctcggaaaagatcacaatggaaccttaaatacttctggtaaaccatagagaatggaggatggctgtgatgaagctgcttagagaatatgactgtactaatggagtttgatttgaattctccatactcttttttgcatcaaaggacaaattaaggcatctttcctcttgccccaaaggcagcaacaacgtactcatatgtacacagagccatgatgtgaggaatgtactcctcattttagacatattctctatgcagtggagataaatctattaaaaggtgctaacagactctcttacaagtgtaagaggaatctactgttgctatgttagtgtgaatgttgaaggtgcaattatcacattgtttattaattgtataacagattattactagaaaggtttttgttgctagtctggaaaactggtgaacacactgtttattatgacaagttttcaaataggtgaagacagcatagaattatgaccagggtggctcaacccacaaatcaactgatctactacttgggagacagtggaaggaaagatagagggaaggaagttcactcacttgaatttgaattgcttctcattctcatcagactctccttgttttgtttgcatatttaattttaaattaaaccaaagaatatgttaattctgaaagagatttttaagagatgctgctctgttttggcatatagtgagtaatggtagagctcttgcatggtaatataccttattggtgctcaacatttgtgggaaattagagggttggtgagattttggtgatgaataaatgccatagagttagagtcactacaagacaatgttctctaagaactgagcctagatgtttgcagtattgaacccataaatgataataagaaacattgttacagatggtgaagggagaaagtggtatttattaatataatgtgtataatcagagtgcctcttatacatactttatagaataaaggaacattttgacagatgaggttatccctcggagtagcgtaatcacacaataacatttagaacttaaattggctacaggacattttattagctttctatccagcatctggtccaaacgatgggactctctgcaactatcattccagaaatggtcttggaggtggccagaatcattgaccatatttttatttggttcaagaagacatcgctctggcatccccagttcagtgaactggtacaatgtggtccctctcaatatttaaaaatataatttgtaacagtgcttaccattcacctcccaaagccaaggaacttgagtgagcttccttggcaagcctcccattgcctttctgcatcaatgtgtttgttaccaaatagcagaaatttcgcttagaaggggaaaacttcagctttccaaaagctagtaaacatgtttcaaagaaaaataaggtcaggagaaaaagaataatgcctacagattatccttcagatgctggctagaatcccctttgacttctagccataagctggccacattggacatcttggtcactgcagaattttaaaaggcaaacttctcagaacagatgtgcacatcttaatttggtgtctgtaagtatcaaccatttcttgatcaagataaggaagcaacactgatactgagagagaggtcatatgtccaatagttgcctttcttctcttaggcagctctgcacttcatgttcagttttttaaaaatagactgtagtatcctttcattggagaatttacaaaaatatcatctacagctcaaaagtcccactaacggcttatatgaacagaaagtactgtgtagcccaggagtttatttagcaagataaatagtggtaatttcttaatcattcccctttcctttgctttaccttctggcagatgcttagctacttctttggctacctcataatttgtatgggaatgaacatgaattagggaacttcaaatagtgcgtagacttttccctacttaccattgggttcaattgatgtagactgttagagcaagtatactcaatcaacttgctgatattttagtagttaacagcttccgagcctatcatgcaatttggagtctgtcaatgaatatagcaatcggtgaagcattactgtacgaagtctgttttcaggctttgggtcaagctggttttataccaaatttcactctacaatgcatattctaatgaagctactttatataaattggagagcttataaaatgcagaacatttctatcctatcctaccaaatatttatccttctctgtcctctattctcttactctcctctctccctttttccttccctttattcccttgaaaaaagagaatctgtgggaaataggcagatatagctttttaaaatataaagtacttgggattttgcattatttttcttaatatctatttactaagtatgtaatttaatatacattaattattttttgaaactcttgttagtgggaagaatatggtaaattttttgttaaataaaatagacccttatgtttagcattttgtttttagagaactattctggtactatcagaacaaatacataaaataacttcccatagagaacaggatatagcaataatagctccttagatactcagtggcttctgactccaatcaaggtcttgttgatattatatagtaaaaataaaaccaaaaataaatattattcaagtggctcttctaagcatgtgaatcatgaagcactgaaatatgtattttaatgatgatcttatttattcccatttttgcccttagttaacatttactggtgctcacctaggattggctattctgagggattgcatagaaaccaagctccacttgctgtccttgggaaggttataactgaatgcagctctttatttggactaaagtgtcaggatatgcattagattctctcctgaaccaaaaacacaacagtcattatctgtgaaccataatttaaaaatctttctagaataacaacagcagactccactcttgtttgtctaaaagagccctactgggtatggatcattctgatgacagatttatacaaaatgattcaaaccagtaacttagtaaaattgaccttcgcaaaacctcactgggggagtgccttgtagagctgtgggtgggactgcacattcttttcctcttagtaaaagataggcccactttattccaagaataacacttagcacataaactcttcttccagctcgttagcagcattagcaccttctgaattccaccctctcagaagaatccacagtgtttgaacaatttgcataaaggtcagctagcatcctgctgccaagccactgcatagcatttgtgataagaaggaccaactctaggctcaatatgaagggatttagttctgtaagcagcaaaaaagcttctttatcaagtcatcttacctctaattcttttccagtgtgccaactccaaagtcaacattaaaaatgtaaatggacctgtgtaaatatcacagagagcttttccttatacatctcaatgctgagagttaaaatattcccaggttaaaatttttttaaagtaccaataatagagctaaatacaatgacatttgcttttaaaaggtggatattttatttctgctttttgaaaatacttatttagtattgacttggaagccaatttggtcctttaataagtaaagaaaataatatgtttaaaaatgtaaatgttttacaaatttgaaactttcataattgtattaatcagaaaacaagcacattgccattctttgaaactcatgtttctagacatgacagcagtaataaaaggatgaaaacaagtgtcttcactaagcgtatggccaataaatgggacccaaacgttcaatctgttcagtttaccaaggttcagaaatacgtaatttagcaggaaactataaataccagtgctatcacagccacacatacacacacacagacataaaataaccaaacatctcatttctaggaaagagataacactaaaggcatcataggtttaactgaaatacgttatatgaagttttacaaaaaggtcaacagaaagctcatttgtgaaaacatactctcatgggagcttctttaacattagttcagaggttaatatatttcctggaggtgttttcctagaattgattgcactattgcatggtaataacatttaattgttaaggaaacattatatataggttcaaattatcccttaatgttgatttctccccttttccatggattttgatactaagaaacaaaatgctttgagattttggtaactattttgattttgataaaacatgttaaaatagaaggacatgatatttttctatagtttccatcaggaagagtacatcagaaacttctccataaggaaagaaaactgactctctcttgaactagtgttgacaaaatacactaatgtctttcttaattttattttattaggagaaaaatcagaatattaaatttgcaaacttttgaacagcagtaatagctccttagacactcagtatctttcttccctatctttcaagcacatttaatttctttcccctggtatttgtttgctttgtgttttttcaatattttgtttgctaaagaacaataacaacaacaaagctggtccagccctgacacctacttttgctttttttctttctttcttttaatttgttgaactataggtttctttctgagatgtatttttcattcttccaataatgctctctttttcatttcaaaaccattaccactttcaatatgtaattaacatcctcattcatcagaaagctggtaagtccacacagcatttgtgcagtatcccttctgtgtaaaatgttaaggctttcagatgaaagaaaaaagaacttcctgcaaaagatcaaaagcatcatactaaataaaatgatgacaatatgtgccttgatttttctctcaatggaggttcaacattgacatttaagatgtaaaaaaaattactttgatggtttaattaagaataataagtcaaatatcacatgtatgtagttcttttggatgaccgaataccttaaaatgaactaaataactgaaataaagtgttaaaatgttaacagcgttgaagtttttaaaattataattatcaaatgcacaatgttcttttactatgccaaatgttgcctacactgattacatgattgtcacagtttaagtgaatttctactatggatctttattttccccaatgtttggatcatcctctcagataagaattgtcagtattgcacctcaagaaagaagaaaaaataagaatgtaaatttttaaaagctagcattaaaagtaaagagcagtacaataaaaatcacttaaaatagagaaaggcaactactgagtaagaagaaaagataatttctgtaaaagctaaatttatgcacattacaaaaagtagtcaagtcagtcttccattgtgacttcaggaattcaaatgcaagttgttggcaaaatatatatatacacacacacacacatacacacacatatatgtacatacatatatatatagagagagagagatagattttttttttttgagacagagtttcgctcttgttgcccaggctggagtgcaatggaatgatcttggctcaccgcaacctccgcctccagggttcaagtgattctcctgcctcaacctcctgagtagctggaattacaggtgcccactaccatgcctggctagtttttgtatttttagtagagacagggtttctccatgttggtcaggctgatctcgaactcccaacctcagatgatcctcccgcctccacctcccaaagtactggaattacaatggcgtgagccaccacaagatatttttaaagcccatttgtctataaaagaaaactcttggacaaggagctttgtgttttataattgtattacgtgcctgcttccttaccaagtgccctccataacactaagtaaatttatatttatctagcctctgagtgacatatctgtgtgtaatggaattatttgcagaatttaatagccttttttattttcgcatgagaatttttcaaaaactatcagggtctagttttatcatacatttactaagttactacatattggtggatattgacgtttattcctgggaatctaattttgcaaacaatttggagccattcagtcataaattcatgtcaacaataagtcttgctgccgcttgtgtttcataactacgcttgctttccttcaaaatataccaagtgtgtaatataaataaagcccatatcaatataaaaaaaaaaaaaaaaaaa

SEQ ID NO: 2436 - DNA, 10796 bp, Homo sapiens; identical to SEQ ID NO: 812

SEQ ID NO: 2437 - DNA, 768 bp, Homo sapiens
acactctgctggtataaaagcaggtgaggacttcattaactgcagttactgagaactcataagacgaagctaaaatccctcttcggatccacagtcaaccgccctgaacacatcctgcaaaaagcccagagaaaggagcgccatggattactacagaaaatatgcagctatctttctggtcacattgtcggtgtttctgcatgttctccattccgctcctgatgtgcaggattgcccagaatgcacgctacaggaaaacccattcttctcccagccgggtgccccaatacttcagtgcatgggctgctgcttctctagagcatatcccactccactaaggtccaagaagacgatgttggtccaaaagaacgtcacctcagagtccacttgctgtgtagctaaatcatataacagggtcacagtaatggggggtttcaaagtggagaaccacacggcgtgccactgcagtacttgttattatcacaaatcttaaatgttttaccaagtgctgtcttgatgactgctgattttctggaatggaaaattaagttgtttagtgtttatggctttgtgagataaaactctccttttccttaccataccactttgacacgcttcaaggatatactgcagctttactgccttcctccttatcctacagtacaatcagcagtctagttcttttcatttggaatgaatacagcatttagcttgttccactgcaaataaagccttttaaatcatcattcaaaaaaaaaaaaaaaaaaa

SEQ ID NO: 2438 - DNA, 3350 bp, Homo sapiens; identical to SEQ ID NO: 1574

SEQ ID NO: 2439 - DNA, 6276 bp, Homo sapiens
attaaattaacaccatttgaaagagaacattgttttcatcatgaatgctaataaagatgaaagacttaaagccagaagccaagattttcacctttttcctgctttgatgatgctaagcatgaccatgttgtttcttccagtcactggcactttgaagcaaaatattccaagactcaagctaacctacaaagacttgctgctttcaaatagctgtattccctttttgggttcatcagaaggactggattttcaaactcttctcttagatgaggaaagaggcaggctgctcttgggagccaaagaccacatctttctactcagtctggttgacttaaacaaaaattttaagaagatttattggcctgctgcaaaggaacgggtggaattatgtaaattagctgggaaagatgccaatacagaatgtgcaaatttcatcagagtacttcagccctataacaaaactcacatatatgtgtgtggaactggagcatttcatccaatatgtgggtatattgatcttggagtctacaaggaggatattatattcaaactagacacacataatttggagtctggcagactgaaatgtcctttcgatcctcagcagccttttgcttcagtaatgacagatgagtacctctactctggaacagcttctgatttccttggcaaagatactgcattcactcgatcccttgggcctactcatgaccaccactacatcagaactgacatttcagagcactactggctcaatggagcaaaatttattggaactttcttcataccagacacctacaatccagatgatgataaaatatatttcttctttcgtgaatcatctcaagaaggcagtacctccgataaaaccatcctttctcgagttggaagagtttgtaagaatgatgtaggaggacaacgcagcctgataaacaagtggacgacttttcttaaggccagactgatttgctcaattcctggaagtgatggggcagatacttactttgatgagcttcaagatatttatttactccccacaagagatgaaagaaatcctgtagtatatggagtctttactacaaccagctccatcttcaaaggctctgctgtttgtgtgtatagcatggctgacatcagagcagtttttaatggtccatatgctcataaggaaagtgcagaccatcgttgggtgcagtatgatgggagaattccttatccacggcctggtacatgtccaagcaaaacctatgacccactgattaagtccacccgagattttccagatgatgtcatcagtttcataaagcggcactctgtgatgtataagtccgtatacccagttgcaggaggaccaacgttcaagagaatcaatgtggattacagactgacacagatagtggtggatcatgtcattgcagaagatggccagtacgatgtaatgtttcttggaacagacattggaactgtcctcaaagttgtcagcatttcaaaggaaaagtggaatatggaagaggtagtgctggaggagttgcagatattcaagcactcatcaatcatcttgaacatggaattgtctctgaagcagcaacaattgtacattggttcccgagatggattggttcagctctccttgcacagatgcgacacttatgggaaagcttgcgcagactgttgtcttgccagagacccctactgtgcctgggatggaaatgcatgctctcgatatgctcctacttctaaaaggagagctagacgccaagatgtaaaatatggcgacccaatcacccagtgctgggacatcgaagacagcattagtcatgaaactgctgatgaaaaggtgatttttggcattgaatttaactcaacctttctggaatgtatacctaaatcccaacaagcaactattaaatggtatatccagaggtcaggggatgagcatcgagaggagttgaagcccgatgaaagaatcatcaaaacggaatatgggctactgattcgaagtttgcagaagaaggattctgggatgtattactgcaaagcccaggagcacactttcatccacaccatagtgaagctgactttgaatgtcattgagaatgaacagatggaaaatacccagagggcagagcatgaggaggggaaggtcaaggatctattggctgagtcacggttgagatacaaagactacatccaaatccttagcagcccaaacttcagcctcgaccagtactgcgaacagatgtggcacagggagaagcggagacagagaaacaaggggggcccaaagtggaagcacatgcaggaaatgaagaagaaacgaaatcgaagacatcacagagacctggatgagctccctagagctgtagccacgtagttttctacttaatttaaagaaaagaattccttacctataaaaacattgccttctgttttgtatatcccttatagtaattcataaatgcttcccatggagttttgctaaggcacaagacaataatctgaataagacaatatgtgatgaatataagaaagggcaaaaaattcatttgaaccagttttccaagaacaaatcttgcacaagcaaagtataagaattatcctaaaaatagggggtttacagttgtaaatgttttatgttttgagttttggaatttattgtcatgtaaatagttgagctaagcaagccccgaatttgatagtgtataaggtgctttattccctcgaatgtccattaagcatggaatttaccatgcagttgtgctatgttcttatgaacagatatatcattcctattgagaaccagctaccttgtggtagggaataagaggtcagacacaaattaagacaactcccattatcaacaggaactttctcagtgagccattcactcctggagaatggtataggaatttggagaggtgcattatttctttctggccactggggttaaatttagtgtactacaacattgatttactgaagggcactaatgtttcccccaggatttctattgactagtcaggagtaacaggttcacagagagaagttggtgcttagttatgtgttttttagagtatatactaagctctacagggacagaatgcttaataaatactttaataagatatgggaaaatattttaataaaacaaggaaaacataatgatgtataatgcatcctgatgggaaggcatgcagatgggatttgttagaagacagaaggaaagacagccataaattctggctttggggaaaactcatatccccatgaaaaggaagaacaatcacaaataaagtgagagtaatgtaatggagctcttttcactagggtataagtagctgccaatttgtaattcatctgttaaaaaaaatctagattataacaaactgctagcaaaatctgaggaaacataaattcttctgaagaatcataggaagagtagacattttatttataaccaatgatatttcagtatatattttctctcttttaaaaaatatttatcatactctgtatattatttctttttactgcctttattctctcctgtatattggattttgtgattatatttgagtgaataggagaaaacaatatataacacacagagaattaagaaaatgacatttctggggagtggggatatatatttgttgaataacagaacgagtgtaaaattttaacaacggaaagggttaaattaactctttgacatcttcactcaaccttttctcattgctgagttaatctgttgtaattgtagtattgtttttgtaatttaacaataaataagcctgctacatgtaaaaagaaccaaactcacaatattaacataaacatctttcatattttgttagtactttcaaatgttttcaatttgactttccctctgaatatgcatggtgtgtttcctgtctgtttaagcagaactcacctttccttcttgtaacacagaacccttagccttcttctgttttgccttttcacgccctttatagtgtgaaatgaaaaattagtcacttcctcacatggaaggcagcttttcagaaaataacagacattgctcgtttctcatgcattctacatatcttgaaagaaaagtctgtgagaaaaccctgtgattagagggcaacttaatgcaagatctgtggctctatgttgagagcattctctctctgttatttttattttatttgcattgcttacctatctcaaagtagtcaaactgatatatgagattgagtactcccttttgatattatactgatgaatatttgtaggtgtttcactataaggaacagctaaggaataattttaataaaagtgaaccagaacaaatcactcatttaaaaagtaattcagaagaacagtgtggcatgatcagacttctaattgaatagcgtaacaacagtgtttgtaattatagatttgcttggacaaaatattccaggaactcatagcgagctcaaagcaattaagtgggaacatttttaatttaaaaaaaatttccaaatatttgtgggtccgacagtaatgatcaaaatatgaatgactttggaaaatttacatgaagctcaagtgttaggattgacttatgaaaataaattttatttctatccaaatttgaatgtccaaaccattttttagttacttctttctaatcctagttattcagacaaaatttggaaacttattttatgaccacatctaatattctggctgctttggatacaatactcttgatttatgataattagttaaaatatattaaaaatattattagtaaaataaaatttcacacaataaaaaacaacatagagtacacatatttatatgtatttttaaagataaagaatatctaaaatgtgtttttttcttagctttttagttgtctagaacatttagagaaagagtatgaatatattaaatccacaaacacactatatacttcctcaccactgactattttatcaaatttgccttaaaataatgaaaaagaaaagtatagttaatggtttcaaatatgctaagaaattgactctgcggaggggatcttaaaatgcctgtttactcatgttttcgtatttttcttgtctctaatacttttgtctttgtctgccttgtgtgttcttttctgaatttcatttcagcaatttatgctgctaaatagaatcccgcatgtctgcattcatttacattcaacttattgtaaattttgagattttatttagaaatgaattgtctaattaatttatgtagagtccttttttccaaagagctcaaaacactacatccacattattgacttttggaaaccaaccaaattacttaagaaatggaaaagtagtcacagagaaatttagtaatttgcaaaagccacaacagtagtggaagaattaaaattcataaagtctcatcattctgttggctaaaataatgctctttacaatatgctggctacaaaatggtcttactcttgaattttgcttttggttcatattttggttcttcatattctagtatgttttgttcctgctgaattttacagactcagctaaacaataagttattagtagtcacttgttttcattatcataattgaatttccaagaacaacttgatatcattcagctgtccaaaaaataataagagcattcattaaatactgattttcttaaacttaaatgttgtatttcatatttatttatataatacaaatggaaatcaaaactgaaatagcctccctttagaatgtcacatttttcttagaaaacattttggaattggttaaccttattgggaatggataatttagaaacaaaccaaaaaaaaaaaaagatatttgaagtgtttttataggagatgtatttttatcatagtaaatgatcacaattttaaataattcatcttacaagtcaggtaaaataaaatcgattcccagattccatacattaggagtgcaaagacaggatcatacacatgacttatacctctcatttaaatattttatagtataaagtatttatggaaagggtttgagatagatgatttttgggaaagggcaaaatgtgtcagatgccctagttaatcatgtaatttaattctggtattgtgagtggttagcaatcaattttgaatttataattctgctattttaaaagaaatgtagtcttgtagtatgaaataattaaaaattgttaaatgtatattttggttgtattataataaaatgcaaacatgactgttctatgattataaaaaaaaaaaaaaaaaaaa

SEQ ID NO: 2440 - DNA, 2661 bp, Homo sapiens
atggagcctgcaggggagcgctttcccgaacaaaggcaagtcctgattctccttcttttactggaagtgactctggcaggctgggaaccccgtcgctattctgtgatggaggaaacagagagaggttcttttgtagccaacctggccaatgacctagggctgggagtgggggagctagccgagcggggagcccgggtagtttctgaggataacgaacaaggcttgcagcttgatctgcagaccgggcagttgatattaaatgagaagctggaccgggagaagctgtgtggccctactgagccctgtataatgcatttccaagtgttactgaaaaaacctttggaagtatttcgagctgaactactagtgacagacataaacgatcattctcctgagtttcctgaaagagaaatgaccctgaaaatcccagaaactagctcccttgggactgtgtttcctctgaaaaaagctcgggacttggacgtgggcagcaataatgttcaaaactacaatatttctcccaattctcatttccatgtttccactcgcacccgaggggatggcaggaaatacccagagctggtgctggacacagaactggatcgcgaggagcaggccgagctcagattaaccttgacagcggtggacggtggctctccaccccgatctggcaccgtccagatcctcatcttggtcttggacgccaatgacaatgccccggagtttgtgcaggcgctctacgaggtgcaggtcccagagaacagcccagtaggctccctagttgtcaaggtctctgctagggatttagacactgggacaaatggagagatatcatactccctttattacagctctcaggagatagacaaaccttttgagctaagcagcctttcaggagaaattcgactaattaaaaaactagattttgagacaatgtcttcgtatgatctagatatagaggcatctgatggcgggggactttctggaaaatgctctgtctctgttaaggtgctggatgttaacgataacttcccggaactaagtatttcatcacttaccagccctattcccgagaattctccagagacagaagtggccctgtttaggattagagaccgagactctggggaaaatggaaaaatgatttgctcaattcaggatgatgttccttttaagctaaaaccttctgttgagaatttctacaggctggtaacagaaggggcgctggacagagagaccagagccgagtacaacatcaccatcaccatcacagacttggggactccaaggctgaaaaccgagcagagcataaccgtgctggtgtcggacgtcaatgacaacgcccccgccttcacccaaacctcctacaccctgttcgtccgcgagaacaacagccccgccctgcacatcggcagtgtcagcgccacagacagagactcgggcaccaacgcccaggtcacctactcgctgctgccgccccgggacccgcacctgcccctcacctccctggtctccattaacacggacaacggccacctgttcgctctccagtcgctggactacgaggccctgcaggctttcgagttccgcgtgggcgccacagaccgcggcttcccggcgctgagcagcgaggcgctggtgcgagtgctggtgctggacgccaacgacaactcgcccttcgtgctgtacccgctgcagaacggctccgcgccctgcaccgagctggtgccccgggcggccgagccgggctacctggtgaccaaggtggtggcggtggacggcgactcgggccagaacgcctggctgtcgtaccagctgctcaaggccacggagcccgggctgttcggcgtgtgggcgcacaatggcgaggtgcgcaccgccaggctgctgagcgagcgcgacgtggccaagcacaggctagtggtgctggtcaaggacaatggcgagcctccgcgctcggccaccgccacgctgcaagtgctcctggtggacggcttctctcagccctacctgccgctcccagaggcggccccggcccaagcccaggccgactcgcttaccgtctacctggtggtggcattggcctcggtgtcttcgctcttcctcttctcggtgttcctgttcgtggcagtgcggctgtgcaggaggagcagggcggcctcagtgggtcgctgctcggtgcccgagggcccctttccagggcatctggtggacgtgagcggcaccgggaccctttcccagagctaccagtacgaggtgtgtctgacgggaggctctgaaagtaatgatttcaagttcttgaagcctatattcccaaatattgtaagccaggactctaggaggaaatcagaatttctagaataatgtaggtatctgtagctttccgaccgtctgttaattttgtcttcctcacttttcaccttagttttttttaaccctttagtaatcttgaattctacttttttttaaatttctactgttgtctttagtaatgttactcatttcctttgtctgattgttagttttcaaattattgtattattataaatattttatatcaggaaagttcatatttctgaataaattaatagtattcattcctgaagggtgatatgaaagttaaccccacctaataaacataactctaattctgaaaaaaaa

SEQ ID NO: 2441 - DNA, 4815 bp, Homo sapiens; identical to SEQ ID NO: 218

SEQ ID NO: 2442 - DNA, 1996 bp, Homo sapiens
ggaagttgggctttgagaattccatcccactggcactgaggagaatatttctccgtcttgcttacccatctcccagttttttggaattttctctagctgttactccagaggattatgtttctttcaaagccttctgtgtacatctgtcttttcacctgtgtcctccaactcagccacagctggtcggtgaacaatttcctgatgactggtccaaaggcttacctgatttactccagcagtgtggcagctggtgcccagagtggtattgaagaatgcaagtatcagtttgcctgggaccgctggaactgccctgagagagccctgcagctgtccagccatggtgggcttcgcagtgccaatcgggagacagcatttgtgcatgccatcagttctgctggagtcatgtacaccctgactagaaactgcagccttggagattttgataactgtggctgtgatgactcccgcaacgggcaactggggggacaaggctggctgtggggaggctgcagtgacaatgtgggcttcggagaggcgatttccaagcagtttgtcgatgccctggaaacaggacaggatgcacgggcagccatgaacctgcacaacaacgaggctggccgcaaggcggtgaagggcaccatgaaacgcacgtgcaagtgccacggcgtgtctggcagctgcaccacgcagacctgttggctgcagctgcccgagttccgcgaggtgggcgcgcacctgaaggagaagtaccacgcagcactcaaggtggacctgctgcagggtgctggcaacagcgcggccggccgcggcgccatcgccgacacctttcgctccatctctacccgggagctggtgcacctggaggactccccggactactgcctggagaacaaaacgctagggctgctgggcaccgaaggccgagagtgcctaaggcgcgggcgggccctgggtcgctgggaacgccgcagctgccgccggctctgcggggactgcgggctggcggtggaggagcgccgggccgagaccgtgtccagctgcaactgcaagttccactggtgctgcgcagtccgctgcgagcagtgccgccggagggtcaccaagtacttctgtagccgcgcagagcggccgcgggggggcgctgcgcacaaacccgggagaaaaccctaagggtttcctctgccccctccttttcccactggttcttggcttcctttagagaccccggtaattgtggaacctagggaatggggaacccgctctcccagacctagggatcctgagagggagagactgcaatttctccaaagcttgccactttccagcctgtttccccaattcctctgtgctctcctagagctctgtctgaatcctcgcagccacacctaggtctgagaactcaggctttgagttactgatcttccttggattaggagaacaggtgttcctcctcccctctcctagcagccctaatgtctgacctagcctatcaagccttaggcgctggaagaacccttctcagacacgcaggacccaggtaaagtcaaagctttgcccttttgcccactgtctgctaccagggctcacccactgctgcacctctcttctgcacagctcctcccctgctacctgctgagccagattccccaggaatcttgaatgctttctctcctcttctccctttcctttcccagaaaaactgaggaaactggccccggaaaagcatgtctttggggttggttcctagaggcagaggttgaagatggaagagggagctctggagtgctaacttgaacaccaagggtgctactcatccctatggtatcatatcatgaatggactttactagtggggcaatgactttcctagacaataacccgagggactccagatacataccccgaaggtctaggaaatacgttaagggcagattacagtcatttcctaccctttaaaggtaacttctcccttctcctgacctacttcctcctagcaa

SEQ ID NO: 2443 - DNA, 2627 bp, Homo sapiens
ggacttcaggcctttttgtgtcctgtttgctaaaggcatgcgggctacagcattcaagagagggagtcgttaacaaagggaaagagataaatgtaaataagctcacatttacagaatgagcggtttgcagtaaaaagctgcggcagcccagagtctgctactttaggctgggctaacctttccctgtaaaaaaaaaaaaaaaaaaaaaaaaaaaaaaatggataaaaatatgcacttccaaagggcgagttgcccatttacatgtttattagctaattatctacaggcatcagcacattctctcatctagcacactctttcttggggaggaaaatatttcctaccggtccatagtgtcagagtggtgaacccctgcagccagcaggcctcctgaaaaaaaagtccatgggtgacagaagattcattgacttccaattccaagattcaaattcaagcctcagacccaggttgggcaatgctactgccaataatacttgcattgttgatgattccttcaagtataatctcaatggtgctgtctacagtgttgtattcatcttgggtctgataaccaacagtgtctctctgtttgtcttctgtttccgcatgaaaatgagaagtgagactgctatttttatcaccaatctagctgtctctgatttgctttttgtctgtacactaccttttaaaatattttacaacttcaaccgccactggccttttggtgacaccctctgcaagatctctggaactgcattccttaccaacatctatgggagcatgctctttctcacctgtattagtgtggatcgtttcctggccattgtctatccttttcgatctcgtactattaggactaggaggaattctgccattgtgtgtgctggtgtctggatcctagtcctcagtggcggtatttcagcctctttgttttccaccactaatgtcaacaatgcaaccaccacctgctttgaaggcttctccaaacgtgtctggaagacttatttatccaagatcacaatatttattgaagttgttgggtttatcattcctctaatattgaatgtctcttgctcttctgtggtgctgagaactcttcgcaagcctgctactctgtctcaaattgggaccaataagaaaaaagtactgaaaatgatcacagtacatatggcagtctttgtggtatgctttgtaccctacaactctgtcctcttcttgtatgccctggtgcgctcccaagctattactaattgctttttggaaagatttgcaaagatcatgtacccaatcaccttgtgccttgcaactctgaactgttgttttgaccctttcatctattacttcacccttgaatcctttcagaagtccttctacatcaatgcccacatcagaatggagtccctgtttaagactgaaacacctttgaccacaaagccttcccttccagctattcaagaggaagtgagtgatcaaacaacaaataatggtggtgaattaatgctagaatccaccttttaggtatgagaaatgtgttcaggtccagatatggtttctcctataatttttcctatgctataaactaaagatttgaagctaatgatactgagaataatgcaccaaatccagtcagatacatttgtttgaaggtatactgtagagtttttattgctgttttgttcagtaattataggtcaaatctaattacaacaaccaagatggattgccaaactcttctgcttggttggaatttcattgtatcgcattatccaggtggctagtggcatttgataatatagagatgactttgaaactttcaaaaaggtatttctattccaatgatatttggtaattaggttgggcctataaatatagaacaaattcagggatttttaaaaaattgtgttactactgatatatgctagttttattttatttttttgaactgtcattgagtttattttagcacaagaatatttttagcctaacattattaataagaaatgtgtcaaatttttaacattggtaaaatatgttatgtgcattttgaaaacagaaaacaaattgcgttggcatgtacgtgggtgggaagaaaaagaaaattaacaggatttacacaattataatcaccagcagtgtgagtttaaaaaacttcgttgtttttacaccaaattaaaattttcatgtcaaacttcaaagccagaaagctgctaaatacgtgtctggcaggtaaaagctggaaaattacttaaaacaggaaagtgtcaataaaaaaacttgagcaacaccaacatattttttcttaaaatgtcacgttatcttcattttgggaaactaggttctataaaatatttatcctccctgttatactttggagcacagcacagccagaaaggggctgcatttgtgcccaggtcaggagcaaattgaaaaaaaaaataaagtaatacaaaaaaatcaaactataaagcaaaaacatttattaaaacctgaattaatcctttttggagggaggagtagagatatataacctgaaaatacttattctttcttatcgaattttggagcctaatatagccaggagctgctgaatttgtgcccctggattggaagcaaataaaaaaaaaaaa

SEQ ID NO: 2444 - DNA, 3638 bp, Homo sapiens
gaaactattgttcctgtttcacacagaagaaaactgaggttggcactcatcatgagcccctgttctcattctgcaaatggtgaagctctctattgtcctgaccccacagttcctgtcccatgaccagggccagctcaccaaggagctgcagcagcatgtaaagtcagtgacatgcccatgcgagtacctgaggaaggttatcaatactctggctgaccatcatcatcgtgggactgactttggtggaagtccttggttacatgtcattattgcgtttccgacaagttataaagttgtcattaccctctggatagtttacctttgggtgtctctcctgaagactatcttctggtctcgaaatggacatgatggatccacggatgtacagcagagagcctggaggtccaaccgccgtagacaggaagggctgaggtccatttgtatgcacacaaagaaaagagtttcttcctttcgaggaaataaaattggcctgaaagacgtcattactctacggagacatgtggaaacaaaagttagagctaaaatccgtaagaggaaggtgacaacgaaaatcaaccatcatgacaaaatcaatggaaagaggaagaccgccagaaaacagaaaatgtttcaacgtgcgcaagagttgcggcggcgagcagaggactaccacaaatgcaaaatccccccttctgcaagaaaggctctttgcaactgggtcagaatggcggcagcggagcatcgtcattcttcaggattgccctactggccctacctcacagctgaaactttaaaaaacaggatgggccaccagccacctcctccaactcaacaacattctataactgataactccctgagcctcaagacacctcccgagtgtctgctcactccccttccaccctcagcggatgataatctcaagacacctcccgagtgtgtgctcactccccttccaccctcagcggatgataatctcaagacacctcccgagtgtgtgctcactccccttccaccctcagcggatgataatctcaagacacctcctgagtgtctgctcactccccttccaccctcagcggatgataatctcaagacacctcccgagtgtctactcactccccttccaccctcagctctaccctcagctccaccctcagcggatgataatctcaagacacgtgccgagtgtctgctccatccccttccaccctcagcggatgataatctcaagacaccttccgagcgtcagctcactccccttccaccctcagctccaccctcagcagatgataatatcaagacacctgccgagcgtctgcgggggccgcttccaccctcagcggatgataatctcaagacaccttccgagcgtcagctcactccccttccaccctcagctccaccctcagcagatgataatatcaagacacctgccgagcgtctgcgggggccgcttccaccctcagcggatgataatctcaagacaccttccgagcgtcagctcactccccttccaccctcagctccaccctcagcagatgataatatcaagacacctgccgagcgtctgcgggggccgcttccaccctcagcggatgataatctcaagacaccttccgagcgtcagctcactgcccttccaccctcagcagatgataatatcaatacacctgccgagcgtctgcgggggccgcttccaccctcagcggatgataatctcaagacaccttccgagcgtcagctcactccccttccaccctcagctccaccctcagcagatgataatatcaagacacctgccgagcgtctgcgggggccgcttccaccctcagcggatgataatctcaagacaccttccgagcgtcagctcactccccttccaccctcagctccaccctcagcagatgataatatcaagacacctgccttccaccctcagcggatgatctcaagacaccttccgagcgtcagctcactccccttccaccctcagctccaccctcagcagatgataatatcaagatacctgctgagcgtctgcggattccgcttccaccatcagccgatgataatctcaagacaccttccgagcgtcagctcactccccttccaccctcagctccaccctcagcagatgataatatcaagacacctgccgagcgtctgcgggggccgcttccaccctgagcggatgataatctcaagacaccttccgagcgtcagctcactccccttccaccctcagctccaccctcagcagatgataatatcaagacacctgccgagcgtctgcgggggccgcttccaccctcagcggatgataatctcaagacaccttccgagcgtcagctcactccccttccaccctcagctccaccctcagcagatgataatatcaagacacctgccgagcgtctgcgggggccgcttccaccctcagcagatgataatctcaagacaccttccgagcgtcagctcactccccttccaccctcagctccaccctcagcagatgataatatcaagacacctgccgagcgtctgcgggggccgcttccaccctcagcggatgataatctcaagacaccttccgagcgtcagctcactccctttccaccctcagctccaccctcagcagatgataatatcaagacacctgccgagcgtctgcggggagcgtctgcgggggccgcttccaccctcagcggatgataatctcaagacaccttccgagcgtcagctcactccccttccaccctcagctccaccctcagcagatgataatatcaagacacctgccgagcgtctgcgggggccgcttccaccctcagcggatgataatctcaagacaccttccgagcgtcagctcactccccttccaccctcagctccaccctcagcagatgataatatcaagacacctgctgagcgtctgcgggggccgcttccaccctcagcggatgataatctcaagacaccttccgagcgtcagctcactccccttccaccctcagctccaccctcagcagatgataatatcaagacacctgccgagcgtctgcgggggccgcttccaccctcagccgatgataatctcaagacacctcccttagctactcaggaggctgaggcagaaaaaccacgcaaacccaagaggcagagggcggctgagatggaaccacctcccgaacccaagaggcggagggtcggtgacgtggaaccgtcacgcaaacccaagaggcggagggccgctgacgtggaaccatcatcacccgaacccaagaggcggagggtcggtgatgtggaaccgtcacgcaaacccaagaggcggagggccgctgacgtggaaccatcatcacccgaacccaagaggcggagggtcggtgacgtggaaccgtcacgcaaacccaagaggcggagggccgctgacgtggaaccatcattacccgaacccaagaggcggaggttgagctgagaagaggccagtgcactcaagcctgagcaataagaataaaaccgagtagaacaaaataaaaaattcaaaaaacaaaacaaaacccacactccaaaaactaacaaagaataaataaataatataaaaataaaataaatactgcagtccttaaaaaaaaaaa

SEQ ID NO: 2445 - DNA, 3557 bp, Homo sapiens; identical to SEQ ID NO: 2169

SEQ ID NO: 2446 - DNA, 1558 bp, Homo sapiens
gagtgcaaagcgctctccctccctcgcccagccttcgtcctcctggcccgctcctctcatccctcccattctccatttcccttccgttccctccctgtcagggcgtaattgagtcaaaggcaggatcaggttccccgccttccagtccaaaaatcccgccaagagagccccagagcagaggaaaatccaaagtggagagaggggaagaaagagaccagtgagtcatccgtccagaaggcggggagagcagcagcggcccaagcaggagctgcagcgagccgggtacctggactcagcggtagcaacctcgccccttgcaacaaaggcagactgagcgccagagaggacgtttccaactcaaaaatgcaggctcaacagtaccagcagcagcgtcgaaaatttgcagctgccttcttggcattcattttcatactggcagctgtggatactgctgaagcagggaagaaagagaaaccagaaaaaaaagtgaagaagtctgactgtggagaatggcagtggagtgtgtgtgtgcccaccagtggagactgtgggctgggcacacgggagggcactcggactggagctgagtgcaagcaaaccatgaagacccagagatgtaagatcccctgcaactggaagaagcaatttggcgcggagtgcaaataccagttccaggcctggggagaatgtgacctgaacacagccctgaagaccagaactggaagtctgaagcgagccctgcacaatgccgaatgccagaagactgtcaccatctccaagccctgtggcaaactgaccaagcccaaacctcaagcagaatctaagaagaagaaaaaggaaggcaagaaacaggagaagatgctggattaaaagatgtcacctgtggaacataaaaaggacatcagcaaacaggatcagttaactattgcatttatatgtaccgtaggctttgtattcaaaaattatctatagctaagtacacaataagcaaaaacaaaaagaaaagaaaatttttgtagtagcgttttttaaatgtatactatagtaccagtaggggcttataataaaggactgtaatcttatttaggaagttgacttatagtacatgataaatgatagacaattgaggtaagttttttgaaattatgtgacattttacattaaattttttttacattttttgggcagcaatttaaatgttatgactatgtaaactacttctcttgttaggtaatttttttcacctagatttttttcccaattgagaaaaatatatactaaacaaaatagcaataaaacataatcactctatttgaagaaaatatcttgttttctgccaatagattttttaaaatgtagtcagcaaaatgggggtggggaagcagagcatgtcctagttcaatgttgactttttttttttttaaagaaaagcattaagacataaaattctttcactttggcagaagcatttgttttcttgatgaaattatttttccatctgaggaaaaaaatactaggaaaataaatcaaggtgatgctgaaaaaaaaaaaaaaaaaa

SEQ ID NO: 2447 - DNA, 5051 bp, Homo sapiens
ggatgaaaggtcatcctttacggagaacatcagaatggtagataattcctgttccactttctttgatgaaacaagtaaagaagaaacaacacaatcatattaatagaagagtcttcgttccagacgcagtccaggaatcatgctggagaagttctgcaactctactttttggaattcctcattcctggacagtccggaggcagacctgccactttgttttgagcaaactgttctggtgtggattcccttgggcttcctatggctcctggccccctggcagcttctccacgtgtataaatccaggaccaagagatcctctaccaccaaactctatcttgctaagcaggtattcgttggttttcttcttattctagcagccatagagctggcccttgtactcacagaagactctggacaagccacagtccctgctgttcgatataccaatccaagcctctacctaggcacatggctcctggttttgctgatccaatacagcagacaatggtgtgtacagaaaaactcctggttcctgtccctattctggattctctcgatactctgtggcactttccaatttcagactctgatccggacactcttacagggtgacaattctaatctagcctactcctgcctgttcttcatctcctacggattccagatcctgatcctgatcttttcagcattttcagaaaataatgagtcatcaaataatccatcatccatagcttcattcctgagtagcattacctacagctggtatgacagcatcattctgaaaggctacaagcgtcctctgacactcgaggatgtctgggaagttgatgaagagatgaaaaccaagacattagtgagcaagtttgaaacgcacatgaagagagagctgcagaaagccaggcgggcactccagagacggcaggagaagagctcccagcagaactctggagccaggctgcctggcttgaacaagaatcagagtcaaagccaagatgcccttgtcctggaagatgttgaaaagaaaaaaaagaagtctgggaccaaaaaagatgttccaaaatcctggttgatgaaggctctgttcaaaactttctacatggtgctcctgaaatcattcctactgaagctagtgaatgacatcttcacgtttgtgagtcctcagctgctgaaattgctgatctcctttgcaagtgaccgtgacacatatttgtggattggatatctctgtgcaatcctcttattcactgcggctctcattcagtctttctgccttcagtgttatttccaactgtgcttcaagctgggtgtaaaagtacggacagctatcatggcttctgtatataagaaggcattgaccctatccaacttggccaggaaggagtacaccgttggagaaacagtgaacctgatgtctgtggatgcccagaagctcatggatgtgaccaacttcatgcacatgctgtggtcaagtgttctacagattgtcttatctatcttcttcctatggagagagttgggaccctcagtcttagcaggtgttggggtgatggtgcttgtaatcccaattaatgcgatactgtccaccaagagtaagaccattcaggtcaaaaatatgaagaataaagacaaacgtttaaagatcatgaatgagattcttagtggaatcaagatcctgaaatattttgcctgggaaccttcattcagagaccaagtacaaaacctccggaagaaagagctcaagaacctgctggcctttagtcaactacagtgtgtagtaatattcgtcttccagttaactccagtcctggtatctgtggtcacattttctgtttatgtcctggtggatagcaacaatattttggatgcacaaaaggccttcacctccattaccctcttcaatatcctgcgctttcccctgagcatgcttcccatgatgatctcctccatgctccaggccagtgtttccacagagcggctagagaagtacttgggaggggatgacttggacacatctgccattcgacatgactgcaattttgacaaagccatgcagttttctgaggcctcctttacctgggaacatgattcggaagccacagtccgagatgtgaacctggacattatggcaggccaacttgtggctgtgataggccctgtcggctctgggaaatcctccttgatatcagccatgctgggagaaatggaaaatgtccacgggcacatcaccatcaagggcaccactgcctatgtcccacagcagtcctggattcagaatggcaccataaaggacaacatcctttttggaacagagtttaatgaaaagaggtaccagcaagtactggaggcctgtgctctcctcccagacttggaaatgctgcctggaggagatttggctgagattggagagaagggtataaatcttagtgggggtcagaagcagcggatcagcctggccagagctacctaccaaaatttagacatctatcttctagatgaccccctgtctgcagtggatgctcatgtaggaaaacatatttttaataaggtcttgggccccaatggcctgttgaaaggcaagactcgactcttggttacacatagcatgcactttcttcctcaagtggatgagattgtagttctggggaatggaacaattgtagagaaaggatcctacagtgctctcctggccaaaaaaggagagtttgctaagaatctgaagacatttctaagacatacaggccctgaagaggaagccacagtccatgatggcagtgaagaagaagacgatgactatgggctgatatccagtgtggaagagatccccgaagatgcagcctccataaccatgagaagagagaacagctttcgtcgaacacttagccgcagttctaggtccaatggcaggcatctgaagtccctgagaaactccttgaaaactcggaatgtgaatagcctgaaggaagacgaagaactagtgaaaggacaaaaactaattaagaaggaattcatagaaactggaaaggtgaagttctccatctacctggagtacctacaagcaataggattgttttcgatattcttcatcatccttgcgtttgtgatgaattctgtggcttttattggatccaacctctggctcagtgcttggaccagtgactctaaaatcttcaatagcaccgactatccagcatctcagagggacatgagagttggagtctacggagctctgggattagcccaaggtatatttgtgttcatagcacatttctggagtgcctttggtttcgtccatgcatcaaatatcttgcacaagcaactgctgaacaatatccttcgagcacctatgagattttttgacacaacacccacaggccggattgtgaacaggtttgccggcgatatttccacagtggatgacaccctgcctcagtccttgcgcagctggattacatgcttcctggggataatcagcacccttgtcatgatctgcatggccactcctgtcttcaccatcatcgtcattcctcttggcattatttatgtatctgttcagatgttttatgtgtctacctcccgccagctgaggcgtctggactctgtcaccaggtccccaatctactctcacttcagcgagaccgtatcaggtttgccagttatccgtgcctttgagcaccagcagcgatttctgaaacacaatgaggtgaggattgacaccaaccagaaatgtgtcttttcctggatcacctccaacaggtggcttgcaattcgcctggagctggttgggaacctgactgtcttcttttcagccttgatgatggttatttatagagataccctaagtggggacactgttggctttgttctgtccaatgcactcaatatcacacaaaccctgaactggctggtgaggatgacatcagaaatagagaccaacattgtggctgttgagcgaataactgagtacacaaaagtggaaaatgaggcaccctgggtgactgataagaggcctccgccagattggcccagcaaaggcaagatccagtttaacaactaccaagtgcggtaccgacctgagctggatctggtcctcagagggatcacttgtgacatcggtagcatggagaagattggtgtggtgggcaggacaggagctggaaagtcatccctcacaaactgcctcttcagaatcttagaggctgccggtggtcagattatcattgatggagtagatattgcttccattgggctccacgacctccgagagaagctgaccatcatcccccaggaccccatcctgttctctggaagcctgaggatgaatctcgaccctttcaacaactactcagatgaggagatttggaaggccttggagctggctcacctcaagtcttttgtggccagcctgcaacttgggttatcccacgaagtgacagaggctggtggcaacctgagcataggccagaggcagctgctgtgcctgggcagggctctgcttcggaaatccaagatcctggtcctggatgaggccactgctgcggtggatctagagacagacaacctcattcagacgaccatccaaaacgagttcgcccactgcacagtgatcaccatcgcccacaggctgcacaccatcatggacagtgacaaggtaatggtcctagacaacgggaagattatagagtgcggcagccctgaagaactgctacaaatccctggacccttttactttatggctaaggaagctggcattgagaatgtgaacagcacaaaattctagcagaaggccccatgggttagaaaaggactataagaataatttcttatttaattttattttttataaaatacagaatacatacaaaagtgtgtataaaatgtacgttttaaaaaaggataagtgaacacccatgaacctactacccaggttaagaaaataaatgtcaccaggtacttgagaaacccctcgattgtctacctcgatcgtacttccttgctacccacccctcccagggacaaccactgtcctgaatttcacgataattattcctttg

SEQ ID NO: 2448 - DNA, 5836 bp, Homo sapiens
gctttgcccagtagttggaaagtgaactcgactcgtgatggttctcctgtcactttggttgatagcagccgctctggtagaggttaggacttcagctgatggacaagctggtaatgaagaaatggtgcaaatagatttaccaataaagagatatagagagtatgagctggtgactccagtcagcacaaatctagaaggacgctatctctcccatactctttctgcgagtcacaaaaagaggtcagcgagggacgtgtcttccaaccctgagcagttgttctttaacatcacggcatttggaaaagattttcatctgcgactaaagcccaacactcaactagtagctcctggggctgttgtggagtggcatgagacatctctggtgcctgggaatataaccgatcccattaacaaccatcaaccaggaagtgctacgtatagaatccggagaacagagcctttgcagactaactgtgcttatgttggtgacatcgtggacattccaggaacctctgttgccatcagcaactgtgatggtctggctggaatgataaaaagtgataatgaagagtatttcattgaacccttggaaagaggtaaacagatggaggaagaaaaaggaaggattcatgttgtctacaagagatcagctgtagaacaggctcccatagacatgtccaaagacttccactacagagagtcggacctggaaggccttgatgatctaggtactgtttatggcaacatccaccagcagctgaatgaaacaatgagacgccgcagacacgcgggagaaaacgattacaatatcgaggtactgctgggagtggatgactctgtggtccgtttccatggcaaagagcacgtccaaaactacctcctgaccctaatgaacattgtgaatgaaatttaccatgatgagtccctcggagtgcatataaatgtggtcctggtgcgcatgataatgctgggatatgcaaagtccatcagcctcatagaaaggggaaacccatccagaagcttggagaatgtgtgtcgctgggcgtcccaacagcaaagatctgatctcaaccactctgaacaccatgaccatgcaatttttttaaccaggcaagactttggacctgctggaatgcaaggatatgctccagtcaccggcatgtgtcatccagtgagaagttgtaccctgaatcatgaggatggtttttcatctgcttttgtagtagcccatgaaacgggccatgtgttgggaatggagcatgatggacaaggcaacaggtgtggtgatgagactgctatgggaagtgtcatggctcccttggtacaagcagcattccatcgttaccactggtcccgatgcagtggtcaagaactgaaaagatatatccattcctatgactgtctccttgatgacccttttgatcatgattggcctaaactcccagaacttcctggaatcaattattctatggatgagcaatgtcgttttgattttggtgttggctataaaatgtgcaccgcgttccgaacctttgacccatgtaaacagctgtggtgtagccatcctgataatccctacttttgtaagactaaaaagggacctccacttgatgggactgaatgtgctgctggaaaatggtgctataagggtcattgcatgtggaagaatgctaatcagcaaaaacaagatggcaattgggggtcatggactaaatttggctcctgttctcggacatgtggaactggtgttcgtttcagaacacgccagtgcaataatcccatgcccatcaatggtggtcaggattgtcctggtgttaattttgagtaccagctttgtaacacagaagaatgccaaaaacactttgaggacttcagagcacagcagtgtcagcagcgaaactcccactttgaataccagaataccaaacaccactggttgccatatgaacatcctgaccccaagaaaagatgccacctttactgtcagtccaaggagactggagatgttgcttacatgaaacaactggtgcatgatggaacgcactgttcttacaaagatccatatagcatatgtgtgcgaggagagtgtgtgaaagtgggctgtgataaagaaattggttctaataaggttgaggataagtgtggtgtctgtggaggagataattcccactgccgaaccgtgaaggggacatttaccagaactcccaggaagcttgggtaccttaagatgtttgatataccccctggggctagacatgtgttaatccaagaagacgaggcttctcctcatattcttgctattaagaaccaggctacaggccattatattttaaatggcaaaggggaggaagccaagtcgcggaccttcatagatcttggtgtggagtgggattataacattgaagatgacattgaaagtcttcacaccgatggacctttacatgatcctgttattgttttgattatacctcaagaaaatgatacccgctctagcctgacatataagtacatcatccatgaagactctgtacctacaatcaacagcaacaatgtcatccaggaagaattagatacttttgagtgggctttgaagagctggtctcagtgttccaaaccctgtggtggaggtttccagtacactaaatatggatgccgtaggaaaagtgataataaaatggtccatcgcagcttctgtgaggccaacaaaaagccgaaacctattagacgaatgtgcaatattcaagagtgtacacatccactctgggtagcagaagaatgggaacactgcaccaaaacctgtggaagttctggctatcagcttcgcactgtacgctgccttcagccactccttgatggcaccaaccgctctgtgcacagcaaatactgcatgggtgaccgtcccgagagccgccggccctgtaacagagtgccctgccctgcacagtggaaaacaggaccctggagtgagtgttcagtgacctgcggtgaaggaacggaggtgaggcaggtcctctgcagggctggggaccactgtgatggtgaaaagcctgagtcggtcagagcctgtcaactgcctccttgtaatgatgaaccatgtttgggagacaagtccatattctgtcaaatggaagtgttggcacgatactgctccataccaggttataacaagttatgttgtgagtcctgcagcaagcgcagtagcaccctgccaccaccataccttctagaagctgctgaaactcatgatgatgtcatctctaaccctagtgacctccctagatctctagtgatgcctacatctttggttccttatcattcagagacccctgcaaagaagatgtctttgagtagcatctcttcagtgggaggtccaaatgcatatgctgctttcaggccaaacagtaaacctgatggtgctaatttacgccagaggagtgctcagcaagcaggaagtaagactgtgagactggtcaccgtaccatcctccccacccaccaagagggtccacctcagttcagcttcacaaatggctgctgcttccttctttgcagccagtgattcaataggtgcttcttctcaggcaagaacctcaaagaaagatggaaagatcattgacaacagacgtccgacaagatcatccaccttagaaagatgagaaagtgaaccaaaaaggctagaaaccagaggaaaacctggacaacctctctcttcccatggtgcatatgcttgtttaaagtggaaatctctatagatcgtcagctcattttatctgtaattggaagaacagaaagtgctggctcactttctagttgctttcatcctccttttgttctgcattgactcatttaccagaattcattggaagaaatcaccaaagattattacaaaagaaaaatatgttgctaagattgtgttggtcgctctctgaagcagaaaagggactggaaccaattgtgcatatcagctgactttttgtttgttttagaaaagttacagtaaaaattaaaaagagataccaatggtttacactttaacaagaaattttggatatggaacaaagaattcttagacttgtattcctatttatctatattagaaatattgtatgagcaaatttgcagctgttgtgtaaatactgtatattgcaaaaatcagtattattttaagagatgtgttctcaaatgattgtttactatattacatttctggatgttctaggtgcctgtcgttgagtattgccttgtttgacattctataggttaattttcaaagcagagtattacaaaagagaagttagaattacagctactgacaatataaagggttttgttgaatcaacaatgtgatacgtaaattatagaaaaagaaaagaaacacaaaagctatagatatacagatatcagcttacctattgccttctatacttataatttaaaggattggtgtcttagtacacttgtggtcacagggatcaacgaatagtaaataatgaactcgtgcaagacaaaactgaaaccctctttccaggacctcagtaggcaccgttgaggtgtcctttgtttttgtgtgtgtgtgttcttttttaattttcgcattgttgacagatacaaacagttatactcaatgtactgtaataatcgcaaaggaaaaagttttgggataacttatttgtatgttggtagctgagaaaaatatcatcagtctagaattgatatttgagtatagtagagctttggggctttgaaggcaggttcaagaaagcatatgtcgatggttgagatatttattttccatatggttcatgttcaaatgttcacaaccacaatgcatctgactgcaataatgtgctaataatttatgtcagtagtcaccttgctcacagcaaagccagaaatgctctctccagggagtagatgtaaagtacttgtacatagaattcagaactgaagatatttattaaaagttgattttttttcttgatagtatttttatgtactaaatatttacactaatatcaattacatattttggtaaactagagagacataattagagatgcatgctttgttctgtgcatagagacctttaagcaaactactacagccaactcaaaagctaaaactgaacaaatttgatgttatgcaaacatcttgcatttttagtagttgatattaagttgatgacttgtttcccttcaaggaaacattaaattgtatggactcagctagctgttcaatgaaattgtgaattagaaacatttttaaaagtttttgaaagagataagtgcatcatgaattacatgtacatgagaggagatagtgatatcagcataatgattttgaggtcagtacctgagctgtctaaaaatatattatacaaactaaaatgtagatgaattaacctctcaaagcacagaatgtgcaagaacttttgcattttaatcgttgtaaactaacagcttaaactattgactctatacctctaaagaattgctgctactttgtgcaagaactttgaaggtcaaattaggcaaattccagatagtaaaacaatccctaagccttaagtcttttttttttcctaaaaattcccatagaataaaattctctctagtttacttgtgtgtgcatacatctcatccacaggggaagataaagatggtcacacaaacagtttccataaagatgtacatattcattatacttctgacctttgggctttcttttctactaagctaaaaattcctttttatcaaagtgtacactactgatgctgtttgttgtactgagagcacgtaccaataaaaatgttaacaaaatataaaaaaaaaaaaaaa

SEQ ID NO: 2449 - DNA, 5606 bp, Homo sapiens
ccagtccagcgcccgccgcccgccaccccggaccccggtgtctggcttcccccgagccgggaccccgcgatggccaagcgcagctcgctgtacatccgcatcgtggaggggaagaaccttcccgccaaggacatcactggcagcagcgacccctactgcatcgtgaaggtggacaatgagcccatcatcaggacagccacagtgtggaagaccctgtgccccttctggggtgaggagtaccaagtgcacctgccgcccaccttccacgctgtggctttctatgtcatggatgaggatgccctcagccgggacgacgttatcggaaaggtctgccttacaagggacaccatagcctctcaccctaagggtttcagcgggtgggcccacctgacggaggtcgaccccgatgaggaggtgcagggcgagatccacctgcggctggaagtgtggccaggggcccgggcctgccggctacgctgctctgtgctggaggccagggatctggccccaaaggaccgcaatggcacatctgaccccttcgtccgagtgcgctacaagggccggacacgggagacctcgatcgtgaagaagtcatgctacccacgctggaatgagacgtttgaatttgagctgcaggagggggccatggaggcgctgtgcgtggaggcctgggactgggaccttgtcagccgaaacgacttcctgggcaaagtggtgattgatgtccagagactgcgggtggtgcagcaggaggagggctggttccggctgcagcccgaccagtccaagagccggcggcatgacgagggcaacctgggctccttgcagctggaggtgcggctgcgggacgagacggtgctgccctccagctactaccagccactggtgcacctgctgtgccacgaggtcaagctgggcatgcagggcccagggcagctgatcccactcatcgaggagacaaccagcaccgagtgtcgccaggacgtggccacgaacctgctcaagctcttcctggggcaggggctggccaaggacttcctggacctgctcttccagctggagctgagtcgcaccagtgagaccaacaccctgttccggagcaactctctggcctcaaagtccatggagtcttttctgaaggtggccgggatgcagtacctgcacggcgtcctgggccccatcatcaacaaggtgtttgaggagaagaagtacgtggagctggaccccagcaaagtggaagttaaggatgtagggtgctccgggctgcaccgcccgcagaccgaggccgaggtgctggagcagagcgcgcagacgctgcgcgcccacctgggggccctgctgagcgcgctcagccgctcggttcgcgcgtgccccgccgtggtgcgcgccaccttccgccagctcttccggcgcgtgcgcgagcgcttccccggcgcccagcacgagaatgtaccgttcatcgccgtcaccagcttcctgtgcctgcgcttcttctctcccgccatcatgtcgcccaagctcttccacctgcgggagcgccacgcggacgcccgcaccagccgcaccctgctcctgttggccaaggcagtccagaacgtgggcaacatggacacgccggcttccagggccaaggaggcttggatggagccgctgcagcccaccgtgcgccagggcgtggcgcagctgaaggacttcatcaccaagctcgtggacatcgaggagaaggacgagctggacctgcagcggacgctgagtttgcaggcgccacctgtgaaggaggggccactcttcatccacaggaccaagggcaagggccccctcatgtcctcctccttcaagaagctctacttctccctcactaccgaggccctcagcttcgcgaagacgcccagctccaagaaaagcgccctcatcaagttagccaacatccgggcagcggaaaaggttgaggaaaagagctttggcggctcgcacgtcatgcaggtcatctacacggacgacgccggcaggccccagactgcctacctgcagtgcaagtgtgtgaatgagcttaaccagtggctgtctgcgctgcggaaggtgagcatcaacaacaccggactgctgggctcctaccaccctggcgtcttccgtggggacaagtggagctgctgccaccaaaaagagaagacaggtcagggctgcgataagacccggtcacgggtgaccctgcaggagtggaatgaccctcttgaccatgaccttgaggcccagctcatctaccggcacctgctgggcgtggaggccatgctgtgggagaggcaccgggagctgagcgggggcgcagaggcaggcacggtgcccacgagccctggcaaagtccccgaggactcattggcccggctgctccgggtgctgcaggacctccgcgaggcccatagctccagcccggccggctccccaccctcagagcccaactgcctcctggagctgcagacgtgaggcccgccctacgctccccttgctgagtcccctgccaagcgctcggagcccccccaggacactctgcaccccctcaccccggtcctcctcattagggtgcagggcctaggtctcttccaggtgggggaggggggagagtcaggaataaggggatccccagaagtgcagagctgagcaggcttgggcctgtcatggctggccggaagtgtccccagctccctacagacgctgtagccatcactgcctctccagggaccctcctctcctgcccaggacagacccagccagaaccactgctaggatgggccgcacccaggggtctggcctccagggacctagagaatgggagggagaacggggccccaggagacccggccgccaccccacccgctacccttgggtgccacagggctgtgctgttgccaacagtaaacctgctcttactgtccaggctctggggtcttgtgatgagggtctggggagaaagtgggcccggggggaccccggaggctgtcggtggatgtgccgatgatggggctgacagtatgggctctgggcatccctgttcccccctctttcttccccccactcttctggggtcgggggttcctttcccttcccagttgctgtccctgggtcccctctttcatgtcccacaggccacagagcccagtgtgtccaaccagctgttctctcctcaaagcagcccccaagcaagtcccttctctagggtgtccctgaggacagcacagaggcgggactcagagaccccattcctcttcacgcagcccttaccccaagccctctagctgtgtggctggcagtgttggccacgtaggggctcccatccccccaccattgtgtcacatgggctgccaggctcagctcccagctgcgtccacagtgacctggatcagggtggggacaaggactggaccctccttctccagaaggccttcagctcttgccttgccatgcagtcacctccttccccctctgaccccagatcccaaaggtgcaccgttgccccagcccctttctggccccatggggtttctctgatgccttcatcatagaggcccggggctggtccgatggttggcaaaacttgactccggcccagtccccactcttggggacttagaacccctgctgtcctgggatctggcctgcctttctttggtcagtccctgtggtcccccaccagctccccctcccatagggctgcccaccaagccctgcccccagcccaagaggagcccccactgcctgcggggcagtgatgtctggccaccggctcacaccaatgacttggtcctggggtggcagaagcagcaggtgacaggagcagggcccctgtccctctcttctggccctgtggtacccaggccacacgttgtgcccgctcttggggctgaccggctgtagggaccaccagccgctgctactgtgggccgccccggggcagggtgggcagggcttttgtgggttatgaggacacagaagtccctgaggcccccagacctggctcagccaacctccttcctcccccggttgccccccactctaaagcctcctccctcccagcgtccactggctccaggctcctcacaacagcagctcatagacacggggcgtctccaggtggtcccagccctccagatgtttctagctctccaggtgggcgctgttttcacgtctgcctgcatccattcattccttcattcctcacctttatcctgttatctctatttttttaagctaccaggaaggaaagggaagaagagatcacgaaactgggacccccagaaaggaggagtgggctttgaacttagacatctacctcagagctcaaataggttgtttaaaatcacattcaattttcagatgaaggggaactttatagttttttttttttttttttttttgagacagagtctcactgtgttgcccaggctggagtgcaaatggcttgatcttggttcactgcaacctctgcctcccaggttcaagcaattctcttgcctcagcctcccgagtagctgggactaaaggcgtgtgccaccatgcccagctaattcttgtatttttagtagagacggagtttctccatgttggccagactggtctcgaactcctgacctcaggtgatctgaccgccttggcctccgaaagtgctgagattacagttgcgagccactgtgcgtggccagaactttataataagagacttgaagctgggtgtgacggtgcacacctctagtcccagctactcgggaggccaagacagaaggatcaccttgaggccaggagtttaaggccagcctgggcaacatagcaaaacctagtccctaaaattaaaaaaaaaaaaaaaaaaaaaaggaaaataaaggagacttgaaatttttgaactaaatagtggtgatggctacacattgtgaatgtaattaacaccactgagttaaacacttaaaatggttaaaatggcaaattgtatgttatacctattttactacaataaaaagtataaaaaagagaagatatttaggtgacttacagcaaccaattgcaacaaaacaaaatgttaagaaatgatctttttatgaggcaattggaaatttgaacactgatcaactataggatgattggaattattaatttttaaaggtgtgataagatactgcacttggctgggcacagtggcacatgcctgtaatcccagctacttggcaggctgaggtgggagaatcgcttgagctcaggagttcgagaccagcctgggcaacgtggcgaaatccccgtctttacaaaaacaaacaaacaaacaaaaaagatattgcagttgtgttgtaagcgtccttatctttcagagctacatagtggaatgtttatggaatatttaggataaatgatataggcatttgggatttgctgcaaaatgacccagaggcaggggtcagggggagaggtagagatgagacaagaggtagaggggagaggtagaggtagccacgagctgataattacagacaagagatgcggagtatgtgggggctcattatcctgcatagtctatctttgtatatctttgaacttttcaagaataaaaaagcttaaaaagtata

SEQ ID NO: 2450 - DNA, 2853 bp, Homo sapiens; identical to SEQ ID NO: 1459

SEQ ID NO: 2451 - DNA, 6516 bp, Homo sapiens
gagagctgcctgctcagacaacagacacgcgaggtcaggaagaagccgcttataaattaccgcttccttcgcgccgccgccaacgccgagccccgaggaccgcaagcccagaggacaagctgcgccaagagggagtgcggagcgttcacccagcgggtcagagagcgagcgggcaggcagcccccggccggcggaacccggcacagccgagcagagcgcgggcggcgccgcagccaccccagatccagaaccagaaccacagcccttctgaggagctcccaaacaaagcaaggagatggccaccaaggagaagctgcagtgtctgaaagatttccacaaggacatcctgaagccctcaccagggaagagcccaggcacgcggcctgaggacgaggctgagggaaaacctccgcagagggagaagtggtctagcaagatcgactttgtgctctctgtggctggcggcttcgtgggcttgggcaacgtctggcgcttcccgtacctctgctacaagaatggtggaggtgcgtttctcataccgtattttattttcctgtttgggagcggcctgcctgtgtttttcttggagatcatcataggccagtacacctctgaagggggcatcacctgctgggaaaagatctgccccttgttctctggtatcggctatgcctccgttgtaattgtgtccctcctgaatgtctactacatcgtcatcctggcctgggccacatactacctgttccagtccttccagaaggagctgccctgggcacactgcaaccacagctggaacacacctcactgcatggaggacaccatgcgcaagaacaagagtgtctggatcaccatcagctccaccaacttcacctcccctgtcatcgagttctgggagcgcaacgtgctgagcttgtcccctggaatcgaccacccaggctctctgaaatgggacctcgctctctgccttcttttagtctggctagtgtgtttcttctgcatctggaagggcgtcaggtccactgggaaggtcgtctacttcacagccacttttccattcgccatgctcctggtgctgctggtccgagggctgacgctgccgggcgcgggcgcaggcatcaagttctatctgtatcctgacatcacccgccttgaggacccacaggtgtggattgacgctgggactcagatattcttctcttatgccatctgcctgggggctatgacctcgctggggagctacaacaagtacaagtataactcgtacagggactgtatgctgctgggatgcctgaacagtggtaccagttttgtgtctggcttcgcaattttttccatcctgggcttcatggcacaagagcaaggggtggacattgctgatgtggctgagtcaggtcctggcctggccttcattgcctacccaaaagctgtgacaatgatgccgctgcccacattttggtccattcttttttttattatgcttctcttgcttggactggatagccagtttgttgaagttgaaggacagatcacatccttggttgatctttacccatccttcctaaggaagggttatcgtcgggaaatcttcatcgccttcgtgtgtagcatcagctacctgctggggctgacgatggtgacggagggtggcatgtatgtgtttcagctctttgactactatgcagctagcggtgtatgccttttgtgggttgcattctttgaatgttttgttattgcctggatatatggaggtgataacctttatgatggtattgaggacatgattggctatcggcccgggccctggatgaagtacagctgggctgtgatcactccagttctctgtgttggatgtttcatcttctcgctcgtcaagtacgtacccctgacctacaacaaaacatacgtgtaccccaactgggccattgggctgggctggagcctggccctttcctccatgctctgcgttcccttggtcatcgtcatccgcctctgccagactgaggggccgttccttgtgagagtcaagtacctgctgaccccaagggaacccaaccgctgggctgtggagcgcgagggagccacaccttacaactctcgcaccgtcatgaacggcgctctcgtgaaaccgacccacatcattgtggagaccatgatgtgagctctctcgggtcgacggggccggcggctttcctgctgtttactaacattagattctcataggaccaggtttacagagctttatatttgcactaggatttttttttttttgtaattgtcacagaaaatgtaattgtgggtatgtgtgcgtgcgtgtgtgtgtgtgtgtgtatcgtgtgtgtgtgttttgttttgatttgggggatattttgtacaaaaagaaaacccacgggaagatgtccgtggagaggcagagctttcatactgaattagatgtattttatgggaatttggtaaatttttctttgtatttttttttttacatataagtatatatacacttagagattgtcatatacttttaccacttgaattgatcttcttgccagcaatagatctcattttcaaaagcaattcttcggtgctgtgtagctggcagaaagttctgtccagtaaacgcaggatggaattttcctgggactctacacccatcttaaggtggtataccttccaaatcctggttcagatggaagaaatagcaggagagaggacccattagctggcagacccagggggaagaaaggagggctgtgaggagatacctcattaaacttggcttagtgaagaagagagatgccaaaggaatgaaccaacccttcacataaaggagactggctgaagctgaatgaggaggccctatagcagaagtctgattctaagagcagtagaaacttgtaccagaagcaaaatcccacttttaattttgagatggtgagtggatagtcagtagaccgtcagaaccactggccagagagggagctgctagagatccaagaaggctggcaggagtgaggctcacaactcagcctcgcaagaggtggcagaggcacaggaggccacagtccttcctggggcattccaggcagagaaggagcagaggctctcccggcaggagctggggtctcagggctcagatgagtctgttgcatttgaatggggtcatagcaggttctggtcattccccaagcaacatctcagcatctcttaaagttgcctgcaggaatgaagcatgacatacctgttgagggactaggggagtggtggggaggtgagtggaccaaaggatataggccccaggcatgcagatgggcccggtgtcggggaggggtgctttctttcctcatctccccactccccactctcagcctgggagactcctgccaagccctcattaaagatgccaccctgggctgccctggcacctagcaaggcacaccaagaacagcttttgagtctgtatcctccactgggggaagtgctcccagttcagaacaagggcagcccgtggtgctgacctaggatataacaaagctcttcacttcaaaacccctgcaatagctgggtttacagacatttaccacctgcggacccaaaagagaaggcctaggagagttttctagaaggttgggattgtcagggtcctggcccctcagaactggcttgatcaagggccttatgtggagcagaggttgtctctgaaccaggagagaaggtactatacctttcaaatccccagggcagacacacccccacccagcccctatttggacctaaactgtgccatttgaacagtcacttccaagctcagtctaaatgaaaccgaaacgtgaccacgcacaaaggcagtcactgcctcgaggggtgcagaccgcagaattttcacagcaggggctcttggaaccctggaaacccccttcttaaatttgggaggaggagtatgcctttggtgtccccctcccaaggggcaattctgaaccccatctttggcaggcatacatatttcactgtttccaaagctatctactctgccaaacaacacccagtcctattccaaactctcaacgattctatcttgttcctgtttttctatgtatttatggttgccgtttgtgtctgatttgattttactgttttttccctgattttatggagtagcattgtgacctgttttcctttgtcttatataactttagtaaactaaccactgtcaatgattgagggcaggtggcacgtggggaagaggggacttggcacgcagtggctacctgggcatttgtggtcatttcagtttccatctccccagcgggggctccctgggtgaaaggccacagtattttgggttggtaggcaaattgcaacattctggacatggcctgaggaaggcctcttcttataagattctcagaccaaattctagaccaaagacacaggcagaccaagtccccaggccccgcctggaaggaagtcgttcctcaactctccccaaggcacctgtctccaatcagagccctctcgcccagccagccctggctctgtgtgcagagcatagctctgcgagtacctgtgtaataatgctcaaccttcatgtctccgtataaacgaaactttccatgagagctcatgactctggtccacctgtctatagagaatgggcaaagtccttcacctgctttctgcttgggatgggtcagaaatgctgatgcccgcacatagcccagccagccagatctggaaaggaagcgagggggttgtttaaatcaattttttaagatgaagaagtgggagacactgcgttgagatgggccatgctagggccacagagatttcctgacggtcagggagagaagggcctccagggtcccctaacccaacgcccttgttgtaaatgaggtaactgaggctcagggaggcactgtgagccaggaatggattttcttgaaacagctctagctgcaggttctccgaggtaggtgcagggaatggtgagtgtctaaccagggctacatccagcaacatcctcaaggtcttcctgacaaccaaagacaagcctttatggaaaaggaaatgcgctcccctccatgttcagggatgaggggagcagcagcagccacactcccaccatcctcacagaattcctggacccatgcggtggctccgtgagctgggtgactccagcctcacctgcacaccccagccctgcacggggccctccttcctcccagcagcccttggtgagctaggaattgagatccctgtttgtgaaagagggaactgaggtgcagagaagccagaggtgtgccagatccttaggcaggatttagatgaagtcgccctggctccagactgaccccgaggctctgcggggagtttccaggcagcaggaagtggccttggatgctctccttccaggacagcataacccctgggccatgtgcagctccttcactgccccctggatccccagcatacccccaaagacagtggggaaacacaaggggagagcacagcatggcccctccagcccacttcagggcactcttgtatcacccgggtaccgccacactggtcccccacccagccagcatctcccagcacagcccctctccctggggaaatgctctgggtagccagtctaaaggcagaggcacctaactgctccccgcagcccaccccacccaagattcagacacaagccaggaaaggacccaagagaaaatccttcaaggtggcctgaggtcccatccctccctcagacccatgtggtcccaggccaggctgcctgggacacggtaaataccactgtgtgcaaaaatcgaagtacaaaaccacaagactaaacaaaacaaacccagagagccaaacttgtagaggtgggcagtccagaaagcagggggcagccctccccctttccttctctccctgatcctcagaatatatattgttgtaataggaagcatttttgcattgttctcttgtgggtgtcactacagacatgttctggcgtgttctccgagggatggagcatcctgttatatatttgacttcaaattgagatgttggcttcattttttttttttacccaattaatctcccaatccctagcaactgtgactctgtatttagcacaagagaaagctgagaatgtgggtcttgcctccttccagaaatatgtctggctcatcaggacatttttttaaaacttcaaaatatttttaagatattttaaacttttataaaaaaaaaatcaaccaacaagagacttttctgaggaggaacatttgtatttgaacaagatccttggtgtgtagttcagtcttgcagtatacaagcttttgtgtataaatgttttatgatatgattccctgtattttgcaggggtttttttctcttttgctttttagataaatatgtatatcaatattttaaattcatctttgctttttttagaggagtttgtaatcaccttataacatgaaaataaacatttcctttttaacatccaaaaaaaaaaaaaaaaaa

SEQ ID NO: 2452 - DNA, 3173 bp, Homo sapiens
atggaggcgggaggagagcgatttcttagacaaaggcaagtcttgcttctctttgtttttctgggagggtctctggctgggtccgagtcaagacgctattctgtggctgaggaaaaagagaagggctttttaatagccaacctagcaaaggatctgggactaagggtagaggaactggccgcgaggggggcccaagttgtgtccaaagggaacaaacagcattttcagctcagtcatcagacaggtgatttgctcctgaatgagaaattggaccgggaggagctatgcggccccacagaaccatgcatactacattttcagatattactgcaaaaccctttgcaattcgttacaaacgagctccgtatcatagatgtaaatgaccattctccggtattctttgaaaatgaaatgcatctgaaaatcctagaaagcactctgccaggaacagtaattcctttgggaaatgctgaggacttggatgtgggaagaaacagcctccaaaactacactatcactccgaattcccacttccacgtactcactcgcagtcgtagggacggaaggaagtacccggaactagtactggataaagcgctcgatcgggaggagcagccggaactcagcttaacgctcaccgcgctggacggcggctctccccctcggtctgggacagcccagataaacatccaggtcttagatataaacgacaatgcaccagaatttgcacagccgctctatgaggttgcagttctagagaatacccccgttaactctgtcattgtcactgtctcggcttctgacttagatacaggaagttttgggacaatatcatatgcattttttcatgcttctgaagaaattcgcaaaacttttcagctaaatccaattactggtgatatgcaactggtcaaatatttgaattttgaagcgattaatagttatgaagtcgacatcgaggccaaggatggcggaggcctatccggaaagtctacagtcatagtccaggtggttgatgtcaacgacaacccaccggaactgaccttgtcttcagtaaacagccctattcctgagaactcgggagagactgtactggctgttttcagtgtttctgatctagactctggagacaacggaagagtgatgtgttccattgagaacaatctccccttcttcctgaaaccatctgtagagaatttttacaccctagtgtcagaaggcgcgctggacagagagaccagatccgagtacaacattaccatcactatcactgacctggggacacccaggctgaaaaccaagtacaacataaccgtgctggtctccgacgtcaatgacaacgcccccgccttcacccaaatctcctacaccctgttcgtccgcgagaacaacagccccgccctgcacatcggcagtgtcagcgccacagacagagactcaggcaccaacgcccaggtaacctactcgctgctgccgccccaggacccgcacctgcccctctcttccctggtctccatcaacgcggacaacggccacctgtttgccctcaggtcgctggactacgaggccctgcaggcgttcgagttccgcgtgggcgccacagaccgtggctccccggctttgagcagcgaggcgctggtgcgcgtgctggtgctggacgccaacgacaactcgcccttcgtgctgtacccgctgcagaacggctccgcgccctgcaccgagctggtgccccgggcggctgagccgggctacctggtgaccaaggtggtggcggtggacggcgactcgggccagaacgcctggctgtcgtaccagctgctcaaggccacggagcccgggctgttcggcgtgtgggcgcacaatggcgaagtgcgcaccgccaggctgctgagcgagcgcgacgcggccaagcacaggctggtggtgctggtcaaggacaatggcgagcctccgcgctcggccaccgccacgctgcatgtgctcctggtggacggcttctcccagccctacctgcctctcccggaggcggcaccggcccaggcccaggccgacttgctcaccgtctacctggtggtggcattggcctcggtgtcttcgctcttcctcttttcggtgctcctgttcgtggcggtgcggctgtgcaggaggagcagggcggcctcggtgggtcgctgctcggtgcccgagggcccctttccagggcagatggtggacgtgagcggcaccgggaccctgtcccagagctaccagtacgaggtgtgtctgactggaggctccgggacaaatgagttcaagttcctgaagccaattatccccaacttcgttgctcagggtgcagagagggttagcgaggcaaatcccagtttcaggaagagctttgaattcagttaagtgttaataaggatctactgagcctcgtcttagttaatctgtggaaagtccttttttactgctttgtccattggagaggtcttttttggtctggttcaaggcaagtagcaagaatagagcaaaatatcaaatccagggatggcttaggtttcattaacagtactggaaagtagttgtgtggctctgaatgttttgtatttcaatcgagaatccttagtcgatagaacattttgtttatatattgattctactttttctgtagttaatccttgcatattctcctttcatcctggcttgccaacgcagtcttaattccgccttttttttttctaatggggagcaaaaagaaattcactgtcttttaatagtgatttcaaatagcttattaaaataactccattcaaattttacattataaagcaatgtagagagagttccaaaccaccaattttataatttcccttgttgaatatattcatataatgtgttctataatatgcccaaagcagctttgtctatagttaacaaagttttaaggatagacaagaatgtgttttctttaataaatagtaatatatcatctttttagggatatagtactcaaatgaaagtaatttagttcattttctgtgttgacatttgcaattaatatttcaatattttatgtgcttatattggccaaaatatggacacaaatatagactaatatgggtaattaccctttggtttatctaaagtgtgttcatgatgactgaggaaaaaaattaaacctatgccattta

SEQ ID NO: 2453 - DNA, 3031 bp, Homo sapiens
cagcgtgtgtcatgtcttggctgcgtttctggggcccatggcccctccttacgtggcaactattgtctttactagtcaaggaggctcagcctctggtgtgggtcaaggacccgctccagctgacctctaaccccctggggccacctgagccctggtcttcccgctcctcccatctcccatgggaatctccccatgcacctgctcccccagcagccccgggggactttgattacctggggccctctgcttcttcgcagatgtcagccctgcctcaggaaccaactgaaaatttggctccattcctgaaggaattggattcagctggagagctgcccctggggccagagccgttcttggctgcacatcaggacttaaatgacaagcggactccagaagaaaggctcccagaggtggttccgcttctcaaccgggatcagaaccaggccctagttcagcttcctcgcctcaagtgggttcaaactacagatctagatcgggctgcaggtcatcaggcagatgaaatacttgttccactagacagtaaggtttcaagaccaaccaaatttgttgtttcgcccaagaacctgaagaaagatctagctgaacgttggagccttcctgagattgttgggattccacaccaattatccaaacctcagcgtcagaaacagactttgccagatgattatttgagtatggacacactgtatcccggcagcctacctccagaactccgggtgaacgcagatgagcctccagggcctcctgagcaagttggactttctcaattccatctagagcccaaaagtcaaaatccagagacccttgaagacatccagtcctcttcactccaggaagaagccccagcgcagcttctacagctccctcaggaggtagaaccttcaacccagcaggaggccccagctctgcctccagagtcctctatggagagtctagctcaaactccactgaatcatgaagtgacagttcaacctccaggtgaggatcaagctcattataatttgcccaagtttacagtcaaacctgcagatgtggaggttaccatgacttcagagcctaaaaatgagacagaatctacccaagcccagcaggaggccccaattcagcctcccgaggaggcggaaccttcttctacagccctgaggactacagatcctcctccagaacaccctgaggtgacacttccaccttcagacaagggtcaggctcagcattcacacctgactgaagccacagttcaacctctggacctggagcttagcataactacagagcctactacagaggttaaaccgtctccaaccacggaggaaacctcagctcagcctccagacccggggcttgccataactccagaacccactacagagattggacattccacagccctggagaagactagagctcctcatccagaccaggttcagactctgcatcgaagcctgactgaagtcacaggtccacctacaaagttagaatcttcgcaggattcattggtgcagtctgaaactgcaccagaggaacagaaggcctccacaagcaccaacatatgtgagctctgcacctgcggagatgagactctgtcatgtgttggtctcagcccaaagcagaggctccgccaagtgcctgtgccagagcccgacacctacaatggcatcttcaccaccttaaatttccaaggaaactatatttcataccttgatggaaatgtatggaaagcatacagttggaccgagaaactaattctcagtgaaaattatttgactgaattacctaaggattcatttgaaggcctgctatacctccagtatttagatttatcctgcaataaaatacgatatattgaaagacaaacatttgaatcactaccatttttgcagtatataaatctgggctgcaatttaattacaaaactgagccttggaacatttcaggcctggcacggaatgcagtttttacacaacttaattctcaatcgcaatcctctgactactgtcgaagatccatatctctttgaactgccggcattaaaatatctagacatgggaacaacacacatcacacttacaacacttaagaacattctcacgatgactgttgaactggaaaaactgatcttacctagccatatggcctgctgcctctgccaatttaaaaatagcattgaggctgtctgcaagacagtcaagctgcattgcaacactgcatgtctgactaacagcatacattgtcctgaagaagcatctgtagggaatccagaaggagcgttcatgaagatgttacaagcccggaagcagcacatgagcactcagctgactattgagtcggaggcgccctcagacagcagtggcatcaacttgtcaggctttgggggtgatcagcttgaaattcagctaaccgagcagctacggtccctcatccccaacgaggatgtgagaaagttcatgtctcatgttatccggaccttgaaaatggaatgttcagaaacacatgtgcaagggagctgtgccaagctcatgttgcgaacaggcctcctgatgaagcttctcagcgagcagcaggaagcaaaggcattgaatgtagaatgggatacggaccaacaaaaaacaaattatattaatgagaacatggaacagaatgaacagaaagagcagaagtcaagtgagctcatgaaagaagttccaggagatgactataagaacaaactcatcttcgcaatatctgtgactgtaatactaataattttgattataattttttgtcttatagaggtgaattcacataaaagggcatcagaaaaatacaaagacaacccatcaatatcaggagcctgagcatgagttaaagcatgtggatggcctggagctatgtttttaaaattgttattaaatattggttttttacttaaatcaatgaaaactttctttactttgtggttgtgttcctcaaaatgagaatttttaacaataataaaaataaagcttgttagatcatttttaatggtaaaaaa

SEQ ID NO: 2454 - DNA, 2914 bp, Homo sapiens
acatgctgcccaggctgcgcgggtgattggcttggctggacctgaatgatgcggctgtgattgctgaattgtctgggcaggtttggagtctctggcaagctcccctgactgtgcatccctctggagacgaagaggagggggaggcctgtcctctctgggatccattggtcacatccccctgaggattcccgaatgcctacctccagtgtcgtcaacatggagttctgaagtccatgtggctcttcacagtgaatcaggtgttaaggaagatgcagagacgccacagcagcaacacggataacattccacctgaaagaaaccgcagccaggcgctcagctccgaggcgagtgtggatgaaggtggcgtctttgagagtctgaaggcagaggcagcctccccaccagcgctcttctcgggcttatcaggcagcctccccaccagctcgttcccctccagcctggtgctgggctcctcggctggcggcggggacgtgttcatccagatgcccgcgtccagggaggaaggagggggccggggcgaggggggcgcctaccaccaccgccagccccaccaccatttccaccatggcggccaccgcgggggctccctgctgcagcacgtgggtggggaccaccgggggcactcggaggagggaggcgacgagcagcctgggacgcccgcccccgccctgtccgagctgaaggctgtgatctgctggctccagaaaggactccccttcatcctgatcctcctggccaaactgtgctttcagcataagctcggcattgctgtgtgcatcgggatggccagcaccttcgcctatgccaactccacgcttcgagaacaggtctcactgaaggagaagaggtcagtgctggtcatcttgtggatcctggcctttctggcggggaacaccctctatgtgctttatacattcagctcccagcagctgtacaacagcctcatattcctgaagcccaacctggagatgctggacttctttgacctgctatggattgtggggatcgcagactttgttctgaagtacatcaccatcgccctcaagtgcctcatcgtggccctgcccaagatcatcctggctgtcaagtccaagggaaagttctatctggtcatcgaggagctgagccagctgttccgatcccttgtccccatccagctgtggtacaaatacatcatgggtgacgactcctccaacagctacttcctgggcggggtcctgatcgttctctacagcctctgcaagtccttcgacatctgtggacgtgtgggcggagttaggaaagccctgaagcttctctgtacctctcagaactatggagtccgagccaccgggcagcagtgcacagaagctggtgacatctgcgccatctgtcaggccgagttccgagagcctctgattctcctgtgccagcacgtgttctgtgaggagtgcctctgcctgtggctggaccgtgagcgcacctgcccgctctgccgctcggtcgccgtggacaccctgcgctgctggaaggacggcgccacgtccgcacacttccaggtgtactaggaccgaacactgaggacacccagaaggacgccaaggattcaggacatttgcccctgtgtgccaccaaaccaggactttccccttggcttggcatccctggctctctcctggtacccagcaagacgtctgttccagggcagtgtagcatctttcaagctccgttactatggcgatggccatgatgttacaatcccacttgcctgaataatcaagtgggaaggggaagcagagggaaatggggccatgtgaatgcagctgctctgttctccctaccctgaggaaaaaccaaagggaagcaacaggaacttctgcaactggtttttatcggaaagatcatcctgcctgcagatgctgttgaaggggcacaagaaattggagctggagaagattgatgaaagtgcaggtgtgtaaggaaatagaacagtctgctgggagtcagacctggaattctgattccaaactctttattactttgggaagtcactcagcctccctgtagccatctccagggtgacggaacccagtgtattacctgctggaaccaaggaaactaacaatgtaggttactagtgaataccccaatggtttctccaattatgcccatgccaccaaaacaataaaacaaaattctctaacactgcaaagagtgagccatgcctgttaacactgtaaagaatgtaacatgtgggggacacacaggggcagatgggatggtttagtttaggattttattagtgcatgccctaccctctgggggaacgtcccatctgaggttttcttctcggtggggggatttaacttctgtcctagggaaaacagtgtctgatgaggagtgtttccaacacaggctacatgaattcccctataccagtgcgaaagcagccaggagtccccgttggaaaagaacaatgccactctcttttatgtatcttggttctgcaactcatttgttgtaagtagggttaatcgagtatcaggttcacagtatcctgcccttattattttatgattcactgactcaagttccacgaagtccttagaaatggacctcttcatgtaaaatatcttgagaataataaatgtgagggaataagaaaggcaagctttggacacagatatgataggtgcatcagcttcggaagagaagaatgatgtgcagagtgttaggaagacatccgggctgctgagactcgggattagaagaaagagaggtaaataaagtgggtcctggaatcttttaggacttctgctgtaggacaaacagctgcctttggtgttttaatgtctcccaaagtacccttcagccaataaataccatctgttggtgcaaaaaaaaaaaaaaaaaa

SEQ ID NO: 2455 - DNA, 3854 bp, Homo sapiens; identical to SEQ ID NO: 230

SEQ ID NO: 2456 - DNA, 4077 bp, Homo sapiens
cgggcctcgagccgaggcagcagtgggaacgactcatcctttttccagccctggggcgtggctggggtcggggtcggggtcggggccggtgggggccccgcccccgtctcctggcctgcccccttcatgggccgcgatgatggcggccctgtacccgagcacggacctctcgggcgcctcctcctcctccctgccttcctctccatcctcttcctcgccgaacgaggtgatggcgctgaaggatgtgcgggaggtgaaggaggagaatacgctgaatgagaagcttttcttgctggcgtgcgacaagggtgactattatatggttaaaaagattttggaggaaaacagttcaggtgacttgaacataaattgcgtagatgtgcttgggagaaatgctgttaccataactattgaaaacgaaaacttggatatactgcagcttcttttggactacggttgtcagaaactaatggaacgaattcagaatcctgagtattcaacaactatggatgttgcacctgtcattttagctgctcatcgtaacaactatgaaattcttacaatgctcttaaaacaggatgtatctctacccaagccccatgcagttggctgtgaatgcacattgtgttctgcaaaaaacaaaaaggatagcctccggcattccaggtttcgtcttgatatatatcgatgtttggccagtccagctctaataatgttaacagaggaggatccaattctgagagcatttgaacttagtgctgatttaaaagaactaagtcttgtggaggtggaattcaggaatgattatgaggaactagcccggcaatgtaaaatgtttgctaaggatttacttgcacaagcccggaattctcgtgaattggaagttattctaaaccatacgtctagtgacgagcctcttgacaaacggggattattagaagaaagaatgaatttaagtcgtctaaaacttgctatcaaatataaccagaaagagtttgtctcccagtctaactgccagcagttcctgaacactgtttggtttggacagatgtcgggttaccgacgcaagcccacctgtaagaagataatgactgttttgacagtaggcatcttttggccagttttgtcactttgttatttgatagctcccaaatctcagtttggcagaatcattcacacaccttttatgaaatttatcattcatggagcatcatatttcacatttctgctgttgcttaatctatactctcttgtctacaatgaggataagaaaaacacaatggggccagcccttgaaagaatagactatcttcttattctgtggattattgggatgatttggtcagacattaaaagactctggtatgaagggttggaagactttttagaagaatctcgtaatcaactcagttttgtcatgaattctctttatttggcaacctttgccctcaaagtggttgctcacaacaagtttcatgattttgctgatcggaaggattgggatgcattccatcctacactggtggcagaagggctttttgcatttgcaaatgttctaagttatcttcgtctcttttttatgtatacaaccagctctatcttgggtccattacagatttcaatgggacagatgttacaagattttggaaaatttcttgggatgtttcttcttgttttgttttctttcacaattggactgacacaactgtatgataaaggatatacttcaaaggagcagaaggactgtgtaggcatcttctgtgaacagcaaagcaatgataccttccattcgttcattggcacctgctttgctttgttctggtatattttctccttagcgcatgtggcaatctttgtcacaagatttagctatggagaagaactgcagtcctttgtgggagctgtcattgttggtacatacaatgtcgtggttgtgattgtgcttaccaaactgctggtggcaatgcttcataaaagctttcagttgatagcaaatcatgaagacaaagaatggaagtttgctcgagcaaaattatggcttagctactttgatgacaaatgtacgttacctccacctttcaacatcattccctcaccaaagactatctgctatatgattagtagcctcagtaagtggatttgctctcatacatcaaaaggcaaggtcaaacggcaaaacagtttaaaggaatggaggaatttgaaacagaagagagatgaaaactatcaaaaagtgatgtgctgcctagtgcatcgttacttgacttccatgagacagaagatgcaaagtacagatcaggcaactgtggaaaatctaaacgaactgcgccaagatctgtcaaaattccgaaatgaaataagggatttacttggctttcggacttctaaatatgctatgttttatccaagaaattaaccattttctaaatcatggagcgaataattttcaataacagatccaaaagactatattgcataacttgcaatgaaattaatgagatatatattgaaataaagaattatgtaaaagccattctttaaaatatttatagcataaatatatgttatgtaaagtgtgtatatagaattagttttttaaaccttctgttagtggctttttgcagaagcaaaacagattaagtagatagattttgttagcatgctgcttggttttcttacttagtgctttaaaatgtttttttttatgtttaagaggggcagttataaatggacacattgcccagaatgttttgtaaaatgaagaccagcaaatgtaggctgatctccttcacaggatacacttgaaatatagaagttatgttttaaatatctctgttttaggagttcacatatagttcagcatttattgtttaggagtataattttattttatctaaaataatagtctattttttcttttgtattttgttataatcttaagcaacaaagaaaaaaccctaatatttgaatctatttatgtctttcaatttaaattcacttcagtttttgttattgtaatatatttacttttacatggttataatcactttatatttttaatgtttttttcacttaatattttatatatacatttccatgtattgatgtagttagtccacatttaaatttttatagaattatatagtttttgaaaaatacagtcagtagatgttttattttttagctattcagttatgtttataagtttgcatagctacttctcgacatttggtttgttttaatttttttgtatcataatagtcctatttttttttcaagttggagtgaatgtttttagttttaagatagataggagacacttttttatcacatgtagtcacaacctgttttgtttttgtaaaacataggaagtctctttaatgcaatgatttgttttatatttggactaaggttcttgagcttatctcccaaggtactttccataatttaacacagcttctataaaagtgacttcatgcttacttgtggatcattcttgctgcttaagatgaaaagcattggttttttaaaattagagaataaaatatgtatttaaatttttggtgtgttcacataaagggatgtagctaaaatgttttcataggctattatatattctcgcagcatttccagttaagaggatattaggtatataattctcttcttaaccgaatgtcagatggtcttacgccacagggtgcaggtaacccttggtctgtaagcaccaccgatccagggatcattgtctaaataggttactattgtttgtttcatcttgcttttgcatttttattttttaatttccaaattttaagtgttccctctttggggcaaattcttataaaaatgtttattgtaaagttatatattttgtctacgatgggattatgcacttcccaattgggattttacatctggatttttagtcattctaaaaaacacctaattattaaaacatttatagagtgcctactgtatgcatgagttgagttgcttctgaggtacattttgaatgacagcatattgtaagaaaaaaaaaggtgaataaaatttgacattagattataaaaaaaaaaa

SEQ ID NO: 2457 - DNA, 2499 bp, Homo sapiens; identical to SEQ ID NO: 1426

SEQ ID NO: 2458 - DNA, 939 bp, Homo sapiens; identical to SEQ ID NO: 2182

SEQ ID NO: 2459 - DNA, 760 bp, Homo sapiens
gaggaaccgagaggctgagactaacccagaaacatccaattctcaaactgaagctcgcactctcgcctccagcatgaaagtctctgccgcccttctgtgcctgctgctcatagcagccaccttcattccccaagggctcgctcagccagatgcaatcaatgccccagtcacctgctgttataacttcaccaataggaagatctcagtgcagaggctcgcgagctatagaagaatcaccagcagcaagtgtcccaaagaagctgtgatcttcaagaccattgtggccaaggagatctgtgctgaccccaagcagaagtgggttcaggattccatggaccacctggacaagcaaacccaaactccgaagacttgaacactcactccacaacccaagaatctgcagctaacttattttcccctagctttccccagacaccctgttttattttattataatgaattttgtttgttgatgtgaaacattatgccttaagtaatgttaattcttatttaagttattgatgttttaagtttatctttcatggtactagtgttttttagatacagagacttggggaaattgcttttcctcttgaaccacagttctacccctgggatgttttgagggtctttgcaagaatcattaatacaaagaattttttttaacattccaatgcattgctaaaatattattgtggaaatgaatattttgtaactattacaccaaataaatatatttttgtacaaaaaaaaaaaaaaa

SEQ ID NO: 2460 - DNA, 1008 bp, Homo sapiens; identical to SEQ ID NO: 1789

SEQ ID NO: 2461 - DNA, 1899 bp, Homo sapiens
ggtcgggacgccgggctaggggcgcgtcatgtggccgctcacggtcccgccgccgctgctgctgctgctgtgctcaggcctggccggacagactctcttccagaacccagaagagggctggcagctgtacacctcagcccaggcccctgacgggaaatgcatctgcacggccgtgatcccagcgcagagtacctgctctcgagatggcaggagtcgggagctgcggcaactgatggagaaggtccagaacgtctcccagtccatggaggtccttgagttgcggacgtatcgcgacctccagtatgtacgcggcatggagaccctcatgcggagcctggatgcgcggctccgggcagctgatgggtccctctcggccaagagcttccaggagctgaaggacaggatgacggaactgttgcccctgagctcggtcctggagcagtacaaggcagacacgcggaccattgtacgcttgcgggaggaggtgaggaatctctccggcagtctggcggccattcaggaggagatgggtgcctacgggtatgaggacctgcagcaacgggtgatggccctggaggcccggctccacgcctgcgcccagaagctgggctgtgggaagctgaccggggtcagtaaccccatcaccgttcgggccatggggtcccgcttcggctcctggatgactgacacgatggcccccagtgcggatagccgggtctggtacatggatggctattacaaaggccgccgggtcctggagttccgtaccctgggagacttcatcaaaggccagaactttatccagcacctgctgccccagccgtgggcgggcacgggccacgtggtgtacaacggctccctgttctataacaagtaccagagcaacgtggtggtcaaataccacttccgctcgcgctctgtgctggtgcagaggagcctcccgggcgccggttacaacaacaccttcccctactcctggggcggcttctccgacatggacttcatggtggacgagagcgggctctgggctgtgtacaccaccaaccagaacgcgggcaacatcgtggtcagccggctggacccgcacaccctcgaggtcatgcggtcctgggacaccggctaccccaagcgcagcgctggcgaggccttcatgatctgcggtgtgctctacgtgaccaactcccacctggctggggccaaggtctacttcgcctattttaccaacacgtccagttacgagtacacggacgtgcccttccacaaccagtattcccacatctcgatgctggattacaacccccgggagcgcgccctctatacctggaacaacggccaccaggtgctctacaatgtcaccctgtttcacgtcatcagcacctctggggacccctgagccaatgctgtggctcgggctgctgcctggggggcctccgggggctgggggcccttttcattctgcctgtgtccctcaagggtgatctctctgtctctgtcacgccctttctccccgcctttttgctgggcttttgttctctgcctatgtatttctgtctattttttcaatttcccctcttctcctttattgatctctgcttttaatacaccacttctttctttctgcctttttatggatgtctttttctttttatggctctggttctccagttctttccgtctctgcctctctctgtctctctctctctgtccttccacccctccctccttgcttcccacccattcctcatccctcactcccacccccacccccacccccaggagttgagtgcatggatctgtttctttttttatttacactttttctttccggtttgccggaataaacaggacctttgacatttgaaaaaaaaaaaaaaaaaaaaaaaaaaaaaaaaaaaaaaa

SEQ ID NO: 2462 - DNA, 2345 bp, Homo sapiens; identical to SEQ ID NO: 803

SEQ ID NO: 2463 - DNA, 3624 bp, Homo sapiens
atatacaggaggagataaaaaatttagtcaaattacagactagtagtgcttccttagcttcctgtgaaggaaattcttcaaacaaacaagtatcttcggaaagtcaaatgggttttttttctctaagcagtgagagaaatgaatctgttatccattatcctgaatccacagaacctgaaatacagcaagaaatgtccacgtcacaaccagactgcaatgtggatagttgctcagtaagcagtggatatggcaccttttgtatctcagaattaaatctgtacaaatctaaagaccctaaggagttcatggagcacatagatgttcccaaaggacagtatgtagcacctgcggtgccggctgagtcacttgtagatggtgtgaaaaatgagaatttttatatacagactcctgaagagtgtcatgtgtctttaaaggaagatgtatccatttctcctggtgaatttgaacataattttcttggtgaaaataaggtttctgaagtatacagtgggaaaacaaatagtaatgctataacatcatgggcacaaaaactgaagcagaaccaaccaaagagagcacatgtagaagatggaggttcaagatctaaacaaggaaatgagcaaagtaagaagacaccaattgagaaatctgattttgctgctgctacacatcctcgtgctttttacctcagtaaaccagatgaaactccaaatgcttggatgtctgattcaggaacaggattgacttactggaaactagaggaaaaggatatgcaccactctttgcctgaaactttagagaagacgttcatatcattgtcttccacagatgtgtcaccaaaccagtctaatactagtaatgagatgaagctaccgtcactgaaggatatttattataaaaaacaaagggaaaacaagcagttacctgagaggaatctcacttctgcttccaacccaaatcatccaccagaggtcctgactctagatcctacgttacacatgaagccaaagcagcagatttcagggattcaacctcacggccttccgaatgcccttgatgacagaatatccttttccccggactctgttctagagcctagtatgtctagtccctctgacatagactcattttcacaagcaagtaatgtcacttctcagttacctggatttccaaaatatccctcacacacaaaagcttctccggtggactcttggaaaaatcagacattccaaaacgaaagtaggaccagttccacgtttccgtcagtatataccattactagtaatgatatctcggtcaacactgtagatgaagaaaacactgtcatggttgcttcggcctcagtcagtcagtcccagcttccaggtacagccaacagtgtcccagaatgcatttcattgacttccttggaagatcctgtgatattgtctaagattaggcagaatctgaaggaaaagcatgctcgacacatagcagatcttcgagcttattatgaatcagaaataaatagtttgaaacagaagctggaggcaaaagaaatctctggagttgaagattggaagataaccaatcaaattcttgtagacagatgtggccaattagatagtgctttgcatgaagctactagtcgcgtgagaacacttgaaaataagaataacttactggaaattgaagtgaatgatttgagagaacgcttcagtgcagccagcagtgcttccaaaattttgcaggaacgaattgaagaaatgagaacaagcagtaaagaaaaagacaataccatcattcgactaaaatctagactgcaagatttagaagaagcatttgagaatgcttacaaactctcagatgataaagaagctcaactaaaacaagagaacaaaatgtttcaagatcttttaggagagtatgagtcccttggaaaagaacacaggagagtaaaggatgcattaaatacaactgagaacaaattgcttgatgcatatactcagatttctgatttgaaaagaatgatttcaaaacttgaagctcaggtcaagcaagtagaacatgaaaatatgttaagccttcgtcataattctagaattcacgtgagaccctcgcgtgccaacacactagcaacttcagacgtcagcaggcggaaatggctgattccaggtgcagagtattccatctttactggccagcctctggacacccaggacagtaacgtggataaccagctggaggaaacctgtagcctagggcaccgttcacctctggaaaaggattcttcacctggaagttcatcaacaagcttgttgataaaaaagcaaagagagacttcagacacgccgatcatgagagctttaaaagaacttgatgagggaaaaatatttaaaaattgggggacacagacagagaaagaggacacctcaaatataaatcctcggcaaactgaaacttcagttaatgcaagtcgttctccagaaaagtgtgcccaacagagacaaaagagacttaattcggcctcacagagatcatcatctttaccaccttcaaatcgtaaatcaagtactccaacaaaaagagagattatgctaacaccagtgactgtggcttatagtccaaagcgatcccctaaagaaaacttgtccccaggatttagtcatctgcttagcaaaaatgagagcagtccaattcgatttgatatacttttggatgatttagatactgttcctgtgtctacattacaacgtaccaatccaagaaagcaactccagtttcttcctctagatgactcggaagaaaaaacttattctgagaaagccaccgataaccatgttaatcatagctcttgccctgaaccggtgccaaatggagtgaagaaagtatctgtgagaacagcctgggagaagaataaatcagttagctacgaacagtgtaagccggtttcagtcactccacaggggaatgattttgaatatacagcaaaaattcggaccctagctgaaacagaacgattttttgatgaacttacaaaagaaaaggaccagattgaggcagcactaagcaggatgccttctcctggaggacgaatcactttacagacaagattaaatcaggaagccttggaagatcgtttggaaaggattaatcgagaactgggttcagttcgcatgacgctaaagaaattccatgttttgcgcacctctgcaaatctttgagatttgtagccattaaattttgagacatttttgtttgcactaatgtataattatgcagtcagaaaaggcaaactattttgtactgtttataagccttcaaacagtagttttacaatcatgctattcttacacttgctattttatacttcaaatggccacatattttcaagatatttttgttatgctcaggaatctcttgtatattttactatttaaaaagcattatttttaaatagtatctgtctccaatttatatcaagaataaggaaatataaacagaggaagcagcttgtttctaaacaaatagtgttatccttttacaattaactgcacatcaattttatagacttgttctacattgtaaatacaattcagtttttaaaaaataaagcttaatagcttccataaaaaaaaaaaaaaa

SEQ ID NO: 2464 - DNA, 2908 bp, Homo sapiens
tgctttgcaggcccaggctcaaggcaaattataagtagggaaccaatttgagggaaagacatgtgaacagagttaaggtaccacgtcctgggagcgaccagcagccccacctgaagtccgcatgcaactctgacaagctcaggtgcttgttttaaggaaaggggctactagagtcttaccaacagcgagcccaggtgggagatgaaacaggtactccccaaaataggtcatccgagggaggaaaactgatggagagcacaatgtgctctgagcgtttttaatgtttttaagcttttaaatgatttcttcaaggccgagcagcagcagcaaaggtgtggcttaaaggattaagggggtttctgctgacacctagaatgaagttactctattactaatcaagccgagaggaggcccactatgcccccgtttatcatcctttcccagttcctttttgctggtcacaaaacgatgctcatcaatcccacctaaagcaggaggccaggagcccagcctcttgtagaaacagcgagggtataactgccctcccgttctgcccccaagacgaaggaggactctcggaagccaagaaaggtttaagaagtctttctggatagagagcagtgcccaggcaggaagcctttcgccggcagagcggggtccaaggacgagctggagaggacagaggcgcgatgggcctgctgcagggcctgctccgagtccggaagctgctgctggtcgtctgcgtcccgctcctgctgctgcctctgcccgtcctccaccccagcagcgaggcctcgtgtgcttacgtgctgatcgtgactgctgtgtactgggtgtcggaggcagtgcctctgggagctgcagccctggtgccggccttcctttacccgttcttcggagtcctccggtccaatgaggtggcggcggagtacttcaagaacaccacgctgctgctggtgggggtcatctgcgtggcggctgccgtggagaagtggaacctgcataagcgcattgctctgcgcatggtcttgatggccggagccaagccgggcatgctgctgctctgcttcatgtgctgtaccacgttgctgtccatgtggctgtccaacacctccaccaccgccatggtgatgcccatcgtggaggccgtgctgcaggagctggtcagtgctgaggacgagcagctcgtggcgggcaactccaacaccgaagaggccgaacccatcagtctggatgtaaagaacagccaaccttctctggaactcatctttgtcaatgaagagtccaacgcagacctcaccactctgatgcacaacgagaacctgaatggtgtgccctcgatcaccaaccccatcaaaactgcaaaccaacaccagggcaagaagcaacacccatcccaggaaaagccacaagtcctgacccccagccccaggaagcagaagctgaacagaaagtacaggtcccaccatgaccagatgatctgcaagtgcctctccctgagcatatcctactccgctaccattggcggcctgaccaccatcatcggcacctccaccagcctcatcttcctggaacacttcaacaaccagtatccagccgcagaggtggtgaactttggcacctggttcctcttcagcttccccatatccctcatcatgctggtggtcagctggttctggatgcactggctgttcctgggctgcaattttaaagagacctgctctctgagcaagaagaagaagaccaaaagggaacagttgtcagagaagaggatccaagaagaatatgaaaaactgggagacattagctacccagaaatggtgactggatttttcttcatcctgatgaccgtactgtggtttacccgggagcctggctttgtccctggctgggattctttctttgaaaagaaaggctaccgtactgatgccacagtctctgtcttccttggcttcctcctcttcctcattccagcgaagaagccctgctttgggaaaaagaatgatggagagaaccaggagcactcactggggaccgagcccatcatcacgtggaaggacttccagaagaccatgccctgggagattgtcattctggttgggggaggctatgctctggcttctggtagcaagagctctggcctctctacatggattgggaaccagatgttgtccctgagcagcctcccaccgtgggctgtcaccctgctggcatgcatcctcgtgtccattgtcactgagtttgtgagcaacccagcaaccatcaccatcttcctgcccatcctgtgcagcctgtctgaaacgctgcacattaaccccctctacaccctgatcccagtcaccatgtgcatctcctttgcagtgatgctgcctgtgggcaatccccctaatgccatcgtcttcagctatgggcactgccagatcaaagatatggtgaaagctggcctgggagtcaacgttattggactggtgatagtaatggtggccatcaacacctggggagttagcctcttccacctggacacttacccagcatgggcgagggtcagcaacatcactgatcaagcctaacgccaagtgtacaaactggcccaaccacaggagctgccagtatccagcagtatctggaccacaggcaaagaaaaccactaggaccaccaggagcacacaaccccagacccacgccggagggcatccctccaccagaagattccgccacctcaagtgaactgcaggaatcctccaacaaccacaaacacatgcttcgctgttagtgtcttcttcctgccctcagcaccacagctcaagaaaacctaaagtttcaatacaagccataggctcacagaaaaagaaaaagaaaataaaaattaaattaaaaaaaaagaagacaaagaaaaaaaaaaaaaaaa

SEQ ID NO: 2465 - DNA, 3039 bp, Homo sapiens
ggtccctgggctcccgctcgccgccgctgccgctcctcgttctgctcctcactccccagcggctggaggccggtaccggcgggcaggaggcgcccgaggatgtgctgctggccgctgctcctgctgtgggggctgctccccgggacggcggcggggggctcgggccgaacctatccgcaccggaccctcctggactcggagggcaagtactggctgggctggagccagcggggcagccagatcgccttccgcctccaggtgcgcactgcaggctacgtgggcttcggcttctcgcccaccggggccatggcgtccgccgacatcgtcgtgggcggggtggcccacgggcggccctacctccaggattattttacaaatgcaaatagagagttgaaaaaagatgctcagcaagattaccatctagaatatgccatggaaaatagcacacacacaataattgaatttaccagagagctgcatacatgtgacataaatgacaagagtataacggatagcactgtgagagtgatctgggcctaccaccatgaagatgcaggagaagctggtcccaagtaccatgactccaataggggcaccaagagtttgcggttattgaatcctgagaaaactagtgtgctatctacagccttaccatactttgatctggtaaatcaggacgtccccatcccaaacaaagatacaacatattggtgccaaatgtttaagattcctgtgttccaagaaaagcatcatgtaataaaggttgagccagtgatacagagaggccatgagagtctggtgcaccacatcctgctctatcagtgcagcaacaactttaacgacagcgttctggagtccggccacgagtgctatcaccccaacatgcccgatgcattcctcacctgtgaaactgtgatttttgcctgggctattggtggagagggcttttcttatccacctcatgttggattatcccttggcactccattagatccgcattatgtgctcctagaagtccattatgataatcccacttatgaggaaggcttaatagataattctggactgaggttattttacacaatggatataaggaaatatgatgctggggtgattgaggctggcctctgggtgagcctcttccataccatccctccagggatgcctgagttccagtctgagggtcactgcactttggagtgcctggaagaggctctggaagccgaaaagccaagtggaattcatgtgtttgctgttcttctccatgctcacctggctggcagaggcatcaggctgcgtcattttcgaaaagggaaggaaatgaaattacttgcctatgatgatgattttgacttcaatttccaggagtttcagtatctaaaggaagaacaaacaatcttaccaggagataacctaattactgagtgtcgctacaacacgaaagatagagctgagatgacttggggaggactaagcaccaggagtgaaatgtgtctctcataccttctttattacccaagaattaatcttactcgatgtgcaagtattccagacattatggaacaacttcagttcattggggttaaggagatctacagaccagtcacgacctggcctttcattatcaaaagtcccaagcaatataaaaacctttctttcatggatgctatgaataagtttaaatggactaaaaaggaaggtctctccttcaacaagctggtcctcagcctgccagtgaatgtgagatgttccaagacagacaatgctgagtggtcgattcaaggaatgacagcattacctccagatatagaaagaccctataaagcagaacctttggtgtgtggcacgtcttcttcctcttccctgcacagagatttctccatcaacttgcttgtttgccttctgctactcagctgcacgctgagcaccaagagcttgtgatcaaaattctgttggacttgacaatgttttctatgatctgaacctgtcatttgaagtacaggttaaagactgtgtccactttgggcatgaagagtgtggagacttttcttccccattttccctccctcctttttcctttccatgttacatgagagacatcaatcaggttctcttctctttcttagaaatatctgatgttatatatacatggtcaataaaataaaactggcctgacttaagataaccattttaaaaaattgggctgtcatgtgggaataaaagaattctttctttcctactacattctgttttatttaaatactcattgttgctatttcactttttgacttgacttttatatttctttaaaaaattccttccttttaaaaaatataaaagggactactgttcattccagttttcttcttctttgttgttcttctagtgtgacttttcaagtgtaacagccattcttcctgactttaatattgtccagttctggtcttttctgtgaattaccactgggccccttacctcaatgctttttgttgatgcccactctggttcccttgtttatctgagtctgttggtaccccaaatgaccccacacccatcttaaagtactttttttcaccttccctgtttagtactggccagatgagttttttctagagctctgtcactatctgaaaagaaagaggctatgggaaacatagaaatggtatgtattaataactgatcataggctgaggagaaaaaatgtagctggctgcaaacccagtgctgtgaggtgacttatatgaggttccagatcaaagacaggccgtgtgagccagtccaggagggtgtaagttctgaatggttccttgctgactttgggtgacacatgtaccacatactggctcagtttaagtcatggttctattgtagatttatttttatattagttaataaatgactttaaattgtcaccaattgaaaatcttgtcactcttttggttttctttatatagctcagccaaatcttgttttatgtcctgtcctcatctcttaagctaaatctgtttggatcatattaataaactaaatgaaattaca

SEQ ID NO: 2466 - DNA, 1101 bp, Homo sapiens
atggcccgggagaggccgcccgggaggggctgcggcgtcctgcgccggtgtctactcggggctgtgctgttgttcggcctgcggctctgcgcagagctgcggcgcgccgggcccgggtcccccacccgcagcgccccgccgggcccggcctggcggccacctgggccgcacctgccgcccgcgccgggccagccgcgcggcgccagcaggaggcaggtgacctacgtgcgcagcggtcgccgggcgccgccggggggcggcgggagcgggacgccggagcctggctgctgtgccccgcgcgggcgcccccgccggaagggtccccggtggcatatagatctccagccttgggcaggctctgctcagtccctggatgaagaagcctggaggttcctgagatatatcagcaccacccagattgcatgcaatcacatgaatacagacagcctggctactgactctagtcctacacacaagccctggtcagtgtgtcttgacgacaggttcaatttagctcatcaaatccgcaacaagcagtgccgcctctactccttagggctaggaagtgatgatacccattttgaggttagcatggccaacaacggatgtgaagtgcatcgttttgatcctagtgtcaagtcagctcacattctggagagtcagcacctttggtatcaccgcttgtccattgactggcgggatccccatccagctgttgctgcccaaaaaccacatagcaacaccagaaaactgggaagcattttgaatgaatttggacatcacaagattgacgttctcaaggcagatctggaaagtgcagaatggaaagttttggaaaatcttattctggaagatgttcttgagcagattggacagctcatctttgagatccatctccactggcctgggtttgaggtcagtggcagtgacagcagcgttgtgcggttctggtacagccttctcaaagagttagaacaaaaggatttcaggctttttcacagttacaaagacttatctaaacctcagctattcttgaagaaagacattttcaatgcaagtagctgttatactctgagttgggtgaatacaagatggaaatag

SEQ ID NO: 2467 - DNA, 5218 bp, Homo sapiens
attggttgcggcggatgcctcgcgggccggtggctatggaggcggcggcggttgatggttgaccgttggctccggggtgggggtcgccgttcgagtgatctgctcagacccgaccagagggcgcgggctgctgatgcttggcttggagcccgtgggggagacctagttcggctccgccatgccggccgccgggagtaacgagccggacggcgtcctcagctatcagagaccagatgaagaagctgtggtggatcagggtgggaccagtacaattctcaacattcactatgaaaaagaagagctggaaggtcacagaactctgtatgtgggagttcggatgccgcttggccggcagagccatcggcatcaccgcactcatggccagaagcaccggagacgagggcggggcaaaggagccagccagggggaggaaggcctggaagccctggcccacgacacaccatctcagcgtgttcagttcattcttggcaccgaggaagatgaagagcatgtgcctcatgagctgtttacagagctggatgagatctgtatgaaagagggagaagatgctgagtggaaggaaacagccaggtggctgaagtttgaagaagatgttgaagatgggggagaacgctggagcaagccttatgtggcaaccctttcattgcacagcctgtttgagctaaggagctgccttattaatggaacagtcctcctggatatgcatgcaaatagcatagaagaaatttcagacctgatcctggatcagcaagaactgtccagtgacctgaatgacagcatgagggttaaagtgcgggaagcccttctcaaaaagcatcatcatcagaatgaaaagaagagaaacaacctcattcccattgttcgctcctttgctgaggttggcaagaagcagtctgatcctcatttgatggataaacatggtcaaaccgtgtctcctcagtctgttccaactacaaatcttgaagtaaaaaatggagtgaattgtgaacatagtcctgtggatttaagcaaggtagaccttcatttcatgaaaaaaattcctactggggccgaggcctccaatgtcctggttggagaggtggatattttggaccgtcccattgttgcctttgtgaggctgtctccagctgttcttctctcaggcctaacagaagtgccaatcccaacaagatttttgtttatcttattgggtccagtagggaaaggtcagcagtaccatgagattggcagatccatggccaccatcatgacagatgagatttttcatgacgtagcatataaggcaaaagagcgagatgatctcctggcggggattgatgagttcctagaccaggtgacggtgctccctccaggagagtgggatccctccattagaattgagccacccaaaaatgtcccttcccaggagaaaaggaaaatgcctggagttccaaatggaaatgtttgccacatagaacaggaaccacatgggggtcacagtgggccagaacttcagcgcactgggcggctatttgggggcttggtgctggacatcaagcggaaggccccctggtactggagcgactaccgagatgcactcagcttacagtgtttggcttcctttctgttcctgtactgtgcctgcatgtcacctgtcatcacctttgggggactgcttggagaagccactgagggacgcataagtgcaattgaatccttgtttggagcttccatgactgggattgcttattccttgtttgcgggacaggctctcaccatcctgggaagtactggaccagtgcttgtgtttgaaaagattttgttcaaattctgcaaagactatgctctttcatacctctccctgcgagcttgtattggactgtggaccgctttcctgtgtattgtccttgtggcaactgatgccagttcccttgtctgctacattacccgtttcactgaagaagcatttgcctccctaatttgcattattttcatctatgaagcaatagaaaaactgattcacctggcagagacctaccccatccacatgcacagccagctggaccaccttagcctctattactgcaggtgtactctgccagagaatccaaacaatcacaccctccagtactggaaggaccacaacatcgtgacagcagaagtccactgggctaacctgactgtcagtgaatgccaggagatgcatggagagttcatgggatctgcgtgcggccatcatggaccctacactcctgatgtcctcttttggtcctgtattctctttttcaccaccttcatcctctcaagcaccttaaagacgtttaagacgagccgttatttcccaaccagagtacgctccatggtgagtgactttgctgttttcctcactatcttcacaatggtgattattgattttttgattggagtcccatcaccaaagcttcaagttcccagtgtgttcaagccaacaagggatgatcgcggatggattattaatcccattggccccaatccctggtggactgtgatagctgcaattatcccagctcttctctgtactatcttgatattcatggatcagcagatcacagccgtcattattaacaggaaggaacataagctcaagaaaggctgtggctaccacctggacctactgatggtggccatcatgctgggtgtctgctccatcatgggcctgccctggtttgtagctgcaactgtcttgtccatcacacatgtgaacagcctcaagctagaatctgaatgctctgctcctggagaacagcccaagttcctgggcatccgagaacagagagtgacaggccttatgatctttgtgctgatgggctgctcagtcttcatgacggctatcttaaagtttattccaatgccagtactctacggagttttcctttacatgggagtttcttcactacagggaattcagttctttgatcgtctaaagctctttgggatgcccgcaaagcaccagccagatttcatctacctgcggcatgtgccgctgcgcaaagtgcacctcttcaccctcatccagttgacctgtctcgtcctgctctgggtcatcaaggcatctccagctgccattgttttcccaatgatggttttggccttggtctttgtcaggaaagtcatggatctctgtttctctaagcgagagctgagctggctagatgatctcatgcctgaaagcaaaaagaagaagttggatgatgccaaaaagaaggccaaggaggaagaggaggctgagaaaatgttagaaattgggggagacaagtttcccttagagagcaggaagttactaagtagtcctggaaagaacatcagttgcagatgtgacccctctgagattaatatatctgatgaaatgcctaaaactacagtttggaaagctctcagtatgaattctggaaatgcaaaggaaaagagtctcttcaactaagagtctttgctgggatggaagatttgggccgtgtggtgcctcagggaagttctggttacagagaaaatggcgagtctctcagagaagaagcaagaccaagtctggccctgtccttggtcatctcaaagccatgccgaagcattcagttattcttggtgtgcattggaaggcatccagctatccccataccagcagccagtcaccagatgtgaatgtggaagcagaagaccacctcctgttggttcttctcctcttccttctttttctctttagaacggccaccattgaagacctagcttcccattttccagacgttttctctgaaattctctgctggcctgccaagccatatggattcattctgccactgaggagtccttcagtgaggtccctcttcctaaaggacagagtggggagtaggaggggaacagagaggacatcctctctggctctccagtgctcttagtgtctacaggctcctaggcagccctgggccttggtttgattacctcccctgggggatgctggtcagacccagaggttgtcaggaggtcagctaccaggaagatccatgatctgggcattggcagtgcctgccaccacagccaggaagatgcctctgacctgggtgcatctccatcactccttagcagcagcctgcataactggcaagaatcttggatgatacaagagccaagaagggacatttgagttgtgtcgcttagataggaaagggatccagggaaaatcaacagtaagtgaggatgagcagtgtctcttggttttcattgaggatagagtaagagattgagtttagattgcaacagaaggaattagtttagataccaggaagaacttcctagcctgaagatttgtcatagtgtctgctttctagatatctgggaaagatttgataatagttgtttgtgaatagaaaggaggatatgatgtttttattggccattttgcgggactcttcgacttcttgctgctgtctcttgaggatacattccaattccatcctggcgagatccaagtgcttacgtactgtctccttagctgccttagagtaaacgatcatcagttcaatggaccaaaatcaccttcagccatgtggtttcttcatcatcatggatttcttttggttgacaaacattctggctctcagatgcaaaaagtcacactgggaaatgaactgtaagtggtgaaattagttttggtatttaatttaaaactacatttatagtttttctcttctcttctatgttgcaatgaatgtaaagtatttgggatccagtgcttataaacctttccttcctttgtgcacagaatgtaactagcaagcccattagcacccagataattctatcatgttagtttcccatcctggaaaatctttgtacagtgggaagttccccgatgtgtttttctttcttaggtgaagggttggctatatcactttattgaattttgcattccttagacttttaaaatatactaatgtattctagtcttactctaaagacctttgatgttaaaggaatccttcatttatttcatattccctatctcatagggccacaattattttaatacagagatgattttcaaaatattttaacaactggtacaggacagatgccagccactcagaagggatgcctgctgtaaacaagcagtatgtatggttgtaccaatgcctattggctgaacattatgctactttcagatattaaaatggtgttcctttgaatcgtg

SEQ ID NO: 2468 - DNA, 4978 bp, Homo sapiens
acggaaacggtccggggctgagctgcagtcagatccggggatggagggagccggagaagaggagtgagaaggccggggaggcaggccctgctgtcttcctgcaggccggcagcctgctggcagtggaggaccaggccgtccaggaaaggaaggggtcaggaggtcgggcagggcctcagcaggttcagacaagtccccagaagggagctgcaggcgccctcgagtccaggccccaagcctggctccggttgtccaaagagggcctaggccaggcctctggtgcggaaactgagtcacagccagacctcagggcacggcctagacgcttacgagccaaagttaggggtagagagcagagacctccggggggtctcagggagtagggggcttcagggcctcccagtctagagccggattggcgagttagacgcttgtagatccaaggttggattggggtggggtctctgggacgttggatcgctacgcaaggattggggggattcaagtgcttagagatcgaagtctgccctgggtagggggagtcagacaattggaaagcctaggtagttatttggggaggggtctctacgccttggcgaagcgcacagctgcatctttttggcttgaggcctgaggccttgtcgagaagcttccgtgaaagggtgggccagccgggccacgagaaagaaagtgaataaatcaggaatataagtgggcggggggcccctgagaggggggtcgcaaagggtgagacatggccaccaggcgtttaaccgacgctttcttgttgttgcggaataattccatccaaaaccggcagctgttagccgagcaagtgagtagtcacatcacctccagccctctgcattcacgtagcattgctgcggagctggacgagcttgctgatgaccgtatggcactggtgtcaggcatcagcttagatccagaagcagcgattggtgtgacaaaacggccacctcctaagtgggtggatggagtggatgaaattcagtatgatgttggccggattaagcagaagatgaaagaattggccagccttcatgacaagcatttaaacagacccaccctggatgacagcagcgaagaggaacatgccattgagataactacccaagagatcactcagctcttccacaggtgccagcgtgccgtgcaggccctgccgagccgggcccgggcctgctccgagcaggaggggcggctgcttgggaacgtggtggcctcgctggcgcaggccctgcaggaactctccaccagcttccggcacgcacagtcaggctacctcaaacgcatgaagaatcgagaggaaagatcccagcattttttcgacacatcagtaccactaatggatgatggagacgataacactctttaccatcggggttttacagaggaccagttagttctggtggagcagaacacactgatggtggaagagcgggaacgagagattcgccagattgtacagtccatttctgacctgaatgaaatattcagggacttaggggcgatgattgtagaacagggtacagtccttgacagaattgactataacgttgaacagtcctgtatcaaaactgaagatggtttgaaacagcttcacaaggcagaacagtatcaaaagaagaatcggaagatgcttgtgattttaatattatttgtcatcatcattgtgctcattgttgtcctcgttggcgtgaagtctcgataagtggcattgggttttcgtgtgtgccgcgcgtgtggatctcccgggtgtgaggggcttggcctgcgccccgccagctgcccgcagaggtgcagcctcgaggaatctgagggcgtcggggcagcgaacctttgcatccacggactcctccttccctagtcctgctcaagcggtccggggaatgggtttttgtttttccttcattgttgagaatttaaggacctttgatactgctgcacaatagagattgagttctgggatcagttataatatatattttttttagaaagagaaaatgagctgagagtttacaggcactgcagaagctgttcagtattatatgtgtatatgctatttttttagcagccatgtctgagcagaatgttaacataatttttggaaaaattttctttaaaccatctggtttttaagaaatttggtaccaaaaattgatgagtagaggcaaaaatgccccttcatctttctctatatattttccagttgaaaacaaactaagaagtcctttaagaatttataatccgttccccattaacttaatttagcttttccatcactgttaatgatcagagtaacaaagtgtgaaaaataagaaaccatcattgatgttaattaacacatttagatgggccagttaaaacagcttcataagttttaaattaattgtaaatggaatattcctcatttaaaatttttgcactgcattttctactgtaaaccaaaagaggttactaagcaaaaccacctaaatttaagttggtgatttaaatgaatctcacattaaaagaaagcttgacagtgttatgaaagccaccagactcagccagtgtgtccccatgggtatccccagccatccttgctcaatccattacttatatactaactacataatgacctgttcaaaccagactctatttaatgaactgtgaatttacacagaggccattttaaatgggtcaccccatttaggattagtggatctcaaattattaaccaaacatcactccatttcaaagtaaaatattccaccagcgatttgatttattggctcttccattgccactgagcaatgcccaggaagcaggcacattgccaaggactgggggcatcttgactaggaagctcctcgtttgtgtgagcgtgggtcagaccgccaaagtaggacttcatcgtttacctacctattatcaatatggtgcttgaatatattcctataactgtagaacagtgtggaaagtgatggtaactttgaagttgttcatgttttattggctttgttttaattgacactagtagagttttaatggtctttgtgtaaattttaatggcttttccattgtttttgcttctcttaaaaagtttaagaagaatatgacctcattaaatgtgctgttttatttggaccagtcacacaaaatgtctctctagagttgactttaaagttgtttacagaaatttaaactcaattccagagattgaagttgtccaaacagctcatgggcttagtgtccaaacccctgcccagccttccctttccaagttggtgccacctccaggtagccattggtggttttcctattactgatgtggctgtggaatgataaggtcctagaggggccctggcatttcaggaagcggacctggtattccctgacaaacattgcttaggaaagagggccggagaataagaagccagcacctcatcagtcagccctgcaatgtgagacttccgtagctgttgagagtcactgcaggtgttctttcatcccatctgattttaacccatggttgagacgttccaagttagatctgctgctcttaggtgtggggctgtccacattagggaacttgcctcaaaaacagtccacagtggcaataccggacttctgttcaagctttttaaagtgctgagccttacaaacccctgaaggaaggtgaccctttaagagaggatcatctttttttatatttattttcaccaaatagggtgatgagggttggtttttgttccctcaacccatttgggtaaaataacggatctgattagaaactgttttaaggaggggctgggctcggtggctcacgcctgtaatcccagactttgagaggccaaggcggtcacgaggtcaggagttcgagaccagcctagccaacatggtgaaaccccgtctctacaaaaaatacaaaaattagccgggtgggacacgcctgtaatcccagctactcaagaggctgaggcaggagaatagcttgaacccgggaggcagaggttgcagtgagccgagatcacaccactgcactccagcctgggtgacagagcgaggctccgtctcaaaaaaaaaaaaaaaaaattgttttagcgctgggtttcccaaggtgggagagacagacccagcctggagctggcccctggcctgtgtgctgacttcttggggtcctcaaaccactgtatttttctgttgagcctgtacttggggagagatcagtagcatttgaggaagtaagagaaaagaatcatggtacctcagggtttctttccctttactcgctggcagccattgtctgtgggcacctcatgtttttccacactctactgggccgtggaggtaacgatcacccaggccagtctcctctgcctgggatgcgccctctgagaggaggcctagcagggcaggctccctctgggcatccctggatgcagcctctggacacatgcctcctttaaagtgtccgggtgcagctcaggttgagtggaggtagaaggagaaacagacatgtttaccacgcgttttccaaagctcctgatctttcccaagattgtaactgaaaactgctgtctcttgttttgttcgttttgggggtggtggtgctggctgggccatgcttgtgaagtgatgtgtgtctctgatttaacggattcactgttttctctgctaattgagagagcgttatttacattatttatttgttttgacacaagtgctttcagtgttttatcctagctaatggcttcttaaaggtaataaaacccttccaacgtaattggtcagataaaactttttttcttgtatgcttaaataaagcaattagtgaagcacttctatccaaaatgacttttttgtccttttttaaaaccaatttactgttactggaaactttttgtacaataaagcaatcacgcagattaaagaacatcctgcaatcctagtattaattttaaaaaaaaaaaaa

SEQ ID NO: 2469 - DNA, 11998 bp, Homo sapiens; identical to SEQ ID NO: 131

SEQ ID NO: 2470 - DNA, 1815 bp, Homo sapiens; identical to SEQ ID NO: 544

SEQ ID NO: 2471 - DNA, 473 bp, Homo sapiens; identical to SEQ ID NO: 541

SEQ ID NO: 2472 - DNA, 2032 bp, Homo sapiens; identical to SEQ ID NO: 1510

SEQ ID NO: 2473 - DNA, 14121 bp, Homo sapiens; identical to SEQ ID NO: 587

SEQ ID NO: 2474 - DNA, 4024 bp, Homo sapiens; identical to SEQ ID NO: 113

SEQ ID NO: 2475 - DNA, 3077 bp, Homo sapiens; identical to SEQ ID NO: 2422

SEQ ID NO: 2476 - DNA, 10724 bp, Homo sapiens
ctttccaatatccgtcttcggagcgcacgggaatccgccgagctctgcgtgcaggcccttttttcttttgaggttcacattttttgaaattttacgccagggcttttgtaatttcctcccccgcccgctgacggtcctggagtcgctcggggctttaggccggttatgcaacgtgtaccgctcggggctgccggctgcacctccgccgcgcctcgccgctcactgcgctagacccggcgccccgcgtctcgcttcgcgggcagtcagggggccggcgctctgtcgaggtctccagctagagcagggagcccgagcccgagggagtccccggagccgacgaagggcttattagaccctgactcttttctgaggcgcgcagattttgtctttgatcactccctctccgcgggtctacggccgcgcgctttcggcgccggcgatggggagaagacggaggctgtgtctccagctctacttcctgtggctgggctgtgtggtgctctgggcgcagggcacggccggccagcctcagcctcctccgcccaagccgccccggccccagccgccgccgcaacaggttcggtccgctacagcaggctctgaaggcgggtttctagcgcccgagtatcgcgaggagggtgccgcagtggccagccgcgtccgccggcgaggacagcaggacgtgctccgagggcccaacgtgtgcggctccagattccactcctactgctgccctggatggaagacgctccctggaggaaaccagtgcattgtcccgatttgtagaaatagttgtggagatggattttgttcccgtcctaacatgtgtacttgttccagtgggcaaatatcatcaacctgtggatcaaaatcaattcagcagtgcagtgtgagatgcatgaatggtgggacctgtgcagatgaccactgccagtgccagaaaggatatattggaacttattgtggacaacctgtctgtgaaaatggatgtcagaatggtggacgttgcatcggacccaaccgctgtgcttgtgtttatgggttcactggtccacagtgtgaaagagattacaggacaggcccgtgtttcactcaggtcaacaaccagatgtgccaagggcagctgacaggcattgtctgcacgaagactctgtgctgtgccaccattggacgggcgtggggccatccctgtgagatgtgtccagcccagcctcagccctgccgacggggtttcatccccaacatccgcactggagcttgccaagatgttgatgaatgccaggctatcccagggatatgccaaggaggaaactgtatcaatacagtgggctcttttgaatgcagatgccctgctggtcacaaacagagtgaaactactcagaaatgtgaagacattgatgagtgcagcatcattcctgggatatgtgaaactggtgaatgttccaacaccgtgggaagctatttttgtgtttgtccacgtggatatgtaacctcaacagatggctctcgatgcatcgatcagagaacaggcatgtgtttctcgggcctggtgaatggccgctgtgcacaagagctcccggggagaatgacgaaaatgcagtgctgctgtgagcctggccgctgctggggcatcggaaccattcctgaagcctgtcctgtcagaggttctgaggaatatcgcagactttgcatggatggacttccaatgggaggaattccagggagtgctggttccagacctggaggcactgggggaaatggctttgccccaagtggcaatggcaatggctatggcccaggagggacaggcttcatccccatccctggaggcaatggcttttctcctggcgttgggggagccggtgtgggggccgggggacagggacctatcatcactggactaacaattctgaaccagacaatagatatctgtaagcatcatgctaacctttgtttaaatggacgctgtataccaactgtctcaagctaccgatgtgaatgcaacatgggttataagcaggatgcaaatggagattgtatagatgttgatgaatgcacatcaaatccctgcactaatggagattgtgttaacacacctggttcctattattgtaaatgtcatgctggattccagaggactcctaccaagcaagcatgcattgatattgatgagtgcatccagaatggggttctttgtaaaaacggtcgatgcgtgaacacagatggaagtttccagtgcatttgcaatgccggctttgaattaactacagatggaaaaaactgtgttgatcatgatgaatgtacaactaccaacatgtgtttgaatggaatgtgcatcaatgaagatggcagcttcaagtgcatctgcaaaccaggatttgtcttggctccaaatgggcgttactgtactgatgttgatgaatgccagaccccaggaatctgcatgaatgggcactgcatcaacagtgaagggtccttccgctgtgactgtcccccaggcctggctgtgggcatggatggacgtgtgtgtgttgatactcacatgcgcagtacctgctatggaggaatcaagaaaggagtgtgtgtgcgtcctttccccggtgcagtgaccaagtccgaatgctgctgtgccaatccagactatggttttggagaaccctgccagccatgccctgcaaaaaattcagctgaattccacggcctttgtagtagtggagtaggtatcactgtggatggaagagatatcaatgaatgtgctttggatcctgatatatgtgccaatgggatttgtgaaaacttacgtggtagttaccgttgtaattgcaacagtggctatgaaccagatgcctctggaagaaactgtattgacattgatgaatgtttagtaaacagactgctttgtgataacggattgtgccgaaacacgccaggaagttacagctgtacgtgcccaccagggtatgtgttcaggactgagacagagacctgtgaagatataaatgaatgtgaaagcaacccatgtgtcaatggggcctgcagaaacaaccttggatctttcaattgtgaatgttcgcccggcagcaaactcagctccacaggattgatctgtattgacagcctgaaggggacctgttggctcaacatccaggacagccgctgtgaggtgaatattaatggagccactctgaaatctgaatgctgtgccaccctcggagccgcctgggggagcccctgtgagcggtgtgaactagatacagcttgcccaagagggcttgccaggattaaaggtgttacgtgtgaagatgttaatgagtgtgaggtgttccctggcgtttgtccaaatggacgctgtgtcaacagtaagggatcttttcattgcgagtgccctgaaggccttacgttggatgggactggccgtgtatgtttggatattcgcatggagcagtgttacttgaagtgggatgaagatgaatgcatccaccccgttcctggaaagttccgcatggatgcctgctgctgtgctgtcggggcggcttggggcaccgagtgtgaggagtgccccaaacctggcaccaaggaatacgagacgctgtgcccccgcggggctggctttgctaaccgaggggatgttcttactgggcggccattttacaaagacatcaatgaatgcaaagcatttcctgggatgtgcacttatgggaagtgcagaaatacaatcggaagcttcaaatgccgttgcaatagtggctttgctctagacatggaggaaagaaactgcacggacatcgacgagtgcaggatttctcctgacctctgtggcagtggaatctgcgtcaatacaccgggcagctttgagtgcgagtgcttcgaaggctatgaaagtggcttcatgatgatgaagaactgcatggacattgacgaatgtgaacgtaaccctctcctttgtaggggtggcacctgtgtgaacactgagggcagctttcagtgtgactgcccactgggacacgagctgtcaccatcccgtgaggactgtgtggatattaatgaatgctccctgagtgacaatctctgcagaaatggaaaatgtgtgaacatgattggaacctatcagtgctcttgcaatcctggatatcaggctacgccagaccgccagggctgtacagatattgatgaatgtatgataatgaacggaggctgtgacacccagtgcacaaattcagagggaagctacgaatgcagctgcagtgagggttatgccctgatgccagatgggagatcgtgtgcagacattgatgaatgtgaaaacaatcctgatatctgtgatggcggccagtgtaccaacattcctggagagtatcgctgcctctgctatgatggcttcatggcttccatggacatgaaaacatgcattgatgtcaatgaatgtgacctaaattcaaatatctgcatgtttggggaatgtgagaacacaaagggatccttcatttgccactgtcagctgggttactcagtgaagaaggggaccacaggatgtacagatgtggatgagtgtgaaattggtgctcataactgcgacatgcatgcctcatgtctgaatatcccaggaagcttcaagtgtagctgcagagaaggctggattggaaacggcatcaagtgtattgatctggacgaatgttctaatggaacccaccagtgtagcatcaatgctcagtgtgtaaataccccgggctcataccgctgtgcctgctccgaaggtttcactggtgatggctttacctgctcagatgttgatgagtgtgcagaaaacataaacctctgtgagaacggacagtgccttaatgtcccgggtgcatatcgctgcgagtgtgagatgggcttcactccagcctcagacagcagatcctgccaagatattgatgaatgctccttccaaaacatttgtgtctttggaacatgtaataacctgcctggaatgtttcattgcatctgcgatgatggttatgaattggacagaacaggagggaactgtacagatattgatgagtgtgcagatcctataaactgtgtcaatggcctatgtgtcaacacgcctggtcgctatgagtgtaactgcccacccgattttcagttgaacccaactggtgtgggttgtgttgacaaccgtgtgggcaactgctacctgaagtttggacctcgaggagatgggagtctgtcttgcaacaccgagatcggggtgggcgtcagtcgctcttcatgctgctgctctctgggaaaggcctggggaaacccctgtgagacatgcccccctgtcaatagcactgaatattacaccctgtgtcccggaggtgaaggcttcagacctaaccccatcacaatcattttagaagacattgacgaatgccaggagttaccaggtctctgccagggtggaaactgcatcaacacttttgggagcttccagtgtgagtgcccacaaggctactacctcagcgaggatacccgcatctgtgaagatattgatgagtgttttgcacatcctggtgtgtgtgggcctgggacctgctataacaccctgggaaattacacctgcatttgcccacctgagtacatgcaggtcaatggaggccacaactgcatggacatgagaaaaagcttttgctaccgaagctataatggaaccacttgtgagaatgagttgcctttcaatgtgacaaaaaggatgtgctgctgcacatataatgtgggcaaagcctggaacaaaccttgtgaaccatgcccaactccaggaacagctgactttaaaaccatatgtggaaatattcctggattcacctttgacattcacacaggaaaagctgttgacattgatgaatgtaaagagattccaggcatttgtgcaaatggtgtgtgcattaaccagattggcagtttccgctgtgaatgccctacaggattcagttacaatgacctgctgttggtttgtgaagatatagatgagtgcagcaatggtgataatctctgccagcggaatgcagactgcatcaatagtcctggtagttaccgctgtgaatgtgccgcgggtttcaaactttcacccaatggggcctgtgtagatcgcaatgaatgtttagaaattcctaacgtttgcagtcatggcttgtgtgttgatctgcaaggaagttaccagtgcatctgccacaatggctttaaggcttctcaggaccagaccatgtgcatggatgttgatgagtgcgagcggcatccatgtggaaatggaacttgtaaaaacaccgttggatcctataactgtctgtgctacccagggtttgaactcactcataataatgattgcctggacatagatgagtgcagttccttttttggtcaggtgtgcagaaatggacgttgttttaatgaaattggttctttcaagtgtctatgtaacgaaggttatgaacttaccccagatggcaaaaactgtatagacactaatgagtgtgtcgcccttcccggctcttgctctcctggtacctgtcagaatttggagggatccttcagatgcatctgtcccccagggtatgaagtaaaaagcgagaactgcattgatataaatgaatgtgatgaagatcccaacatttgtctttttggttcctgtactaatactccagggggcttccagtgcctctgcccccctggctttgtactatctgataatggacggagatgctttgatactcgccagagcttctgcttcacaaattttgaaaatggaaagtgttctgtacccaaagctttcaacaccacaaaagcaaaatgctgctgtagtaagatgccaggagagggctggggggacccctgtgagctgtgccccaaagacgatgaagttgcatttcaggatttgtgtccatatggccatggaactgtccctagtcttcatgatacacgtgaagatgtcaatgagtgtcttgagagcccaggcatttgttcaaatggtcaatgtatcaacaccgacggatcttttcgctgtgaatgtccaatgggctacaaccttgactacactggagtacgctgtgtggatactgatgagtgttcaatcggcaatccgtgtggaaatggtacatgcaccaatgttattgggagttttgaatgcaattgcaatgaaggctttgagccagggcccatgatgaattgtgaagatatcaacgaatgtgcccagaacccactgctgtgtgctttccgctgcatgaacacttttgggtcctatgaatgcacgtgcccgattggctatgccctcagggaagatcaaaagatgtgcaaagatctggatgaatgtgctgaagggttacacgactgtgaatctaggggcatgatgtgtaagaatctaatcggcaccttcatgtgcatctgccctcctggaatggcccgaaggcccgatggagaaggctgtgtagatgaaaatgaatgcaggaccaagccaggaatctgtgaaaatggacgttgtgttaacattattggaagctatagatgtgagtgtaatgaaggattccagtcaagttcttcaggcactgaatgccttgacaatcgacagggtctctgctttgcagaggtactgcagacaatatgtcaaatggcatccagtagtcgcaatctcgtcactaagtcagaatgctgctgtgatggtgggcgaggctggggccaccagtgcgagctttgcccacttcctggaactgcccagtacaaaaagatatgtcctcatggcccaggatatacaactgatggaagagatattgatgaatgtaaggtaatgccaaacctctgcaccaatggtcagtgcatcaataccatgggctcattccgatgcttctgcaaggttggctacaccacagacatcagtggaacctcttgtatagaccttgatgaatgctcccagtccccgaaaccatgcaactacatctgcaagaacactgaggggagttatcagtgttcatgtccgagggggtatgtcctgcaagaggatggaaagacatgcaaagaccttgatgaatgtcaaacaaagcagcataactgccagttcctctgtgtcaacaccctgggggggtttacctgtaaatgtccacctggtttcacacagcatcacactgcttgtatcgacaacaacgaatgtgggtctcaaccttcgctttgtggagcaaagggaatctgtcaaaacactccaggcagtttcagctgtgaatgccaaagagggttctctcttgatgccaccggactgaactgtgaagatgttgatgaatgtgatgggaaccacaggtgccaacacggctgccagaacatcctgggtggctacagatgtggctgcccccaaggctacatccagcactaccagtggaatcagtgtgtcgatgagaatgaatgctccaatcccaatgcctgtggctctgcttcctgctacaacaccctggggagttacaagtgcgcctgcccctcggggttctccttcgaccagttctccagtgcctgccacgacgtgaatgagtgctcgtcctccaagaacccctgcaattacggctgctctaacacggaggggggctacctctgtggctgcccccctgggtattacagagtgggacaaggccactgtgtctcaggaatgggatttaacaaggggcagtacctgtcactggatacagaggtcgatgaggaaaatgctctgtccccagaagcatgctacgagtgcaaaatcaacggctattctaagaaagacagcaggcagaagagaagtattcatgaacctgatcccactgctgttgaacagatcagcctagagagtgtcgacatggacagccccgtcaacatgaagttcaacctctcccacctcggctctaaggagcacatcctggaactaaggcccgccatccagcccctcaacaaccacatccgttatgtcatctctcaagggaacgatgacagcgtcttccgcatccaccaaaggaatgggctcagctacttgcacacggccaagaagaagctcatgcccggcacatacacactggaaatcactagcatccctctctacaagaagaaggagcttaagaaactggaagagagcaatgaggatgactacctcctaggggagcttggggaggctctcagaatgaggctgcagattcagctctattaacccttcacagacttgggcccaggctcaaatcctagcacagccagtctgcagaagcatttgaaaagtcaaggactaattttaaagaggaaaaataataataactcttgtttctttcctccctgtcttagactttgaatgttgaccctcacagggagggataatttagactctggtatggccaaagatttgagcacaaaggcaaccgtggttactgtattttttatataacttcattttaaaatatattaaaagaaacctaaatgttcaagatatcagcatatggcactaaatgcacaaaaataatgtgagctttttttttttttcctgttagcagtctgtaacactttgggtattttgctatagttgctaattaaaaaaatatagatgtttatttatttttaatgcagtaatatatggagaaatgaacaaactatgtaaacaaaaagggaaactcacttgtttttctttagatttataaatttgagctattttttttagaggtgctttttaaaaatccaatagatacaagagatgtttcctttggttttctgccagtcatccagctgatacacacctgatgattttaaagaaagccacacagagctgaatgggcagtgtaatcaataatttaaaaaacatgaatgtcattagatcctttataacgtagatcgaagccaaagcagctcatttgtgacaacatttcatatcaccagacacaccaggcaacagaagttgaagcacaaccactgtagcaaaataccttgactgcttgtgagaccattagcattgcaggccaaaccgtactgtatttccttctcataacctcaaggaaccatatgtgctacccacaacacctcattcttacccagggtgcgctgcgtcctcatggtactgtaggcagctgaagaaccgccgttcccttgaaagggaacacctggcattctgtggtgtttcgtgctgtcttaaataatggtgcatttattatgttcaagttatttcaggattgccatatgtgcaaacaaatcatgcaatgcagccaaggaatatatgttgttgttgttgttttaaacccattttttttttagaattttcattaatactgtagttatacaccatatgcctcattttatcatagcctattgtgtatgaaagatgtttgtacaatgaattgatgtttagtttgctttagtcatttaaaaagatattgtaccaggatgtgctattaagagcacgtatccattattcttctcaacccaagaacctgtttcctggaccagtgaccaaacctcatatgtgaaatggccaaagcacatgcaggctcctggttgttcctctcaaacctgtgctgaccaaagattagtaaccagttatacccagtattttgaggttttattgtttttttaataactaaaaagaaaaaaggaacagtgtaaatttgtaatcaagagtttgtgaggaaaaacttatggtttttggttttgtttgtttttgtaggtctgtgtatcaaatatgacacttttcttgcaataaagcttattttggggta

SEQ ID NO: 2477 - DNA, 2775 bp, Homo sapiens; identical to SEQ ID NO: 556

SEQ ID NO: 2478 - DNA, 1527 bp, Homo sapiens
ggcggacaaagcccgattgttcctgggccctttccccatcgcgcctgggcctgctccccagcccggggcaggggcgggggccagtgtggtgacacacgctgtagctgtctccccggctggctggctcgctctctcctggggacacagaggtcggcaggcagcacacagagggacctacgggcagctgttccttcccccgactcaagaatccccggaggcccggaggcctgcagcaggagcggccatgaagaagctgatggtggtgctgagtctgattgctgcagcctgggcagaggagcagaataagttggtgcatggcggaccctgcgacaagacatctcacccctaccaagctgccctctacacctcgggccacttgctctgtggtggggtccttatccatccactgtgggtcctcacagctgcccactgcaaaaaaccgaatcttcaggtcttcctggggaagcataaccttcggcaaagggagagttcccaggagcagagttctgttgtccgggctgtgatccaccctgactatgatgccgccagccatgaccaggacatcatgctgttgcgcctggcacgcccagccaaactctctgaactcatccagccccttcccctggagagggactgctcagccaacaccaccagctgccacatcctgggctggggcaagacagcagatggtgatttccctgacaccatccagtgtgcatacatccacctggtgtcccgtgaggagtgtgagcatgcctaccctggccagatcacccagaacatgttgtgtgctggggatgagaagtacgggaaggattcctgccagggtgattctgggggtccgctggtatgtggagaccacctccgaggccttgtgtcatggggtaacatcccctgtggatcaaaggagaagccaggagtctacaccaacgtctgcagatacacgaactggatccaaaaaaccattcaggccaagtgaccctgacatgtgacatctacctcccgacctaccaccccactggctggttccagaacgtctctcacctagaccttgcctcccctcctctcctgcccagctctgaccctgatgcttaataaacgcagcgacgtgagggtcctgattctccctggttttaccccagctccatccttgcatcactggggaggacgtgatgagtgaggacttgggtcctcggtcttacccccaccactaagagaatacaggaaaatcccttctaggcatctcctctccccaacccttccacacgtttgatttcttcctgcagaggcccagccacgtgtctggaatcccagctccgctgcttactgtcggtgtccccttgggatgtacctttcttcactgcagatttctcacctgtaagatgaagataaggatgatacagtctccataaggcagtggctgttggaaagatttaaggtttcacacctatgacatacatggaatagcacctgggccaccatgcactcaataaagaatgaattttattatgaaaaaaaaaaaaaaaa

SEQ ID NO: 2479 - DNA, 16179 bp, Homo sapiens; identical to SEQ ID NO: 2435

SEQ ID NO: 2480 - DNA, 2165 bp, Homo sapiens; identical to SEQ ID NO: 1865

SEQ ID NO: 2481 - DNA, 897 bp, Homo sapiens; identical to SEQ ID NO: 580

SEQ ID NO: 2482 - DNA, 897 bp, Homo sapiens; identical to SEQ ID NO: 580

SEQ ID NO: 2483 - DNA, 6276 bp, Homo sapiens; identical to SEQ ID NO: 2439

SEQ ID NO: 2484 - DNA, 2562 bp, Homo sapiens; identical to SEQ ID NO: 119

SEQ ID NO: 2485 - DNA, 2207 bp, Homo sapiens; identical to SEQ ID NO: 566

SEQ ID NO: 2486 - DNA, 4509 bp, Homo sapiens
actgagcatttctaagggagttgaggctggtggctcctccttccttcctactggtgcttccacctgccttggtctgagttgcagtccatggggcagcgcctaagtgtctgagcacacttaagaatctctagtggtttatgacccagactttgccctaccacctcagtcttctgaatgttctcttccctggaccctgctccagacactttaaattcagaagaggaaaatgtgcccagcctgcctggagaaaagtgtctgctcctagccaagatctcctcatcacaaaagtaatgtgggccatggagtcaggccacctcctctgggctctgctgttcatgcagtccttgtggcctcaactgactgatggagccactcgagtctactacctgggcatccgggatgtgcagtggaactatgctcccaagggaagaaatgtcatcacgaaccagcctctggacagtgacatagtggcttccagcttcttaaagtctgacaagaaccggatagggggaacctacaagaagaccatctataaagaatacaaggatgactcatacacagatgaagtggcccagcctgcctggttgggcttcctggggccagtgttgcaggctgaagtgggggatgtcattcttattcacctgaagaattttgccactcgtccctataccatccaccctcatggtgtcttctacgagaaggactctgaaggttccctatacccagatggctcctctgggccactgaaagctgatgactctgttcccccggggggcagccatatctacaactggaccattccagaaggccatgcacccaccgatgctgacccagcgtgcctcacctggatctaccattctcatgtagatgctccacgagacattgcaactggcctaattgggcctctcatcacctgtaaaagaggagccctggatgggaactcccctcctcaacgccaggatgtagaccatgatttcttcctcctcttcagtgtggtagatgagaacctcagctggcatctcaatgagaacattgccacttactgctcagatcctgcttcagtggacaaagaagatgagacatttcaggagagcaataggatgcatgcaatcaatggctttgtttttgggaatttacctgagctgaacatgtgtgcacagaaacgtgtggcctggcacttgtttggcatgggcaatgaaattgatgtccacacagcatttttccatggacagatgctgactacccgtggacaccacactgatgtggctaacatctttccagccacctttgtgactgctgagatggtgccctgggaacctggtacctggttaattagctgccaagtgaacagtcactttcgagatggcatgcaggcactctacaaggtcaagtcttgctccatggcccctcctgtggacctgctcacaggcaaagttcgacagtacttcattgaggcccatgagattcaatgggactatggcccgatggggcatgatgggagtactgggaagaatttgagagagccaggcagtatctcagataagtttttccagaagagctccagccgaattgggggcacttactggaaagtgcgatatgaagcctttcaagatgagacattccaagagaagatgcatttggaggaagataggcatcttggaatcctggggccagtgatccgggctgaggtgggtgacaccattcaggtggtcttctacaaccgtgcctcccagccattcagcatgcagccccatggggtcttttatgagaaagactatgaaggcactgtgtacaatgatggctcatcttaccctggcttggttgccaagccctttgagaaagtaacataccgctggacagtcccccctcatgccggtcccactgctcaggatcctgcttgtctcacttggatgtacttctctgctgcagatcccataagagacacaaattctggcctggtgggcccgctgctggtgtgcagggctggtgccttgggtgcagatggcaagcagaaaggggtggataaagaattctttcttctcttcactgtgttggatgagaacaagagctggtacagcaatgccaatcaagcagctgctatgttggatttccgactgctttcagaggatattgagggcttccaagactccaatcggatgcatgccattaatgggtttctgttctctaacctgcccaggctggacatgtgcaagggtgacacagtggcctggcacctgctcggcctgggcacagagactgatgtgcatggagtcatgttccagggcaacactgtgcagcttcagggcatgaggaagggtgcagctatgctctttcctcatacctttgtcatggccatcatgcagcctgacaaccttgggacatttgagatttattgccaggcaggcagccatcgagaagcagggatgagggcaatctataatgtctcccagtgtcctggccaccaagccacccctcgccaacgctaccaagctgcaagaatctactatatcatggcagaagaagtagagtgggactattgccctgaccggagctgggaacgggaatggcacaaccagtctgagaaggacagttatggttacattttcctgagcaacaaggatgggctcctgggttccagatacaagaaagctgtattcagggaatacactgatggtacattcaggatccctcggccaaggactggaccagaagaacacttgggaatcttgggtccacttatcaaaggtgaagttggtgatatcctgactgtggtattcaagaataatgccagccgcccctactctgtgcatgctcatggagtgctagaatctactactgtctggccactggctgctgagcctggtgaggtggtcacttatcagtggaacatcccagagaggtctggccctgggcccaatgactctgcttgtgtttcctggatctattattctgcagtggatcccatcaaggacatgtatagtggcctggtggggcccttggctatctgccaaaagggcatcctggagccccatggaggacggagtgacatggatcgggaatttgcattgttgttcttgatttttgatgaaaataagtcttggtatttggaggaaaatgtggcaacccatgggtcccaggatccaggcagtattaacctacaggatgaaactttcttggagagcaataaaatgcatgcaatcaatgggaaactctatgccaaccttaggggtcttaccatgtaccaaggagaacgagtggcctggtacatgctggccatgggccaagatgtggatctacacaccatccactttcatgcagagagcttcctctatcggaatggcgagaactaccgggcagatgtggtggatctgttcccagggacttttgaggttgtggagatggtggccagcaaccctgggacatggctgatgcactgccatgtgactgaccatgtccatgctggcatggagaccctcttcactgttttttctcgaacagaacacttaagccctctcaccgtcatcaccaaagagactgaaaaagcagtgccccccagagacattgaagaaggcaatgtgaagatgctgggcatgcagatccccataaagaatgttgagatgctggcctctgttttggttgccattagtgtcacccttctgctcgttgttctggctcttggtggagtggtttggtaccaacatcgacagagaaagctacgacgcaataggaggtccatcctggatgacagcttcaagcttctgtctttcaaacagtaacatctggagcctggagatatcctcaggaagcacatctgtagtgcactcccagcaggccatggactagtcactaaccccacactcaaaggggcatgggtggtggagaagcagaaggagcaatcaagcttatctggatatttctttctttatttattttacatggaaataatatgatttcactttttctttagtttctttgctctacgtgggcacctggcactaagggagtaccttattatcctacatcgcaaatttcaacagctacattatatttccttctgacacttggaaggtattgaaatttctagaaatgtatccttctcacaaagtagagaccaagagaaaaactcattgattgggtttctacttctttcaaggactcaggaaatttcactttgaactgaggccaagtgagctgttaagataacccacacttaaactaaaggctaagaatataggcttgatgggaaattgaaggtaggctgagtattgggaatccaaattgaattttgattctccttggcagtgaactactttgaagaagtggtcaatgggttgttgctgccatgagcatgtacaacctctggagctagaagctcctcaggaaagccagttctccaagttcttaacctgtggcactgaaaggaatgttgagttacctcttcatgttttagacagcaaaccctatccattaaagtacttgttagaacactgaaaaaaaaaaaaaaaaaaa

SEQ ID NO: 2487 - DNA, 2232 bp, Homo sapiens; identical to SEQ ID NO: 540

SEQ ID NO: 2488 - DNA, 2958 bp, Homo sapiens
atccgccctgcccgcagcctctcctccccttcctccccgccgccacggccccgtaggtgctcggggacccaccttccacctagcacgggttcgttcccctctcccggcctggcccgggctccccggtggccgccgccccctcgccgcccccgccttctcccggggagggggtcaggtgggcgggcactattgttgtaggagccggcgccagattcctcagccgcgctcggggtgggaccggctgggtttgggggggtggggtggggggagcggtgatctgagctccgagcagctggtcttcgcggctcgctccctccttcgcgctctctcgctccctgccgccgcccgcagggctgcggggctcggtggcatctcccgggcgcggcccgcagtccttgcccctgcctccgggccgctcccgcccccggcgccgctcgctcccccgacccggactcccccatgtatgacgactcctacgtgcccgggtttgaggactcggaggcgggttcagccgactcctacaccagccgcccatctctggactcagacgtctccctggaggaggaccgggagagtgcccggcgtgaagtagagagccaggctcagcagcagctcgaaagggccaagcacaaacctgtggcatttgcggtgaggaccaatgtcagctactgtggcgtactggatgaggagtgcccagtccagggctctggagtcaactttgaggccaaagattttctgcacattaaagagaagtacagcaatgactggtggatcgggcggctagtgaaagagggcggggacatcgccttcatccccagcccccagcgcctggagagcatccggctcaaacaggagcagaaggccaggagatctgggaacccttccagcctgagtgacattggcaaccgacgctcccctccgccatctctagccaagcagaagcaaaagcaggcggaacatgttcccccatatgacgtggtgccctccatgcggcctgtggtgctggtgggaccctctctgaaaggttatgaggtcacagacatgatgcagaaggctctcttcgacttcctcaaacacagatttgatggcaggatctccatcacccgagtcacagccgacctctccctggcaaagcgatctgtgctcaacaatccgggcaagaggaccatcattgagcgctcctctgcccgctccagcattgcggaagtgcagagtgagatcgagcgcatatttgagctggccaaatccctgcagctagtagtgttggacgctgacaccatcaaccacccagcacagctggccaagacctcgctggcccccatcatcgtctttgtcaaagtgtcctcaccaaaggtactccagcgtctcattcgctcccgggggaagtcacagatgaagcacctgaccgtacagatgatggcatatgataagctggttcagtgcccaccggagtcatttgatgtgattctggatgagaaccagctggaggatgcctgtgagcacctggctgagtacctggaggtttactggcgggccacgcaccacccagcccctggccccggacttctgggtcctcccagtgccatccccggacttcagaaccagcagctgctgggggagcgtggcgaggagcactccccccttgagcgggacagcttgatgccctctgatgaggccagcgagagctcccgccaagcctggacaggatcttcacagcgtagctcccgccacctggaggaggactatgcagatgcctaccaggacctgtaccagcctcaccgccaacacacctcggggctgcctagtgctaacgggcatgacccccaagaccggcttctagcccaggactcagagcacaaccacagtgaccggaactggcagcgcaaccggccttggcccaaggatagctactgacagcctcctgctgccctaccctggcaggcacaggcgcagctggctggggggcccactccaggcagggtggcgttagactggcatcaggctggcactaggctcagcccccaaaaccccctgcccagccccagcttcagggctgcctgtggtcccaaggttctgggagaaacaggggaccccctcacctcctgggcagtgacccctactaggctcccattccaggtactagctgtgtgttctgcacccctggcaccttcctctcctcccacacaggaagctgccccactgggcagtgccctcaggccaggatccccttagcagggtccttcccaccagactcagggaagggatgccccattaaagtgacaaaagggtggggtgtgggcaccatggcatgaggaagaaacaaggtccctgagcaggcacaagtcctgacagtcaagggactgctttggcatccagggcctccagtcacctcactgccatacattagaaatgagacaatcaaagcccccccagggtggcacacccatctgtttgctggggtgtggcagccacatccaagactggagcagcaggctggccacgctcgggccagagagagctcacagctgaagctcttggagggaagggctctcctcaccctgccaggaagcttcttaacatgtgacaggaccagggaccaggagcatggtgaagccaagtggcagatgggagccaacctggatgggggtttggggaaggagggcatgtgtagcagagaacttaggggggcctccttgcctttctcattcttttgccctgcatcctgtcatttctgttcttgtccctcatacatctttggagaaccgggctccagactttgttccctgactcatagctgccgcttgttaggttagggttagatggggagagacagggcacagaggacctgtctccccggctactcttgccttatggctctagtgtgtgacctacagagcatgctccacaagcccctgcctcacctcactgtcatcactaataaacatcatgcacagtccc

SEQ ID NO: 2489 - DNA, 2267 bp, Homo sapiens; identical to SEQ ID NO: 630

SEQ ID NO: 2490 - DNA, 4426 bp, Homo sapiens; identical to SEQ ID NO: 2388

SEQ ID NO: 2491 - DNA, 3557 bp, Homo sapiens; identical to SEQ ID NO: 2169

SEQ ID NO: 2492 - DNA, 663 bp, Homo sapiens
caggacacgtgggtgggggaagctgagcgctgagaccaagggctaaagctgggaggtgagtctgtcaccttgagccgggcgagcgctgtgggccaagcaggggttgcagggtagtaggagtgcagactgaaaaaatgcagaccgccggggcattattcatttctccagctctgatccgctgttgtaccaggggtctaatcaggcctgtgtctgcctccttcttgaatagcccagtgaattcatctaaacagccttcctacagcaacttcccactccaggtggccagacgggagttccagaccagtgttgtctcccgggacattgacacagcagccaagtttattggtgctggggcagccacagttggtgtggctggttcaggggctggcattggaaccgtgtttggcagcttgatcattggctatgccaggaacccgtctctcaagcagcagctcttctcctatgccattcttggctttgccctgtctgaggccatggggcttttctgtttgatggtcgccttcctcatcctcttcgccatgtgaggctccatggggggtcaccggcctgttgctactgcaactccacaccattcttggtgctggggtgtgttaagctttaccattaaacacaacgtttctctaaaaaaaaaaaaaaaaaaaa

SEQ ID NO: 2493 - DNA, 1331 bp, Homo sapiens; identical to SEQ ID NO: 2376

SEQ ID NO: 2494 - DNA, 5051 bp, Homo sapiens; identical to SEQ ID NO: 2447

SEQ ID NO: 2495 - DNA, 5335 bp, Homo sapiens
gcttctctccatcttgtgattcctttttcctcctgaaccctccagtgggggtgcgagtttgtctttatcaccccccatcccaccgccttcttttcttctcgctctcctacccctccccagcttggtgggcgcctctttcctttctcgccccctttcatttttatttattcatatttatttggcgcccgctctctctctgtccctttgcctgcctccctccctccggatccccgctctctccccggagtggcgcgtcgggggctccgccgctggccaggcgtgatgttgcacgtggagatgttgacgctggtgtttctggtgctctggatgtgtgtgttcagccaggacccgggctccaaggccgtcgccgaccgctacgctgtctactggaacagcagcaaccccagattccagaggggtgactaccatattgatgtctgtatcaatgactacctggatgttttctgccctcactatgaggactccgtcccagaagataagactgagcgctatgtcctctacatggtgaactttgatggctacagtgcctgcgaccacacttccaaagggttcaagagatgggaatgtaaccggcctcactctccaaatggaccgctgaagttctctgaaaaattccagctcttcactcccttttctctaggatttgaattcaggccaggccgagaatatttctacatctcctctgcaatcccagataatggaagaaggtcctgtctaaagctcaaagtctttgtgagaccaacaaatagctgtatgaaaactataggtgttcatgatcgtgttttcgatgttaacgacaaagtagaaaattcattagaaccagcagatgacaccgtacatgagtcagccgagccatcccgcggcgagaacgcggcacaaacaccaaggatacccagccgccttttggcaatcctactgttcctcctggcgatgcttttgacattatagcacagtctcctcccatcacttgtcacagaaaacatcagggtcttggaacaccagagatccacctaactgctcatcctaagaagggacttgttattgggttttggcagatgtcagatttttgttttctttctttcagcctgaattctaagcaacaacttcaggttgggggcctaaacttgttcctgcctccctcaccccaccccgccccacccccagccctggcccttggcttctctcacccctcccaaattaaatggactccagatgaaaatgccaaattgtcatagtgacaccagtggttcgtcagctcctgtgcattctcctctaagaactcacctccgttagcgcactgtgtcagcgggctatggacaaggaagaatagtggcagatgcagccagcgctggctagggctgggagggttttgctctcctatgcaatatttatgccttctcattcagaactgtaagatgatcgcgcagggcatcatgtcaccatgtcaggtccggaggggaggtattaagaatagatacgatattacaccatttcctataggagtatgtaaatgaacaggcttctaaaaggttgagacactggtttttttttttaatatgactgtcttaaagcattcttgacagcaaaacttgtgctctctaaaagaagccttttttttttttctaggaggcaggttgggtgtggaatgctaatacagagcaggtgtgaaaacagagaaaactacaggtttgctgggggtgtgtatgtgtgagtgcctctaatttttttggtgactgggcagtgcacaccagatattttttctttgaatacagatcaccatggtgctacaactttttttttttttttttttttttttttttttttttttaagaaactcaaagaggcatttttatgaataaagtgaccttccccaaggctgacaagccagggttgatgagtgcatagtggaatagctttggatactcctctgggggatgacatgtaccaaggagaggaccgcagtggccagaggagacatgatttggctttgctggagcgccagtgtgctgtggcctttccccgcctcccaccctagtacccacgttttgctccacactccttgaccgcaggggctcggacacaaacccctgtcaccaggagagtcagtcagcactacttgggagggctaaagggaaatttggaaataaaattccaaagtttggagtaaaaaaattcaagtgttgattttatattctttccctttctgacacagcctaaagcgtagggggaacatgtgtttatctgtgggagataaacaagatggagtcccaaagactttaacaaaatatttttttaaaaatccactagaatagaaaatacattatttagatatactttatgctgagagtgagtatatatgcttgtcctatttaaacttgtgagaaaaagtggtatcccttgatacatttagaaatatgggggctatcttgtttcattgtgggggtggggcagaaggagaataaatgcaggatgaccctgttgaaggaatcttagcatggccaacaggggacgtttccagtcgattaccaggaaatgcaagccttggggtttctactggtggtggggctgtcatgaactttaaaatccaaagcctagacaaggaaaagtgttagaccaattgaaaagcaatccagccctttttttttttttttttttggctttgcacgacatgtcaacagaaaccatgcctttcaatataagaaataaatgtgatgatcatgtaaaatgtgaaaaattgaaagcattccagcaaaataagaattttttatatatttgttttttaagatgtatatgttaaaaaaagagaaggtcgcattatggacagacttcgtgaatgggaatttgcttagaattgtgagtagttctgaattagaaaagtatgtgaaggaaaggcagctgtaaacgtattgtgccctggagagttgtacacatgttgaaatgtaatctgggcttacctgatccatttggagtggatgtcactgccgagtctgttctcacatggaaccatgtgtgtggggttgccagcctcacagatacaatcaatcctattcccctctgacataaggaactcctctggagtggcagagtcttatcacagaaggcagccaccatttcaccaaaacaaaagttcacggcattcaattcctttttcctttagctatttatatatgcagtactctcagtcatatgcagaaatacttttttttttttaattaatagttacaggcttgttggtccagtgggatttgggtagggggagaaagataccttctaaaatggatcaatagaaccaaaataatacagcatgttctataaccacaaggaaatcaaatgatcctgtcatgattccagttagtcataactatgttagcagtgctaaatgcattttagaaatggtgacttctgtggttttcctagcatttgtctctaacaaatggtgaaataattactcatggccctctctgccattgtctttcattttttcacagtgaaattagacccctttacttcaccattctgccactgcaaattaagtataaagaaaatagcaagagtgtccacaccagtagacagtaagcttctctacctgtaagtgatgaaatcatagctaatgcacttgccatggagttttcaagatgattggtgtcagacagttttcactttgtttaaaaagtgttggtggccttttgtggtggtgttacaatcctctgggggcttaggaggatgttgatgcaacttttagaagcttttaatttcaaaaacaactcaaaaatctgaaggacagtcatagctgccactcagccccagttagtcaaaccccagtgacctttgcccctggttgccaagggctttgcaacatcaagcagggaaataaggatctgtctgtttagtggataccgtgtatcctttaatagaccaggtaacagttcgtgttagtttagactattgttttgtactgtactttcttgggtggcagaggaaagaaaagtaaaacattaaaaaaaaaaaaaaaactgcgttctttaaattctgtattattagcaacctctgttgtacatagtgtttgataataaagtattaatttgattcttatgtcttttgtaagtgagaacaatagactttcaggatacaaaacatgcattgaggctttgaaacatccaatgtgtaccatggctgaaaaaaagagtcacaagtggctgagacactgctccatacaggactcatgtgtggtcattgcccacccaatcttatgactccatcatcttgggacctggaacaacatgacttttttgatcgatattttgtcctcggtgttttcaaggtctgatgttggagccctgtggcccaccctcccttctccaccagcatgttggtttgaaaaggatagggaatttagaaacagttctgtactttggtttggtttggttttctgtttgtgattgttttcatggactgttttattttttcccaggaagagtctttatcaatatcatgtgcagctcactcatggaaatggttgcaaaccaatcagtgtaggaagcttaaatggggctgtttccctctctgtgtcgttgtgaaaggaagagtcacacagtacctgtggattttcagggactctgtttttctccggtgccttagcaacggcagcagccatttgtattattttcaaataattagaaaaacagttttcaactcctcctttccattcattgctctcagagttgtggtcactgacttttcttttgaaaaccgcctccaccaacacccccgtttgcctacaccaccccccttttacttagtatgtttattttttgtgtgtctcttgccttcctcccacgttttatttcccctcagagctgtgaatgggcaggtctgtctctggtttggcatcactgagtttttcccatgcattggccccagggctgctaggatgtgagacaaatctccctacaatgggcttgctcccattgtctgtacagtttaatagatgctggcatgtcggaggttacccatgagtcaaaatccgctctccatgcttactcttgacaccccattgaagccactcattgtgtgtgcgtctgggtgtgaagtccagctccgtgtggtcctgtgcttgtactgccctgctttgcagttcctttgcacttactcatcgagtgctgttttgaaatgctgacattatataaacgtaaaagaaaatgtaaaaaaaaaaaacccacacacaaacaaacccatacgatctgtatttgtatatacacgtgtccgtacaagtataactaaataaaaattaaagattttcatcattttaattgga

SEQ ID NO: 2496 - DNA, 2853 bp, Homo sapiens; identical to SEQ ID NO: 1459

SEQ ID NO: 2497 - DNA, 2928 bp, Homo sapiens
ggcgaagaggcggggtcgcccaagctgccgcgctggcattttctcctggacaaggagagagtgcggctgctgagagccgagcccagcaatcccgatcctctgagtcgtgaagaagggaggcagcgagggggttggggttggggcctgaggcaagcccccaggctccgctcttgccagagggacaggagccatggctcagaaaatggactgtggtgcgggcctcctcggcttccagaatcctgacgcttgtagagcagtctgtcaccccctcccccagcctcctgcctccaccctccctctttctgcattccccactctgtgcgaccccccttattctcaactccgcgatccgcctgccgtcctgagctgctactgcacgcctcttggagcgtccccggctcctgctgaggcctccgtagaagacagcgccttgcttatgcagaccttgatggaggccatccagatctcagaggctccacctactaaccaggccaccgcagctgctagtccccagagttcacagcccccaactgccaatgagatggctgacattcaggtttcagcagctgccgctaggcctaagtcagcctttaaagtccagaatgccaccacaaaaggcccaaatggtgtctatgatttctctcaggctcataatgccaaggatgtgcccaacacgcagcccaaggcagcctttaagtcccaaaatgctaccccaaagggtccaaatgctgcctatgatttttcccaggcagcaaccactggtgagttagctgctaacaagtctgagatggccttcaaggcccagaatgccactactaaagtgggcccaaatgccacctacaatttctctcagtctctcaatgccaatgacctggccaacagcaggcctaagacccctttcaaggcttggaatgataccactaaggccccaacagctgatacccagacccagaatgtaaatcaggccaaaatggccacttcccaggctgacatagagaccgacccaggtatctctgaacctgacggtgcaactgcacagacatcagcagatggttcccaggctcagaatctggagtcccggacaataattcggggcaagaggacccgcaagattaataacttgaatgttgaagagaacagcagtggggatcagaggcgggccccactggctgcagggacctggaggtctgcaccagttccagtgaccactcagaacccacctggcgcaccccccaatgtgctctggcagacgccattggcttggcagaacccctcaggctggcaaaaccagacagccaggcagaccccaccagcacgtcagagccctccagctaggcagaccccaccagcctggcagaacccagtcgcttggcagaacccagtgatttggccaaacccagtaatctggcagaacccagtgatctggccaaaccccattgtctggcccggccctgttgtctggccgaatccactggcctggcagaatccacctggatggcagactccacctggatggcagaccccaccgggctggcagggtcctccagactggcaaggtcctcctgactggccgctaccacccgactggccactgccacctgattggccacttcccactgactggccactaccacctgactggatccccgctgattggccaattccacctgactggcagaacctgcgcccctcgcctaacctgcgcccttctcccaactcgcgtgcctcacagaacccaggtgctgcacagccccgagatgtggcccttcttcaggaaagagcaaataagttggtcaagtacttgatgcttaaggactacacaaaggtgcccatcaagcgctcagaaatgctgagagatatcatccgtgaatacactgatgtttatccagaaatcattgaacgtgcatgctttgtcctagagaagaaatttgggattcaactgaaagaaattgacaaagaagaacacctgtatattctcatcagtacccccgagtccctggctggcatactgggaacgaccaaagacacacccaagctcggtctcctcttggtgattctgggtgtcatcttcatgaatggcaaccgtgccagtgaggctgtcctctgggaggcactacgcaagatgggactgcgtcctggggtgagacatcccctccttggagatctaaggaaacttctcacctatgagtttgtaaagcagaaatacctggactacagacgagtgcccaacagcaaccccccggagtatgagttcctctggggcctccgttcctaccatgagactagcaagatgaaagtgctgagattcattgcagaggttcagaaaagagaccctcgtgactggactgcacagttcatggaggctgcagatgaggccttggatgctctggatgctgctgcagctgaggccgaagcccgggctgaagcaagaacccgcatgggaattggagatgaggctgtgtctgggccctggagctgggatgacattgagtttgagctgctgacctgggatgaggaaggagattttggagatccctggtccagaattccatttaccttctgggccagataccaccagaatgcccgctccagattccctcagacctttgccggtcccattattggtcctggtggtacagccagtgccaacttcgctgccaactttggtgccattggtttcttctgggttgagtgagatgttggatattgctatcaatcgcagtagtctttcccctgtgtgaggctgaagcctcagattccttctaaacacagctatctagagagccacatcctgttgactgaaagtggcatgcaagataaatttatttgctgttccttgtctactgctttttttccccttgtgtgctgtcaagttttggtatcagaaataaacattgaaattgcaaagtgaaaaaaaaaaaaaaaaaa

SEQ ID NO: 2498 - DNA, 5606 bp, Homo sapiens; identical to SEQ ID NO: 2449

SEQ ID NO: 2499 - DNA, 1705 bp, Homo sapiens
gggcggcggcgcgcgggtgcgatcgcggagctgtgaggcgcaggcagggctctggggcacctagagaccggggccggagacgtggcagccgccctgcccgccagaaagtttcctagaagtttgctgggcgcgggcgcacgactgactggctggaccatgaacgtgttccgaatcctcggcgacctgagccacctcctggccatgatcttgctgctggggaagatctggaggtccaagtgctgcaagggcatctctgggaagagccagatcctgtttgctctcgtcttcaccaccaggtacctggacctgttcaccaacttcatctccatctacaacacagtaatgaaggtggtttttctcctctgtgcctatgttacagtgtacatgatatatgggaaattccgtaaaacttttgacagtgagaatgacacattccgcctggagtttcttctggtcccagtcattggcctttccttccttgaaaactacagtttcactctgctggagatcctctggactttctctatctatctggaatcagtggctatcctgccccagctcttcatgatcagcaagactggagaggctgagaccataactactcactacctgttctttctgggtctgtaccgggcactctacctggctaactggatcaggcggtaccagactgagaatttctatgaccaaattgcagtcgtgtctggagtagtacaaaccatcttctactgtgacttcttctacttgtatgtgaccaaagtccttaagggaaagaagttaagtcttccaatgccaatctgaggaccttcagagacagtctacgccttaacaagcacatgaaggaaactattttgaatgttctctttggcaacttatccataatttgggatcaaatgttaaaaccagaaaagtgtttagtgtggatttcagcaaaacctgatcatcccacccagaagaccttctcatcaatagatcgcccttaaagacccattgtaaggtcataaaaaacctcggccacctgcacaaagatggtgcctcactgcaacaagaaaccttaaggtgtcttaccgacgaaataaaaaacataaatgattgttctccaaggcctgagggcaagactcatgatgagcaagtcaaccccaatctggaacaatgtccctcctcttagaatgtcccaactaaagaccagttaaaatattagggtacgttcttgtgaatttccactttccaggtagatgaccaaatttaggtggtcaagatataaaggtgtcagctagttttaagtgtgaaacttatttcactttcacactgccttcaggccagaagcaaaccaaatttaccaggtttggctggaggagttttgtgactcatcttttactggtttgaattttttcaaaccagtggctgatacctgccttgtacttagtaccttaataccaataacctaatggtacttaggcgagtaccatttgcacaatcactgttttacttatgagcagatacagatatatccaaacccttacctactaggtatcctgctagggttttcaattccaattcttgtattaagttttttcctttcagttttaggtgcgaaagtaatcagtcaatccaatatcccccatctttgtcttgaaacaaaaactgttttaagacgtctacgttgaattattcagagaattaagcaataaaagctcacacctta

SEQ ID NO: 2500 - DNA, 2105 bp, Homo sapiens; identical to SEQ ID NO: 547

SEQ ID NO: 2501 - DNA, 4168 bp, Homo sapiens; identical to SEQ ID NO: 156

SEQ ID NO: 2502 - DNA, 3031 bp, Homo sapiens; identical to SEQ ID NO: 2453

SEQ ID NO: 2503 - DNA, 5843 bp, Homo sapiens; identical to SEQ ID NO: 590

SEQ ID NO: 2504 - DNA, 10108 bp, Homo sapiens
gtcacatgagccgcgcgcccgcttcgctccccctcctccccggctgggctgtgtgaatgaagctctgccggctacgtggggcgctcactcaacttggtgtcctggacgccagagccgaccgagcgcgctgcccaccggcggcggacacgggctccgccgctccggacctcggcgacagagcaaatcagttgcctggagttcccagtgaagttgtacctgtgcccgtgcgataacgtcagtggaagctgccccgagtaagtgagggaaatctagaagtttggagcataaaaaaccagcacgaatcaactttacataaacttcatacatttattagcaactgctcgggtttaacttcagggatgttaaatttcgcctagtcccacgggacgatgatcattacttcttaactgcacgcgaaataggagaagaaaaaaggcaaatcaaaacagactgtcccaggtctcagagaagtcatcggagcgctttttcctgctgaattcaccctaggagtttgtttggggctttagccccttggagaaaacagggccacatagctgcctttctatcaagtctccctacaaaactgagaggctctgggaaactcagcctgtgaccccagcgtgggtgaagataggatcaagatggccatgtggcagggtgccatggataacagaggctttcagcaggggagttttagtagcttccagaacagctccagtgatgaagacctgatggacattccagcaaccgctatggatttctccatgagagatgatgttcctcccttagaccgagaagtaggagaggacaagtcgtacaatggtggaggaataggttcttcaaataggatcatggacttcttggaggagccaatccctggtgtagggacctatgatgatttcaatacaattgattgggtgagagagaagtctcgagaccgggataggcaccgagagattaccaataaaagcaaagagtcaacatgggccttaattcacagtgtgagtgatgctttttccggctggttgttgatgctccttattgggcttttatcaggttcgttagctggtttgatagacatctctgctcattggatgacagacttaaaagaaggtatatgcacagggggattctggtttaaccatgaacattgttgctggaactctgagcatgtcacctttgaagagagagacaaatgtccagagtggaatagttggtcccagcttatcatcagcacagatgagggagcctttgcctacatagtcaattatttcatgtacgtcctctgggctctcctatttgccttccttgccgtatctcttgtcaaggtgtttgcgccttatgcctgtggctctggaatccctgagataaaaactatcttgagtggtttcattattaggggctatttgggtaagtggactctggttatcaaaaccatcaccttggtgctggcagtgtcgtctggcttgagcctgggcaaagagggccctctagtgcacgtggcttgctgctgtgggaacatcctgtgccactgcttcaacaaatacaggaagaatgaagccaagcgcagagaggtcttgtcggctgcagcagcagctggtgtatctgtagcctttggagcacctataggtggagtattattcagccttgaagaggtcagctactattttcccctcaaaacattgtggcgttcattctttgctgccttggtggcagcattcactctacgctccatcaatccatttgggaacagccgcctggtactattttatgtggagtttcacaccccatggcatctctttgagctcgtgccattcattctgctgggcatatttggtggtctgtggggagcactgtttatccgcacaaacattgcctggtgtcggaagcgaaagaccacccagttgggcaagtatcctgttatagaggtactcgtcgtgacagccatcactgccatcctggctttccccaatgaatacactcggatgagcacaagtgagctcatttctgagctgtttaatgactgtggccttctggactcctccaagctctgtgattatgagaaccgtttcaacacaagcaaagggggtgaactgcctgacagaccggctggcgtgggagtctacagtgcaatgtggcagctggctttaacactcatactgaaaattgtcattactatattcacctttggcatgaagatcccttctggcctctttatccctagcatggctgttggtgctatagcaggtcgacttctaggagtaggaatggaacagctggcttattaccaccaggaatggaccgtcttcaatagctggtgtagtcagggagctgattgcatcacccccggcctttatgcaatggttggggctgcagcctgcttaggtggggtgactcggatgactgtttctcttgttgtcataatgtttgaactgactggtggcttagaatacatcgtgcctctgatggctgcagccatgacaagcaagtgggtggcagatgctcttgggcgggagggcatctatgatgcccacatccgtctcaatggatacccctttcttgaagccaaagaagagtttgctcataagaccctggcaatggatgtgatgaaaccccggagaaatgatcctttgttgactgtccttactcaggacagtatgactgtggaagatgtagagaccataatcagtgaaaccacttacagtggcttcccagtggtggtatcccgggagtcccaaagacttgtgggctttgtcctccgaagagatctcattatttcaattgaaaatgctcgaaagaaacaggatggggttgttagcacttccatcatttatttcacggagcattctcctccattgccaccatacactccacccactctaaagcttcggaacatcctcgatctcagccccttcactgtgactgaccttacacccatggagatcgtagtggatattttccgaaagctgggactgcggcagtgcctggttacacacaacgggcgattgcttggaatcattaccaaaaaggatgtgttaaagcatatagcacagatggcgaaccaagatcctgattccattctcttcaactagaatcatagagttctggatgtaaagcgggaaggacattacagaccatggatatgttgtattaactgggtacccaaaacacattttccatatttggatggtgaagtcacattagtgtgttgtctctttcctacaagttaaccagttgcactacataatctctggaaattaattttctctttaggagaaattatagttaggcttccatgatgttacattaggaagatatcatgaaagaataaataagattgctatggtttaattatatttgctttttaaaagatttttttaacttaaaaagtagttagccaatatgcaatcactgaaaactatgcaagagaaattccaaccgtcctgacctataacctgtaggaaaccgacgaaaaagtcactcttttgggatctaactgttgttactggaagacgaagtgtaaactaaggggctttgcttttcaaaccagagaaaggaaagccagaaggaaaagagtaatggtattttctagactgtgaagattcagttcaaatgttatccttgttcctgttacaatatttagcattattagtttgttatgtgtgtatgtttatgttaattttaatttctgattataagacaatgctgctttggttaatctcttctaaatgaatttagagagattgacttttatagcttgcttgttgctggtactcttttgaagtgcacaaagataagttatagagctttctccttgtctgcaaaaacggtaattttccaggtggcatttgttagctggtagacaaggactttgccgtgaatttgttagtagcaaggaatgatttcttccagcttccttgaaatgaataattagtaaacttctaagcaaagtcaatgactaggagtttcacatgtttgtgaggtcctaactaattctcttacccagatgccacctccatgaatgatggtgctttaggcttctggaatatgtaaaaacagcaaagggaaccaagtctagactgcatactggtaaaccagggaagactcagaactgcatatgcatcctcatgcattcctttgtaaagaccaccagtactaaaataactggacactcattgtacctcccagcgataagtatgtgtaacaggccagtgtgttgtccccatgatcatgaattaggcttgggatgcttccaaatatattcaaggtgttggaacaggataggcagctgtgactccctcaagagtccttagaattctaaataaaatgcagagccatcctaagacacaggggtatggacaaggcctggtgacaccaaaggtgcttgtatccaattgaaaaggtgcctgtctcaatttcataccacctttattgcagttaaaaaaaaatcacactctggggacacttggtggaattacagagccaccatcatcattccaaccactatttcattttctgtagttttacctgtgtgcaattactccccctccattctgttccacttcttactccttagtaccaaatcctctgtttgggattgagcgctgctcctggttaatcattcctactacaaaaaaaaataactcccagggctagttaaattgtaaaccaaggctcagcagtctcacaacacatggaccagaggtgacacacagccatttcctttgccatgtggcccagttgctgctgccatgcctccatttccacactggatgcctacggcagtgagatttcactgccggggtaagagttcagcctggatgattttatagctctgttcctagcacttctcatcatccttccagcccagaatcagcggtcattctgcatattcccaccaaccctctacccccaaacacttcagtgtacctcattttaagagttgctgatccctgattctaggacgtttttacccatagttcttgtctttccaaaatctgaaattcttttttttgctcagaactgggtagccaagggttattttatttttatctttaaaataatcaaggcagtcgctagagtttctccttgtgaatagatcactctagcattttaatgaaaaagaaaaaaatctttctggggtatgttgtatcatagtaatggctcagtaaccacatattttgtcctttccatgtcactgattccttcatatgagactatttggcttgactaccctgtatattgtgtagaaatcaaagttcttatctgtacatttctggtccaatacctgtcttattagttgtccttccccactaaagtttgcaaaacagaaaatgttactatttctggtatttaatgacaatgaaaggtttggtcatatttcatagtgcagtagcgataaggagggtgtctcaagtttgcttttgtgtttcttctaggctttgttcttgattttagacagatgagccagtgttaaggtgctacttcagagaataaattagagaaatcagataacactgtgccaaggtatactttgtagatgctaagcaccgattggccctccagagaatgacaatatccctttgatacctcactcctgatcaatctcattcattaacctcagcttctcaggaatccttgtagcttgtatgctagaagtagctatggtatatggtatccactatatgtccagtcctatggtttggctcaaaggttggctaattgcagctagagctctcaactgctagctcagcaccttgacatttgaagtttcttgtcttgaggagaaggaaaatgttctttctgccattgccactttaacagttggacatgcttaagcaacaaatacagccagtatagggaggactgtcagtagcatcaaatggccacatacctcaatggcaaaagactagatggtttgtgatttaaaaattaatgagtcgagatgagactattttggtattaaatgagaaaattgcctaacacaagggaagggtttacaaaagaatgccaattagtgtttcaacagagttaggattttccaagtaagagtagctggtagccatccagccataaaaggaacgagagtctatagatttgtaaaagtaaaactgctatattttgtatcttcaaatcttcaatataaagaatttaaagaacctgaaacagttaatgcatgattcgttatattggagggaaaaagcaggggactgataatacaaaataatggcaactttaaagatcatttctacgtggatgtttggttagaaacatattccaatgctctcctctttctctggccacagcatcctggctcagcccagctgtggagtagaggtggtaagatccacagaacagatatcctctggtagataagctgacattgatgatactttgaatttaccagctggtgaagcaaacgattaatttgtgattgaactgaaaagcagttgaattgttttgacaccagaggctgaatctaaaccctttacaggaagagcagagcatactatacatttcttagcagatcttcaattctgtttgaacatgatgaagtaaccagggtttagtgagatctaaggccgtgaagtaattcacaaccaagatcttatgaacgcattcagatgtgaggggggcaaatatgttttcaaaaacttagtgtgcaatagagtccattatagaaattaaccactgctatatgttttaagtagttcaatcacctgttgtggttcagtcttgattattgtttattttgttaggtgataagtaggaagatgcacttgttatcccacactatctcttgttttgttttgttttgtttttaaataatgaacagtgcaatctttgaacttgagtttttaataatgatagcaaagacaatggtgagaacttgaaacagccagcatattttatattgccaaagtacttactgatgactgaccacactgtcttgtgaggaactgggtcccctgcactggatcagagccaaatgcaagccacccatcagttcagaggaagcaggaaaacatcttttgggtggtgcatagaacattgagctcttaaaaacccggagaaaaattaggaatttagaaagtaagtgggaggtagaatattgagtccttttttaaaaaaaagaattgatgtctaaatatgtagtctgaacttaagtgtcctaaaaccttgttttttgtttttttgttttttgaggagtcgtcttgctctatcaccaggtgggagtgcagtggcacaatctcggctcactgtaacctctgcctcctgcctcccgggtccaagcaattcccctgcctcagtctcccaagtaggtgggactacaggcgcacaccaccatgcccagctaacttttgtatttttagtagagacggggtttcaccatgttggccaggatggtctcgatctcttgacctcgtgatccacccatctcggcctcccaaagtgctgggattataggtgtgagccaccgcacccagccaaaccttgatttttttagccacctctgggattgcctgggttccctttggagaagaaactaaaagttatggccatagaaaaagccctggtaagaaaatatttgaatggtgtaagatggtggaaggaaagccatcccacacccctacaacatatgttctggcatttataaactgcttgattgtgtgcctcaaggggagaaaaagtcaagcaatgcttcaaaggccaggctttctaagcaaatgagtggttcaaagcagtgtttggctcaagggcagtctggttttatggatagggccgacccaagacatctgctcatgaagaaatgtggcatctgttgccatttcctaaactataaggtttagatagattgtcttgaattttgatagcaaatttttttaaatttatatttctgcctcctcgtacatccttatatatggaaaaaaaagtaagagttcctcagatcagagctcagtagctgtgtcaatttgaagttcaatcagtgtagttgtcctggggtgatcgctgactctgctctgtttcatatttcagttgcttgctccaaggagagaatttctgagaacaatgggtgttagcaactttaagttactccccaaacgtttgctggccacattctcatttctaaacatctggatctgggtaaaggtttgaatagatgtagggaacaaaattggtttttccatggtgtagtctaattttgccaaatcacccaagaaagaaagtatatgacgtgtggagtttgcatttcttggatgggacctatcgggtcacccagcccagtcttacagtcataaattcctacctcttagttcctgccaaagggccttcagcctctgtgtgcacacttattgaatgaatgctttgcctaaagtttggccttttgaagaaaaacagcatgtgataatataaaaatatgagagtttaaaaaaaaaaaagatctctgcctctcttctctctgcctcgtcccaccttgctgtctgtctcattgtctttctctcccctcaccatgcgctgaattcagatttctctttcttttattataggcatgttgttttgaatgtggactttgtgggagggagaggattgttctgagaacagaaactggaagatacgtctgagttgatgggaccaacagggctttgctcctctgtgagggccaaagccattgatacttgtcgggggtgatgagggctttagcatctcaaggcagacatatgaagtatttactgctaaactatattacttactagtacaaatctgttggaattcaggggcagtctaagatttggtgagtgaaatgccatctggcaaaatcgagaagagagtgtggcctgagaggggaatgttcagcctcactgtcacattaagggtacctcaaaatacatggtccttccagtgtgttccttttccttcctccatttcactttgtcccctcttcttcctttctctcccattttcctggctttttagcactcagcttttttttataagtatgtatttactttttattatatatttggtcctttgggactttgtgatgattaagaatttattccattcaggattttaaaatgatgtgtttaatattttgttctcttaaactcttttgaagctatgctgctaaccaggtataggccagaaaggaggtggcccagtcagtaccttgctcacgtcagctaagggggacagtgatgtcatgtgggtgactcttcttcatttgaccaaggccagcctcctgttcttacctctgcccattcatttctggctatgggaaaactaccacctgttgagtgagccaatgaggccaggaagatcagaggggctgggttccggcccatgggccactatttgaatttctctgtagtaagctctttgtagggctggctccaactgcagtagccaaagaaaacctgtctgactcgacattttaatgcctgagagttggtgaaagttcagctgaagctaatgtctagacatcagcagtaactaggcatccagaaagtagcttcaaccaaagctaatagagcccaagtttccgcaggaagtttggtgctgagctgtccagagcagttgtttatctgagtgttgctagcccttagccatgctttcttagctttattctcgcctgttcctaggcatagcctgaaccagagctatggctcactgctcgctttattctactccctagtcatgcggaacaacatagtctaaaaaggaagatgtggactggggagttaggagacctgatttctattccctatgcttctactaactagcctcgagatcttaaccgctctgtgcctcagtgttcccatctgcaaaatggggatagtgttaattgccctacctacctcacagggttgttgtgaggataaactgagacaatgaattcaaagcaagttgacaagtaagtgctatgcaaattgtaagaaatggaaacaatcatgttaaaagcaatggaatggacattggcagaagggttaatggattgtccagccctttctctgtgtggcttaaacccaggtcgccattgctttatacattttcacttagcacagatttgtaattatgcatgtaataaagcacagccttatccaccctg

SEQ ID NO: 2505 - DNA, 3804 bp, Homo sapiens
ggccttccccgcgcagagctccgaccgcgggcggcccaggggcgggcgcgccgctgcatccccatcctcgtcgtcgcccggcacagcgcgagcgggcgagcggcgcgggcggccggagcgccgaggcccggccatggccaccaccagcaccacgggctccaccctgctgcagcccctcagcaacgccgtgcagctgcccatcgaccaggtcaactttgtagtgtgccaactctttgccttgctagcagccatttggtttcgaacttatctacattcaagcaaaactagctcttttataagacatgtagttgctacccttttgggcctttatcttgcacttttttgctttggatggtatgccttacactttcttgtacaaagtggaatttcctactgtatcatgatcatcataggagtggagaacatgcacaattactgctttgtgtttgctctgggatacctcacagtgtgccaagttactcgagtctatatctttgactatggacaatattctgctgatttttcaggcccaatgatgatcattactcagaagatcactagtttggcttgcgaaattcatgatgggatgtttcggaaggatgaagaactgacttcctcacagagggatttagctgtaaggcgcatgccaagcttactggagtatttgagttacaactgtaacttcatggggatcctggcaggcccactttgctcttacaaagactacattactttcattgaaggcagatcataccatatcacacaatctggtgaaaatggaaaagaagagacacagtatgaaagaacagagccatctccaaatactgcggttgttcagaagctcttagtttgtgggctgtccttgttatttcacttgaccatctgtacaacattacctgtggagtacaacattgatgagcattttcaagctacagcttcgtggccaacaaagattatctatctgtatatctctcttttggctgccagacccaaatactattttgcatggacgctagctgatgccattaataatgctgcaggctttggtttcagagggtatgacgaaaatggagcagctcgctgggacttaatttccaatttgagaattcaacaaatagagatgtcaacaagtttcaagatgtttcttgataattggaatattcagacagctctttggctcaaaagggtgtgttatgaacgaacctccttcagtccaactatccagacgttcattctctctgccatttggcacggggtatacccaggatattatctaacgtttctaacaggggtgttaatgacattagcagcaagagctatgagaaataactttagacattatttcattgaaccttcccaactgaaattattttatgatgttataacatggatagtaactcaagtagcaataagttacacagttgtgccatttgtgcttctttctataaaaccatcactcacgttttacagctcctggtattattgcctgcacattcttggtatcttagtattattgttgttgccagtgaaaaaaactcaaagaagaaagaatacacatgaaaacattcagctctcacaatccaaaaagtttgatgaaggagaaaattctttgggacagaacagtttttctacaacaaacaatgtttgcaatcagaatcaagaaatagcctcgagacattcatcactaaagcagtgatcgggaaggctctgagggctgttttttttttttgatgttaacagaaaccaatcttagcaccttttcaaggggtttgagtttgttggaaaagcagttaactggggggaaatggacagttatagataaggaatttcctgtacaccagattggaaatggagtgaaacaagccctcccatgccatgtccccgtgggccacgccttatgtaagaatatttccatatttcagtgggcactcccaacctcagcacttgtccgtagggtcacacgcgtgccctgttgctgaatgtatgttgcgtatcccaaggcactgaagaggtggaaaaataatcgtgtcaatctggatgatagagagaaattaacttttccaaatgaatgtcttgccttaaaccctctatttcctaaaatattgttcctaaatggtattttcaagtgtaatattgtgagaacgctactgcagtagttgatgttgtgtgctgtaaaggattttaggaggaatttgaaacaggatatttaagagtgtggatatttttaaaatgcaataaacatctcagtatttgaagggttttcttaaagtatgtcaaatgactacaatccatagtgaaactgtaaacagtaatggacgccaaattataggtagctgattttgctggagagtttaattaccttgtgcagtcaaagagcgcttccagaaggaatctcttaaaacataatgagaggtttggtaatgtgatattttaagcttattctttttcttaaaagagagaggtgacgaaggaaggcaggaatgaagaagcactgcgtggcctccggtggaatgcacggggcacagccgcgactctgcaggcagcttcccccccatgccagggctctgcgccgtcatgtgagacttaaaaaaaaagttgaatgacttcgtgatactttggacttctaaattaaatttatcaggcataaattatgtagaattagaggctttgaaaataatactggtaggttgctcaaaggttttgaaagagaaatcgctaggtaggttactatctggctaatccatttcttatccttgacaatttaattcatatttgggaaacttttagggaaatgaaaaataaaagtcactgagtctgggtgacattttttaagaataatataaattcagtttcaaactcttctcacattaaaattttgctgtgaactcttactaaaatgagttttaggttctgtaagtggaaaaatgtgcttttattttatgggccatttttaccacaactaatcttgccttggattactaagcatctcctgcgatcccacagaggactgtggtggccacaggagctgaaagcagaagagtgggatttgatgccaggcagtggagtggcctcagccccagattgtacctcctgccctgtaggaggggagggggcaaagccttctgacttcacctttgtttgacctatgtatggaacttacttttactttttgccttaaatttttaatgaaatgcaaattttctgtgatggggttctctctctctttttttcggggggtggagtcactaataaatttgcaaatgaagttaaagacaaggcaaccatctggcttatgctatataatacttcatttaaagaagaaaggaaaagcaaatgcacttgcagcttttgaggtctcagcaaaaatgggcatgtgtcttttttgaagtttagaaatatcctaatctatttttatttatctaaaagtaagtgttttccggctgataaggctaaccctacccaggaaaggattgataactaaataaatttcctctgttttcccatgcattgaaattatgttggctgagcatggtggctcacacctgtaatcctagcactttgggaggccgaggtgggcggatcacttgaggtcaggagttggagaccagcctggccaacgtggtgaatccccgtctctactgaaaacacaaaaattagacgggcatggtggcgcacacctgtaatcccagctacttgggaggctgaggcaggagaattgcttgaacctgggaggtggaggttgcagtgagctaaaattgtgccactgcactccagcctgggtgacagaggaagactccgtctcac

SEQ ID NO: 2506 - DNA, 2521 bp, Homo sapiens; identical to SEQ ID NO: 142

SEQ ID NO: 2507 - DNA, 921 bp, Homo sapiens
gacaggtcgcctgactgggctcctccccgggcccgccccgacaggtttgtcttgtgaccgcgggcggccgctgcttctttcccgagcttggaacttcgttatccgcgatgcgtttcctggcagctacattcctgctcctggcgctcagcaccgctgcccaggccgaaccggtgcagttcaaggactgcggttctgtggatggagttataaaggaagtgaatgtgagcccatgccccacccaaccctgccagctgagcaaaggacagtcttacagcgtcaatgtcaccttcaccagcaatattcagtctaaaagcagcaaggccgtggtgcatggcatcctgatgggcgtcccagttccctttcccattcctgagcctgatggttgtaagagtggaattaactgccctatccaaaaagacaagacctatagctacctgaataaactaccagtgaaaagcgaatatccctctataaaactggtggtggagtggcaacttcaggatgacaaaaaccaaagtctcttctgctgggaaatcccagtacagatcgtttctcatctctaagtgcctcattgagttcggtgcatctggccaatgagtctgctgagactcttgacagcacctccagctctgctgcttcaacaacagtgacttgctctccaatggtatccagtgattcgttgaagaggaggtgctctgtagcagaaactgagctccgggtggctggttctcagtggttgtctcatgtctctttttctgtcttaggtggtttcattaaatgcagcacttggttagcagatgtttaattttttttttaacaacattaacttgtggcctctttctacacctggaaatttactcttgaataaataaaaactcgtttgtcttgtcttctgcaaaaaaaaaaaaaaaaaaaaaaaaa

SEQ ID NO: 2508 - DNA, 3751 bp, Homo sapiens
gaggcgaacatgtctttgagcccagcagggaggaatcctccagcctattcctcgctggtgcatcaggtcgttggcgggccctgacacacaacaggaacgtcggagcaggaggagtcagtggagccatcaggacacccaggcccatggggcaggaggcctcggtcaccacaggactggggcggaagacgagaggcggccggccgtgagggaggcgccctccctccccgcgcttacgtcgcgcggccatgcggtttgggacaggacacccctgagagtgcaggcacctccccctcccgcccctccatccctctgggggctggcgcctggccccccacctggtccccctgggcaggctgaattggggctccctgcagggcggtcccgatggccgggcgtgggtggggcgcgctgtgggtgtgcgtggcggccgccaccctgctgcacgctggcggcctggcccgcgcagactgctggctgatcgagggcgacaagggcttcgtgtggctggccatctgcagccagaaccaacccccctacgaggccatcccacagcagatcaacagcaccatcgtggacctgcggctcaacgagaaccgtatccgcagcgtgcagtacgcctcgctcagccgctttggcaacctcacgtacctcaacctcaccaagaacgagatcggctacatcgaggacggcgccttctcgggccagttcaacctgcaggtgctgcagctgggctacaaccggctgcgcaacctcacggagggcatgctgcgcggcctgggcaagctggagtacctgtacctgcaggccaacctcatcgaggtggtcatggccagcagcttctgggagtgtcccaacatcgtcaacatcgacctgtccatgaaccgcatccagcagctcaacagcggcaccttcgccggcctggccaagctgtcggtgtgcgagctctacagcaaccccttctactgctcctgcgagctgctgggcttcctgcgctggctggccgccttcaccaacgccacacagacgtacgaccgcatgcagtgcgagtcgccgcccgtctactccggctactacctcctgggccagggccgccgcggccaccgcagcatcctcagcaaactgcagtcagtctgcaccgaggactcgtacgcggctgaggtggtcgggcccccacgtccagcatccgggcgctcacagccgggccgctccccgccgcccccgcctccgccggagcccagtgacatgccctgtgccgatgatgagtgcttctccggggacggcaccacgccactggtggccctgcccacgctggccacgcaggccgaggcccgccccctcatcaaggtcaagcagctcactcagaactcggccaccatcaccgtccagctgcccagcccgttccaccggatgtacaccctggagcatttcaacaacagcaaggcctccaccgtgtccaggctgaccaaggcccaggaggagatccgtctgaccaacctgttcacgctcaccaactacacctactgcgtggtgtccaccagcgccgggctgcgccacaaccacacctgcctcaccatctgcttgccccggctgcccagcccgcctggtccggtgcccagcccctccacggccacccactacatcatgaccatcctgggctgcctcttcggcatggtgctggtgctgggcgccgtctactactgcctgcgcaggcggcggcgccaggaggagaagcacaagaaggccgcctcggcagccgcagctggcagcctcaagaagaccatcatcgagctcaagtacgggccagagctggaggcgcccggcctggccccgctgtcccagggcccgctgctgggccccgaggccgtgacgcgcatcccttacctgcctgcggccggcgaggtggagcagtacaagctggtggagagcgcggacacccccaaggccagcaagggcagctacatggaggttcgaaccggggaccctccggaacgcagggactgtgagctgggccggccgggccccgacagccagagttcggtggccgagatctccaccatcgccaaggaggtggacaaggtcaaccagatcatcaacaactgcatcgacgcgctcaagtccgagtccacctccttccagggcgtcaagtcggggcccgtgtccgtcgcggagccgccgctggtgctgctgtccgagccgctggccgccaagcacggcttcctggcgcccgggtacaaggacgccttcggccacagcctgcagcggcaccacagcgtggaggccgccgggccccctcgtgccagcacctcgtccagcggctccgtgcgcagcccccgcgccttccgagccgaggccgtcggggtgcacaaggccgcggccgccgaggccaagtacatcgagaagggctcccccgcggccgacgccatcctcactgtgacacccgcggccgccgtgctgcgggccgaggccgagaagggtcgccagtacggcgagcaccggcactcgtaccccggctcccacccggccgagccacctgcgccccccgggccaccgccgccgcctccgcacgagggcctggggcgcaaggcgtccatcctggagccactcacccggccgcggccccgcgacctcgcctactcgcagctgtccccgcagtaccacagcctgagctactcctccagccccgagtacacctgccgggcctcccagagcatctgggagcgcttcagactgagccgccggcggcacaaggaggaagaggagttcatggccgcgggccatgccctgcgcaagaaggttcagttcgccaaagacgaggatctgcacgacatcctggactactggaagggcgtgtcggcccagcacaagtcctgagccccccaagaccggcgatgcccactggaccaaaaaggatgcaggatccacccagagactcagcaccaaacccaacacacgcacgccaccacagcaactgtgacagcggggggccctgcagaggcgaggggggagcgagtggggacagacaagggggacacgtcccgagctcctgtggccggtcctgggatgcgcttgtcgccccgggtggcacgtgtccacacacacacacacacacacacacacacacacgagggacttcggaaaactgtgtcttagggatggggggtgggggtggggatttttttttcattatctttcctcttttgagtcttctctgccttttcttttcctctctatctctttactttcttccttttttaaaaaaatataataaaagacaagttattttaaaaagacataaaatgccatccgtggggggtgtggccggcgtggccacctcggggcccctcacgtgatctcctcggtccgtggttttctgtggattctctgtccagtccgtctcttcattgccgcctccggagtccactgcagaggggcagagtgaatgccggcggccaagtggcctccgggacaggtcctggagccctgctggactcagggtgggtggaggctgtgcctgtggacggccggggtggccaggacggccaagggctgggaggcacgtcccccagcccagcccccatgtacactgtagtcgttctattgtacagaaaaaaatatttctatatttgcaatgtttgctgtaaaatgagaaagaaaaaaagactatgtctactaaaaaaaaaaaaaaaaagactatgtctacttaaaaaaaaatctgcaaaggaaaacaaatcaaatgcttgttaaaaaaaaa

SEQ ID NO: 2509 - DNA, 2723 bp, Homo sapiens
gggcggggcgcaggagccccggggcggaggagccggggaggcgggaggcgggaggcgggaggtgttggggccgttgaagcggcctccctcccgcccccagccgcccggtctggccccagccctgtcccgacccccggcctggcccactccgaccctacccggccgaagggttccgctggacacgcaggcggcctccggagcagcccaagcccatgagggccgcgcgcccggccgccggtgctgacgagacggagctcctggcccccgaggaggagcagaggatcaatgcggttcaagaatcgattccagcggttcatgaaccatcgagctccagccaatggccgctacaagccaacttgctatgaacatgctgctaactgttacacacacgcattcctcattgttccggccatcgtgggcagtgccctcctccatcggctgtctgatgactgctgggaaaagataacagcatggatttatggaatgggactctgtgccctcttcatcgtttctacagtatttcacattgtatcatggaaaaagagccacttaaggacagtggagcattgttttcacatgtgtgatagaatggttatctatttcttcattgctgcttcttatgctccatggttaaatcttcgtgaacttggacccctggcatctcatatgcgttggtttatctggctcatggcagctggaggaaccatttatgtatttctctaccatgaaaaatataaggtggttgaactctttttctatctcacaatgggattctctccagccttggtggtgacatcaatgaacaacaccgatggacttcaggaacttgcctgtgggggcttaatttattgcttgggagttgtgttcttcaagagtgatggcatcattccatttgcccacgccatctggcacctgtttgtggccacggcagctgcagtgcattactacgccatttggaaatacctttaccgaagtcctacggactttatgcggcatttatgaccaatctgtactaattctccaaaccagtattatttcaattatggcacttgggagtggggtgagagctaaacattgcacagggaaagaaaaaaaataactgcactgactttatatcttttgaatataattactgtgaaagtataaaggctgtgttctggaattttctgcctcacagcaaataaataaggtagtgaattaattattcattccattccactatcatgaaggactctgaatagacttggccaactgatgtttacaaaccagacttttatattttaattttacagattttactacatgatttttctaaattactatgtcaggttgtaaaagtcagtgcaataacaaaccttcctttttaagaagaaaattgtttctattactttcccattcactaggtaaagaatcatggacagaacttacactactttttaccatgtttcatcttggcataacatggttcttttttaaatagaaactttagttttttgtaaatttttaaaaaaatatttcattgatatgcatctctgcaggtcctcattcatgttgtaaatttttgcagcaagcagtcaacattccacaaacgaacaaacattatacctcttctgatagttttattaagcatggagaaattgccaatttttaaaaactgcagttttccaaacttttctgccaacctcttactctgaattcagtgctgctttgggacatatacttgacctagcttggtttaccagtgatggaaaagtattttgatatcattaactttttcaaaagatccaactttttctctatgcctttgccacattctcttcagggtctctttccacagtggataaatgttttttctgtattatgacagtattgttgtgatggccatctgctggaaactcctgaagagcattatgtattacagtgagcagttgtattgcctgtttggtgcccaatggttaagtcattgtcacttagctttatattgtcagtttgatatttattttaaattgtggaactagatgcataaattcacatttctgcctttcctttgcatcttctcatatattgtgtttttttttttttttcctagaaaaaatatttaaagcattgtttgacaggtagaaactcatgtatctgtagtccatgagttatatcctggctcagtggagtgatatttatgtattatttttacttttctctcagtgtcttatattaagattaacatgttgttaatagttgctttgttgattaatctctcttgttggtgttttaataaatgaaataggcttgcctttagatcgggtgctgatattgcctgtttcctagtaatgggctgatcaaatgatcagtggaattcttggtttgatgataaccttattaattgaaattttttactgatgtggctttaaaagaggtttattttgtatatgtttagaactctctgattttgatgaattatatgggaatgagaaacagaagaagtggtatttgctggcgagttaaataggcaaggtacccagtgataacaccaaccaaaccactcctatctgcatgattctgaacatctggatgcctgttgttttactgtgtatattttatttttaatatattaactttgtggattcatttaaggtctactcaaaagtaacactgtcaaaaccactaatatgtatgtaaaaattgtgctgtatactacaataaagttgttacttggatttgttcca

SEQ ID NO: 2510 - DNA, 11579 bp, Homo sapiens
cggaccgtgctttcgccgcctgggagccgtccggcgcagcagtttctaggtccccactgtccccgccgtcccgccccttcgcgtcccgggaaccggctggcttccgagccgcactcgccgatcctccaggcatgccccgctacgagctggctttaatcctgaaagccatgcagcggggttggtacagtaggcttcactagacttagctgcaactcagaatttctcctccagcacctgagtaaatgctgatggtcttgtggagagtggattaagagtacgagctaagttctcaatcccaattaagaagcggaaaatttaaactgtcttcttcaaagtttatcacaaccaccaccatcaagacagcaaaccaaaggacaaagactttgaccctgctgtgttgctctgtgtagtccagttcacgtatggtttacagacttggctggggttactaaaaataaataaaaagttggacacttctgtcattggagcgctattattcacaagttaccagaatgagagctgtactggacacagcagacattgccatagtggccctgtattttatcctggtcatgtgcattggtttttttgccatgtggaaatctaatagaagcaccgtgagtggatacttcctggcggggcgctctatgacctgggtaacaattggtgcctctctgtttgtgagcaatattgggagtgagcacttcattgggctggcaggatctggagctgcaagtggatttgcagtgggcgcatgggaattcaatgccttactgcttttacaacttctgggatgggttttcatcccaatttacatccggtcaggggtatataccatgcctgaatacttgtccaagcgatttggtggccataggattcaggtctattttgcagccttgtctctgattctctatattttcaccaagctctcggtggatctgtattcgggtgccctttttatccaggagtctttgggttggaatctttatgtgtctgtcatcctgctcattggcatgactgctttgctgactgtcaccggaggccttgttgcagtgatctacacagacactctgcaggctctgctcatgatcattggggcacttacacttatgattattagcataatggagattggcgggtttgaggaagttaagagaaggtacatgttggcctcacccgatgtcacttccatcttattgacatacaacctttccaacacaaattcttgtaatgtctcccctaagaaagaagccctgaaaatgctgcggaatccaacagatgaagatgttccttggcctggattcattcttgggcagaccccagcttcagtatggtactggtgtgctgaccaagtcatcgtgcagagggtccttgcagccaaaaacattgctcatgccaaaggctctactcttatggctggcttcttaaagctcctgccaatgtttatcatagttgtcccaggaatgatttccaggatactgtttactgatgatatagcttgcatcaacccagagcactgcatgctggtgtgtggaagcagagctggttgctccaatattgcttacccacgcctggtgatgaagctggttcctgtgggccttcggggtttaatgatggcagtgatgattgcagctctgatgagtgacttagactctatctttaacagtgccagtaccatattcaccctcgatgtgtacaaacttatccgcaagagcgcaagctcccgggagttaatgattgtggggaggatatttgtggcatttatggtggtgatcagcatagcatgggtgccaatcatcgtggagatgcaaggaggccagatgtacctttacattcaggaggtagcagattacctgacacccccagtggcagccttgttcctgctggcaattttctggaagcgctgcaatgaacaaggggctttctatggtggaatggctggctttgttcttggagcagtccgtttgatactggcctttgcctaccgtgccccagaatgtgaccaacctgataataggccgggcttcatcaaagacatccattatatgtatgtggccacaggattgttttgggtcacgggactcattactgtaattgtgagccttctcacaccacctcccacaaaggaacagattcgaaccaccaccttttggtctaagaagaacctggtggtgaaggagaactgctccccaaaagaggaaccataccaaatgcaagaaaagagcattctgagatgcagtgagaataatgagaccatcaaccacatcattcccaacgggaaatctgaagacagcattaagggccttcagcctgaagatgttaatctgttggtaacctgcagagaggagggcaacccagtggcatccttaggtcattcagaggcagaaacaccagttgacgcttactccaatgggcaagcagctctcatgggtgagaaagagagaaagaaagaaacggatgatggaggtcggtactggaagttcatagactggttttgtggctttaaaagtaagagcctcagcaagaggagtctcagagacctgatggaagaggaggctgtttgtttacagatgctagaagagactcggcaagttaaagtaatactaaatattggactttttgctgtgtgttcacttggaattttcatgtttgtttatttctccttatgaacttaaggatatggtgagacactaacttaagacaatactgactggtctttggggaaaaaagttatgtaactgtgcatctctcaggcattgtttacgctgtaggttttagccaaattttacttagcagaaaatcatctaattacaagactttattttcccagagatggattaaagtaaatcttcaacttaagtgaagccaaacctaacagactgaattgtgcaaatgtggttttaaattttgcataccaaagtaagaagagaccaattattctcacagagcacttagagcagaatatatgttaagttaccatgaattaaggtatactgtctgcactgccaagtcttggcagaccttaccctgaagtagaagatttgctcatttctaaagttttttttctgtctctgtaatccctcctaccattaagaaaaacttatttcttagacattgtacaatcagttatgtactgaaaatcgaatgtgcttgtgtgatacttgtttcaggacaagttcatttgccaggttcattttgttagcatgagcctacggattctgatttcccaaagaaagaatgttttcctgtaggtatttttgtaccaccagtatatggaatgttagggaaaaactttgttccagttcctttttttttttctttctactttcaagtttaagtgaaccatactgaaatgaccaacaagtctgcctgtaaagttacatgtcatgattgtgttgttaaatgattatgggggagaaaatgaagtaaatgttgctgatgatccccatatttattgatcatattaaggttgtttatatagtttggaaatgaccagccccctaagcagtgtttgattaacttatgctaatcagatgattactcatatattctgctaattttctagctttattcttgttatttggaaaaattattagccaaatgccttcctaggtggatccagttggaagatatgtccagaaacctgaagaaaaattgacgctgcctttgtgtgctggattgctctacttgattagatcatgatatatcaaggttgaatttttagagggaaaatttaattctgatatcttattgcatccttgataagtttttccctgattttttttttcctcaaaagactttccatctgtacacagcctctacatttttgttgtagtgacttagagcataaggatgtttcagtgcaaactggccgtcggtaacagaaaactcagtgcatactttgctgttgttaggttgtcaatatagtctttctgtaggatggatagcatgtttgagaggtgccaaacaagaacttttggggttagtagtgtgtcttgtggagggtattacaggactgtgtaattataggactctaacttgacatggcttggcacccacttgcagctagtgggtacagggtacaaaagatgttagagaaaagctctacagattacgtacttctgtgtcttcgtatgctcaacactgtcctttgtcctccatgaaagatgaaggaagcaaattatgtatgtactttctttgaccttctttaatctctgatactttttagattgcatgattttactaggcttgtatttagggaaattactttcataaatacttttgtagattttgaatcaaaactcagtctttttaatttttttgtagtctataaactagtttcattatgatggacttgattagtccaaagttaattttagaaattgtcaggtagcatagtgtcttcccatgatcaggaggctttctgaaggactgagtctgtaaatgaaaaaataatttatgtatgaatagcatgtatttctgaagagcttagagtgccttgtagaatttttttctcaattttattcttgaggtttataatttgggggccaaatagatagagctcatcattttcttgtttggaagttgaggctgcgacatgtccaaggttatgaagtctcttttgggaagaacagaaaccaggtctccaaatctggactcatggtttgttcagatgtgtctggacaaatggttgtcaatgttttgtcctgttttttcaaaggaactgttcttcctttgggacaaccttttggtgtttgggaaagtaataagatcttggatttttcaaattaacattaagttgtaagaactaaaattttctttgaaccacattactgtgtaattcactgataattgacatattggctgggcagcctatctcttccatatccagcgtaaatgaataggaggtgtttgtgattttttttttctccctttatttaacattgagtcctagtagtttggagaattagggtccctctaccttctttctgctcttgtcttagtaagatacataaggtacatcatcttgtgtctgtgtgtatatagcagtaggtcaagtttagagtactaaagtctgtaaataaggaatgactattagcatattcattagaattgtttattcttgccagtataaacatcattttatttagactaaagtccctgaagcttgtctttcttattgcttcccagtaatagataatgtgctcgagtaagtttgtgaattgctgattgcaacttaattcagggaccagtcttcaatctatatttcattagaatgattgttcctggaatgatcatacatggactgtcttaagctagcaaaatgttcatactttacactgactaaatgggtcctaaatgatgacattggtctttagacattaacatgtgtatatttttatattagctcaagctaaggttcagaattgaagcttgatattgactagaatagctaaaagtcaaaatgaggtgaggacactggtcttggaaggtagagaaaaataaatgtcttaccaggtgttaatggtatccccagttcttagacttttgtcttctcaggcaattttcatctcaagatctgatgagaagggcatattacattggtatgcaggatgattattgcatattttgtgggacctctaatttccctggtcatctttcagaatattctgttctgccacccccagagagtaaacacttgagccgatttcttcttccccagctattctttcctgggggtaattatgctttgtctttagattagagaagcatcaagcaatagcaatggtgctgtgtccttcggcctaaattcaatagatctcatctcctagggcttccttttcacttggctcaaaggatccattgtattttggcacaaagagcctggccagggtcatgtagccatagctcttagggatgatacctcaagaaattagctgggacccatcactctgtgaaacttcacattttaagaactgagttgagggggttgttatgcacttctgtaacttgaggctaagcaaggggttaactcttgtgagagccaatagagtgtgtctgtattcgcagtccatggctcattttctttatagtaggcatatggatcttcccctctgactttgaatatcatttggtgtggcctgtgggttattttcattctttaccaccaaataaagcggcttattagctactcagttacttgctactcaaaggttaggtcttccctgttcctgcttggcagtgttaaagcttacagggttaacttatgatgattctcctggctcattttcatcagaggcatgatgactggaaagggatcacatgggtcgttggtggtgacacctcactgtttcctaggtttggatagagagatgtatacaagacctttcctgttaaattacgtgactacagagacttgccaggacaaaattttcctaagaaatcagaaaaatgattaagtgagataagtacctgggtgacacagatattagcccgttggtaaaagacaacaaatattagcttaaaatctgcatatgtagaatcattttcattagatttagagcttgaagcaccttggctctcagctactttaaactcctccccatataaatcagggcaccaataaataagtttcagctttttaaaccctggtttgatgttaagcattataaagtacgaagtttgttaccacagtagagataatttagtagaaaaatgctttgaggcttcagtatttgtaagattttgcattagccagatgctaggttgttgaaggcatttcagtgttgataatagcctgagcagacttctttacaaatgggatctgtttctatatgtgtatatgcccacttaccattcagagagactggtctttctctttgtcttccttcacattgctgtgtcagttctacacctagtcttttcagcacttagcaaattcaaattttgatttttttgtcagcttagttcactttaaggcatattggcatggtgtgtgaaagtgatgttttgccccagtattgaggacttttagatccaaataatgactcattaaatataattatgttttaagtatactgaatttctgttagcttaaaatgttaattctcaggaatgattttctcacactttgtgttggctaataataaaagcactgttttattctcaaaactcctttttcaaaaattagggagagagcagtagtgatcatttatgtgagcccctttgaaatgatggtgtcagagtgcagagaaacaatggagttttgatgccaaaaaggtttttttgcagtaaaagtaaaaatttggaattagttggcatatagaggaacccttttgtactggaacgtatgaggctggattgtgaaaaggtaatctttcgattgctagacttggttaacttagggctgcaaatctttttcttctgtcaaggtcacttaatatggaatgtttttgtcagactgtcctttgttggaatactttagctgttcagctactttgactcctaggagagaatttagttaaggttcaaagtaattaactggctttgccagtggtgagtcccacaccattattcacttagtagtcatataaatgtttttatttaaacttctctctcttcaatgctgagaataaggctttaaattactgattcacctttaaaggaatgttgtgagaattgatgtaatttctgtttctgtttccatctaaacttctttataaaaagagggattagtttttttgttttggggtaagcacctaatttatccagtaaccaacaaccctaaccattggcatatatagtctttcactcagaaataaacaaaaactgtttggtatatctgtatcattgctaatcttgtgcactttactttttgggcagtaccatacatagtctgaggctattgacttaaaccaataactgtactttatgtaatgactcttaaatttggttacctgggttcacagcttgcttgaagagaaaggatgctagaataaagtaagcagctgaagagcgagcaaatcaagacaaaacacagtggtctcagatttttcgtagtgtgggaacagtggttttgctctataccactgaaaagcactataacataattgttgtccatgatactgaagcttttcccctcacttctaggttgtttacattcagagctctatcaataagaggaatacatattacagtgaattcgacaaccgcacaagttggcagtaggtatccccaacctaatttatcttggtaaattcaccctgtttcctagtgctgctggataaaagagtgtttactttttattgctcttagacagagtagtctagataagttttcaatttatcaacatagcctagacttctgtaagtggaatgttcattagtaactcatctttttgttgttataattggaaacagaaacgaggcttattgctattgcagaaatcccaaactggcaaaggccagtatatatggtattccataatataaccagcttttgaaatttatgtgtttggattagtgccttctggttaccagtattgactctgctagtttgcacctttccgttcttaacagaaaatttgtatttgttattcctcttaaattttgtcgtaactagtgaaggaagtaaaaaaaaaaaaaaaacatgcattacattgacatactttatgtgcagcctttatttaggttcagtgaaaccaggtagttctgtatttgtgttgtagcctaaatgttgtttcttttatatccattaaaaacttaaagttacttatgttctgtgatcttaattttgttgtgtttccattgtaggttgataggtatatcgagaacaggtacgtgacaacagtttatattccatgatagaaagctaaagtccatagaaagcacaaaatcgtgttcacacattagtgtacccacacatagaaagcacaagactaatagtattctctgtatcccacaagtgccagtcataaaggccaccaggtatttgtctcagagttgctatgagcactacagtattgataagcccaagacaatgcggtatctaaactggtcctaatggtaagggacccaaaggaataatctcaataagtttgtaccacattgatggagggagagaatataaatgtcaagaatgccaaaattatatttgggggttactagctaaaatggggtttgagggctttttactgcaacttgaaactggagaaatagggacagatgtctaggtttttggtgggtggaacaggtgacatatttctgttttaagctgtagtgtgattggggttttttgtaaaaaatcttaaatcttttaggaaatattacctcttaacagtgcccccccaaacatgcagaaagtcatactttaacagggcaaatactacttgtctttgattttttttgtgtacgtttgtatgtgagagatgaagttacctttatttttttcctatacttgactgtgcttcattttaataaaggataatttgatctgagtgttctgagcatcagactaattctgaagcatatttgctagaggagctactttgcttttcacaatggggtggagaggattctttcacttgtcccattaaccctcttctagtctagatgagatgaaatctgttaatgtgtgtgtagaagaaaacgtatgttcttctactcagcattgcccttttccacctcctcacttcacctccgagtagcttgtttatcaagaatgaatgaatgtctttgtcttaaattttgcccatgtgttaaaagatgtaattctcagaatgggagagaaatgactacctttgttcctactcttttatataattatccttttagggaaagacttggtcaactctaatatatctagaaggaagactatatctggtgtagactaatatgagatgttttagaagagttaacctgaacactttgagggagagattattcttgccagcaaaaagctagccaggaatgagcctaccacattatttgagaatatcaaacctcaggcctggggggatgaggggaagaagattaccagaagtgcaggaaagagaagtttgaggaacacccttggcttagcaacatgtgataatgcaaagctgttataacctgttaatcctacgtactatgtgttctgtacctttacatgtttttaaatttaagatagtttgtaagaactgtacaaaaaaatgcttctggagatttctttggcagaaatgcctttcatctataatttcatggagaactgctttaattagcctaggtgaaaagtagtcctagcagtgtaaatatgtataattagagttttctaatttcactgtgagatctctaacttttgagtggcaaacagatcaagtcttttgctcatagacttttctgtggggttattaaaatgcaaaagctttattttttttaataatgccatactccattagtgtcagatgatggtatggaatttgttcccttgctttcccccactgttactgcttcagtttatagattgccagcagagttcagaaatagagcagggatttacccgttctttgcttggacatcccattttcttttgtccagacccatgttggcaatcatgtatgaactgtgttatacttctcagtgctttcttttttctttttgataagatggatatcaaaaatagttgctgtgcaaaagttagtagtcttcttcaagaagaaaaccaattctttttctaataatatcctgtgaaattgcttcattcattcatttatttttaagccaaatgtcagcagagtgctgctgcttttatctagtaattttgatatgtaagtattaatgcatttttaaaagatgtctacattgaaacatgttcttcccagtgtcctgcttatgatgctttgttcagattttttgtaagagaccagttagtacactgggggtgtatattgtgtacatgtgtcattttagttaggcattgtaggccaaatgtgattataaatgaagttgatgaacattaattttgttattagtgagttttttgaattgtaaatggatttccagtttaccttctgttgtctacagcttttttaattttaaggtttgactaattgtatccatctcattgtacagtgttttagttgcaagcagaaagtagaatttggtataaagcaggttatttctatattgaaaggagtacagttgaaattgtagatttaagattgttaaaatcatgacaattctaacttgtctattctaacctattgtgtacaatctgattttttaaaattgtaaacatgtatgatcttggtttcatgtgtttttgaaagtgttattgtttaaaaaatgaaaaaagcatatctgctaaagagctgtcagttttcattactgactctgtaaaatacactgttctttgtgtactgtgtgttattttgccagctgctgcattagccttcaaaagtatttggaaacttaagatgaactacatttcttgcaaagtacattcctttctgtggtattttgtcctgtaactgaagtatagtaattattttatggaaatgttagcaattctgtaccaactttgaataaaatgaaaaatttataaaa

SEQ ID NO: 2511 - DNA, 7239 bp, Homo sapiens
cacctcgcggccgtaggctaacgtggaagtcggaccagccggccggcggaagaacctagagcgcgctgcctggcgagtcaggcgcgcggggcggcgttggtggtcttcgcggcgcaactcggcctttcctgggagggagtgatggggcgcaccggggccggggagcgggcgccagtgtagcccgcgcggcgcctggcccggagcgcggcggctgcggcggcggcggcggcgggcgctggaggcctgtgagagccgcagcccggagcgcccggcttcccacgccatggcccccatgggcatccgcctttccccactgggggtggcagtgttttgcctgctggggctcggcgtgctctaccacctctactcgggcttcttggccggccgcttcagcctcttcggcctgggcggcgagcctggcggcggcgcggcggggcccgcggccgcggccgatgggggcaccgtggacttgcgcgagatgctggctgtgtcagtgctggccgcagtccgcggcggcgacgaggtgaggcgcgtccgcgagagcaacgtcctccacgagaagtccaaggggaagacgcgcgagggagccgaggacaagatgaccagcggcgacgtgctgtccaaccgcaagatgttctacctgctcaagaccgccttccccagcgtccagattaatactgaggaacacgtggatgcagctgatcaggaggttatcttgtgggatcataagattcctgaggatatcctaaaggaagtaactactcctaaagaggtaccagcagaaagtgttactgtctggattgacccacttgatgctacacaggaatatacagaggatcttcgaaagtacgtcactactatggtgtgtgtggctgtaaatggtaaacccatgctaggagttatacataagccattttccgaatatacagcttgggcaatggtagatggtggttcaaatgtgaaagcccgctcttcctacaatgagaagaccccaaggatcgttgtgtctcgttcccattcagggatggtcaaacaggtcgctcttcagacttttggaaaccagactacaattatcccagctggtggtgctggttataaagttttagcacttttggatgtgcctgataagagtcaagaaaaagctgatttatacatccatgtgacatacatcaaaaagtgggatatatgtgctggtaatgccatcttaaaagccctaggggggcatatgactaccctgagtggtgaagaaatcagttacactggttcagacggcattgaagggggactccttgctagcatcagaatgaaccaccaggccctggtcagaaaactcccagatctagaaaagacaggacataaatgagcataactgattacagggtacagttcttcacagctgaaatggttagcctgagatgctggaagcttcaaaggattggtggagactatgcatggttaaggccatcccgaactttttaaagtatttatgaagcatcagagacttattttccctgtaatagaatgcaaaatcagggaaaatgggttgctttgtgtctcaagtattgtctttatttttgagactattttcatacagttgtcatacacaaggcgcatatatatatttgtgaattaaaatctgtagctgagtctacattgttatgagtcaccattttcacacaacatcatgaatcttcactgttagtactttcatatagaattcggttgaaggaaagattgatttttgtgtagatgtttaatataactttacaactatatctcattgaaaataaagtcattggggatttttacctctaatttggatggaaagcacaagaagccacacattcattaatatgcaacaaatgttgtatttatgttactgaatatttctatggattaaaatagaaaaagtttaattgattttttcttttaaattttaataacaggttcaccagctggtagaaaatagagacacatgatgatttgcattgtaataatttctgtgtgtatgtgtgtgtgttgttttgtttttataaagaaaagtgtgtttgtacccatgagttcagcatttctgccatcttgctattttcattttccctgtggaagatgcatggttgcatccttttccttctgaccaacacttagtctttaactttgtaaggttcggtttaaggtttcagggttagcactatagttttggttcattttctcattaacgataaaatatgctgtaaggcactataagaatataaatgattctattacaattgaaagttacttgacattacatgaattgaactgcctttcattatcttcagacactttgttttagtatttttttttaatttgctaggtttgtatatagaagatcctttcattatcaagaatgagtatggttgcttttgccatggttgcttttactattaataaatgtatctagcctacccaaactctgtagtaacttttgagattctcttaatttcccctcagattaaaatagagaaggttgaaggtactttttgatgaaatttttttctagtctggttagaaaaaaaaagttgtgacatattcattgtgttaccgtaactagaaccttgctttgtgaactgtctttcattgggatgtatggtttctctcaatgtgaaatctggaaacttcatgtaaactacccatgccgttatttcatgtgactccagtgcccttgtattccataacatgctgatgagagggatttctcacggtttctttctttgctaaattttttaaccataaagcagcttaccctttattttcccatcttggaagtaaaattgaccaaagaatgtacgttctagcctggtggaatgtgcatactttaggtttgtatgttacattgtccaaagccctttactttcttattagtaaactgaatctaatatgacacaaatgttttcacccaatctcttgcaactggtcaaattcgagaaggtgttgggccttagcagtaggccttttcagtgaaaattcattcaaagttttggtaggtggaacacttgatatttaaataggacttgaaaattttgaaaagagtatcagagacctcatttttttcctttgcaataagctgaagaaactttctttttcaggagagatggcaaaggtatatgctgttgccagagtcctgtggtataagcatctgtttttattatagtatgtcaaagttagggaaatgggactggcaagtaaaaaatggaatttaatttcaatgttttatgggaactctgatttaatgggaagcaaactagttcatattagcaggaattattttattttttcgagacagagtttcactctcgttggccaggctggagtgcaatggcgtgatctcggctcaccgcaacctctgcttcccgggttcaagcgattctcctgcctcagcctcccaagtagctgggattacaggcatacaccaccacacccagctaatttttttgtatttttgttagagacagggtttctccatgttggtcaggctggtctcgaactcccgacctcaggtgatccgcccacctcggcctcccaaagtgatgattttatttttatttttaattgtattaatctgcatctagataatgactttgtgaagggtgtgtgttgtgtgcaaaacttaaggtattggttgagagttaaatacattatttttataatatgttgggtatagtctagttactaatgattttttttaagtacttttataaaaagttcatttttaaaattgtttgtttttaaaagccaatatacgttgcagaattaggaacagtatttatatttatttacacaagacattgtgccatagcatcctagtaaaacaccttcatgaatgagtaatgttatctcccagaattacattaaaattatttctaaaaagtagcaaagtcattaccttttgcttttaatgacccacacctcaccagctcctggtcttttcttcactgttgcccttattttgaggcaatttttcttaaaatatgacttttatgcaccacatttagtagaggcagtgacatcagtgatctcagtacccatcagctgtccccctcctctgcccttcttcatctcttctaccttgtgaccatttcccttaccggttcatgttctcctttatctctgcttttctttcttagccaggatacttccctcacaactctcactcccaaattcttttagatatacatttttctggatattggctgctgaaatctgaagctctggtaaagttcctagtatcagagatcaatcctggaggaggcctagttcactattagattacaaagactcctcacaaagtaaaggaaaatcaccttcaaaaccacaaccctttatgttgtcaagtctaatatgagtgtttttacgaagtatttctttctacccattgttcaagaatgtaaatgtaaaaaaaaatacaagagagttgggtagatatgcatgcttgaggaaacttgcttttactgttttcctacttgtatccccagttcagttgaatttacaaggacctacaagatggtcatgtttgtcttggtatgtgctaccccaattttagtgtttctttctttattttaaatcagtaattattcagttgattgtttatactatataatgaagtaacaaaaacattttggtttgtatgttttaagtaacagttgtgcaaattcctcttgtttgttaggtgctccctttgaatattttgtgaactgtgtcagagggagaggggtggtggctaggaagagggtcagaaagaagctagagggaggtcaggagaagggtaacagggaggatgcaaagcagacatctaccctggtcaccccaggatcaggatatctgtccttgtttcatgttgaattcaaaaattggatctcacttaggctttgaaggtgacagccatctctgatagctgagcataagtaaagaaaggtggagtgccgatgcagaaaggaaaatattcagctttcctctcttagatcgcactttgaagatggccttttggagacaatctgacaggttaaaacaggaactgttggaattattctagctgtaactacctattggctatgtgttgattgatcctagaaagaaaaaataatttttcattttagatcttgattgaatttaagatgtatttatatgcctacaaaaggtctgtcttgtaactgttgtataaaataaacctaatctatggtttcatttttaatctaaaaaaagttgtgccttaacaatagggcattgtatgttaataagggaaaacaacctttttagtagatgggggaaaataggaactttttgccattaaaacttaagttcttttgatgtttttaatattatagttgggggagattcattaaaattaaattgaaataaaattatttttgcataacctagcatttacaactaaagtatgttttttataagaactggcatcttgatgtatataggtctgaaataatatttcatcttttgatttttaattttaataatattagaccaggatagatcacagttttacaaatcttagttttaaataaattatttcagtgtgctgttagtcctctacagtcattttggtttaaaaagtgactatttatttatggtagcatatcaataatttattaatgttaaaaaatactgtgtatgacattacaaaccagaacagttcctgggggagaggattctaattgattggcagttctgagagggcaagaagaatggaactttatacttcaaaaggaggttttggttttaccaggtactgcttatgtaaatcgtttatttttatttcatcaaagcctggcaagtatatgcattccaatttaccattggcaaagctttatttatttttaaggttggatgttgaattaattttgtgggaaaatgagatttgtaagtagttttctttctagataagataacataaaccaaactttcagaagttaaggatgatgaataatattgaaatgacttgttatatattgtaagggttcccttaagtatcataattaacaatttgtggaaattgaaaaagcataaactgtgttatttgattagtaatatgttcccttaaaattcattttgaggtgtatgttatacacacagtaaatttttgttcaggaatgacttgctcattctgtgtttttaaaaataggaaataaggcatagtgagtcatcattacatcaattaaccaaaaaatatttcatcccctccgtcactgaaattatctacttcagccacctttcttattctcgtgttaggagggcacgtttatggactttttaatttccatgtgccatattgtccactaccggcagtagccaaagctagctgtttcagtcccacagaagagacagtgctctgccatgatgacagggcactgctagggctggtttttcttgtttttcccttttggcagtgtggacttcaggaactagatgtatatgcacaagggattgagtttacactaaaactaggaaatggagttttcaatctatgttcttgcctcttcatacttttatttattttttgtcatcctgccttatactgggctaacaatgagataaaataaaaatacctttgaatactcttttccctttcatgcatttaaagccatggaggaactagaccattagctgttgccgtcacatgcttagacaccagtttacttagcgtgttatgaccttcctcacccatactaccaaatttaaatgggtcccgacttcaccctctggaaggaagtaaactcttctctccccatggtttcagagcagtttttacctgcaagcaccatctctgtatgtgctcttactagattatacagttcttgagagggattgcatcttagtgtttttgtatttccacctcacccccagcacatagcccagtctcttgcacaaattaagtacttaatgtgtgttgagctaaattgaataaaggattattagcattagcatattttgtgccttggttgtataagctggttgtttgttttgttacctttgcaaatatttatgattatcacccccccacatactaaattgtttttaaaagttttgcctttccttcagatactaccccaggcaatttgctgtagataatgtgattgcttccaatgacataattatcccaaactctctgccccggatatactttgccaaacgaaatttgaattctctgaataaattggtcatgtctaaaagagaaaaaaaaaaaaa

SEQ ID NO: 2512 - DNA, 1103 bp, Homo sapiens
tagggagggcgggcctgtttccgggaggcgcgtggggcttgaggccgagaacggcccttgctgccaccaacatggagactttgtaccgtgtcccgttcttagtgctcgaatgtcccaacctgaagctgaagaagccgccctggttgcacatgccgtcggccatgactgtgtatgctctggtggtggtgtcttacttcctcatcaccggaggaataatttatgatgttattgttgaacctccaagtgtcggttctatgactgatgaacatgggcatcagaggccagtagctttcttggcctacagagtaaatggacaatatattatggaaggacttgcatccagcttcctatttacaatgggaggtttaggtttcataatcctggaccgatcgaatgcaccaaatatcccaaaactcaatagattccttcttctgttcattggattcgtctgtgtcctattgagttttttcatggctagagtattcatgagaatgaaactgccgggctatctgatgggttagagtgcctttgagaagaaatcagtggatactggatttgctcctgtcaatgaagttttaaaggctgtaccaatcctctaatatgaaatgtggaaaagaatgaagagcagcagtaaaagaaatatctagtgaaaaaacaggaagcgtattgaagcttggactagaatttcttcttggtattaaagagacaagtttatcacagaattttttttcctgctggcctattgctataccaatgatgttgagtggcattttctttttagtttttcattaaaatatattccatatctacaactataatatcaaataaagtgattattttttacaaccctcttaacattttttggagatgacatttctgattttcagaaattaacataaaatccagaagcaagattccgtaagctgagaactctggacagttgatcagctttacctatggtgctttgcctttaactagagtgtgtgatggtagattatttcagatatgtatgtaaaactgtttcctgaacaataagatgtatgaacggagcagaaataaatactttttctaattaataccaaaacccgaaaaaccataactaa

SEQ ID NO: 2513 - DNA, 5211 bp, Homo sapiens
gtgcagtcagggcttctgctgggcagggccggctgttaatctcgcctggcggagcggacaccggggcgtggtgggggagatgggccttataggtggcgtccgctggtgagaaacaccttgcgcaggtaaaagggtggcggcgagagggagttcccacccgtggctttcttagagaaatgaagtcttaagtcttaaatagacaacaaggaggggccgatcggtgtcttttggacgcgtctggagcccctccctccgccaaaggaaaagccccttggatgagaggcaggcgcttcagagaagctaagaaaagcacctctccgcgcgccccacctcctccgcctcgcgctcctcctgagcagcgggcccagactgcgctccggccgcggccctcgccccgcggagccctcctaccccggcccgacgctcggcccgcgacctgccccgagccctctccatggaggcagcccgcccctccggctcctggaacggagccctctgccggctgctcctgctgaccctcgcgatcttaatatttgccagtgatgcctgcaaaaatgtgacattacatgttccctccaaactagatgccgagaaacttgttggtagagttaacctgaaagagtgctttacagctgcaaatctaattcattcaagtgatcctgacttccaaattttggaggatggttcagtctatacaacaaatactattctattgtcctcggagaagagaagttttaccatattactttccaacactgagaaccaagaaaagaagaaaatatttgtctttttggagcatcaaacaaaggtcctaaagaaaagacatactaaagaaaaagttctaaggcgcgccaagagaagatgggctccaattccttgttcgatgctagaaaactccttgggtccttttccacttttccttcaacaggttcaatctgacacggcccaaaactataccatatactattccataagaggtcctggagttgaccaagaacctcggaatttattttatgtggagagagacactggaaacttgtattgtactcgtcctgtagatcgtgagcagtatgaatcttttgagataattgcctttgcaacaactccagatgggtatactccagaacttccactgcccctaataatcaaaatagaggatgaaaatgataactacccaatttttacagaagaaacttatacttttacaatttttgaaaattgcagagtgggcactactgtgggacaagtgtgtgctactgacaaagatgagcctgacacgatgcacacacgcctgaagtactccatcattgggcaggtgccaccatcacccaccctattttctatgcatccaactacaggcgtgatcaccacaacatcatctcagctagacagagagttaattgacaagtaccagttgaaaataaaagtacaagacatggatggtcagtattttggtctacagacaacttcaacttgtatcattaacattgatgatgtaaatgaccacttgccaacatttactcgtacttcttatgtgacatcagtggaagaaaatacagttgatgtggaaatcttacgagttactgttgaggataaggacttagtgaatactgctaactggagagctaattataccattttaaagggcaatgaaaatggcaattttaaaattgtaacagatgccaaaaccaatgaaggagttctttgtgtagttaagcctttgaattatgaagaaaagcaacagatgatcttgcaaattggtgtagttaatgaagctccattttccagagaggctagtccaagatcagccatgagcacagcaacagttactgttaatgtagaagatcaggatgagggccctgagtgtaaccctccaatacagactgttcgcatgaaagaaaatgcagaagtgggaacaacaagcaatggatataaagcatatgacccagaaacaagaagtagcagtggcataaggtataagaaattaactgatccaacagggtgggtcaccattgatgaaaatacaggatcaatcaaagttttcagaagcctggatagagaggcagagaccatcaaaaatggcatatataatattacagtccttgcatcagaccaaggagggagaacatgtacggggacactgggcattatacttcaagacgtgaatgataacagcccattcatacctaaaaagacagtgatcatctgcaaacccaccatgtcatctgcggagattgttgcggttgatcctgatgagcctatccatggcccaccctttgactttagtctggagagttctacttcagaagtacagagaatgtggagactgaaagcaattaatgatacagcagcacgtctttcctatcagaatgatcctccatttggctcatatgtagtacctataacagtgagagatagacttggcatgtctagtgtcacttcattggatgttacactgtgtgactgcattaccgaaaatgactgcacacatcgtgtagatccaaggattggcggtggaggagtacaacttggaaagtgggccatccttgcaatattgttgggcatagcattgctcttttgcatcctgtttacgctggtctgtggggcttctgggacgtctaaacaaccaaaagtaattcctgatgatttagcccagcagaacctaattgtatcaaacacagaagctcctggagatgacaaagtgtattctgcgaatggcttcacaacccaaactgtgggcgcttctgctcagggagtttgtggcaccgtgggatcaggaatcaaaaacggaggtcaggagaccatcgaaatggtgaaaggaggacaccagacctcggaatcctgccggggggctggccaccatcacaccctggactcctgcaggggaggacacacggaggtggacaactgcagatacacttactcggagtggcacagttttactcagccccgtcttggtgaaaaagtgtatctgtgtaatcaagatgaaaatcacaagcatgcccaagactatgtcctgacatataactatgaaggaagaggatcggtggctgggtctgtaggttgttgcagtgaacgacaagaagaagatgggcttgaatttttggataatttggagcccaaatttaggacactagcagaagcatgcatgaagagatgagtgtgttctaataagtctctgaaagccagtggctttatgacttttaaaaaaaattacaaaccaagaattttttaaagcagaagatgctatttgtgggggtttttctctcattatttggatggaatctctttggtcaaatgcacatttacagagagacactataaacaagtacacaaatttttcaatttttacatatttttaaattacttatcttctatccaaggaggtctacagagaaattaaagtctgccttatttgttacatttgggtataatgacaacagccaatttatagtgcaataaaatgtaattaattcaagtccttattatagactatttgaagcacaacctaatggaaaattgtagagaccttgctttaacattatctccagttaattaagtgttcatgtggtgcttggaaactgttgttttcctgaacatctaaagtgtgtagactgcattcttgctattattttattcttgtaatgtgaccttttcactgtgcaaagggagatttctagccaggcattgactattacaatttcattttggtggagtttagttttaggttttattgtatataaaatcctgcactgaatctgtgtctcctctgttacctacttttgccagtgaaatttaagttttaaaatactttcagaatgtatttttactactgcaagtttttggtctttaaaatgtcaagtagcatctctctctttctctctgtctctttctgtttctctctccagttttttttttttttttaatttccatatgggctaaagaatccaaatattttaaaaatctgtctctcttttcttctctcataaagtgaattattccttttttttgttttatgtaagtgtatatattcttagtttttcttgaaatcattgtaatgttaactttgttgtttcaaatatcttggtgattgcttcattatctcttcaacaaaaaaaacctttaattttgccattgaaactgtagaactatgccatgcttttattagaagcagtgctctgtgttaacaacaagaatggtgtaattagaattgggatgtggatatttactgtatgacaacacatttacagttctgtaatgcaaggatgcagtttaaaaatgtgaagtagtgatggtttttgaaataagctttaaaatatagggatcttgaaggctccctggggtaactattttataacttagataaaatggctagtcatatctgtgtgtttgtaaagttatttttttaatattttaagattacaattttaacaaatgtagaaatgagccaaactatttaaattttaaaacagtaaaacaaaatgaaacttaatagctcacaaaattccagtccatgtttcatgacttattttagtcaatgaattttctatttatactaaacatatggacattttaaatgtgtttctaatatttttgattatctataatgtgcctgtcttcaattcacaagattgggttataacaattatttgccagattaacactagggaattatttgataaccagcttatcttatcagtagttttattgctgatcaggcaaaaatagttttccaaagttatttttaataaagtatatacaaaattcttatatattactagtcatgataaagtaaattaagcagtttttaaaacttagtgtgagtttgttcatcacaggtctgatatgagtttaagggatttcgcactccctgaatcagagaagtaagaccccttccttagattcctgttatacattttttaaaatgtagagtttgttttggagacattttcagtgcattgttattgccatatttatataatatgactattctaaaggctgtgaggccatggggtattggttaagttgcttgcttttgctttgtccattttcatcattttaaaatgggggataataacagaacttgtttcctagggccattgtaagtcacttgaataaaaaatagttttgaagcatgagagtcatacagagcggtccacctaaaaggcactcctgataataataaatgattttaaacaaaaaaaaaaaaaa

SEQ ID NO: 2514 - DNA, 4797 bp, Homo sapiens
ggcgggagggggcgggaaatcctcggcctcggtggcggtggtggacacgtcgagccgggtagaagtggaggggccgttcgaagagtcgtgagggggtgacgggttaagattcggagagagaggtgctagtggctggacttgacctggaaagaatcttctgctgactctcaacttttcctggaaaaaatggatcattcccaccatatggggatgagctatatggactccaacagtaccatgcaaccttctcaccatcacccaaccacttcagcctcacactcccatggtggaggagacagcagcatgatgatgatgcctatgaccttctactttggctttaagaatgtggaactactgttttccggtttggtgatcaatacagctggagaaatggctggagcttttgtggcagtgtttttactagcaatgttctatgaaggactcaagatagcccgagagagcctgctgcgtaagtcacaagtcagcattcgctacaattccatgcctgtcccaggaccaaatggaaccatccttatggagacacacaaaactgttgggcaacagatgctgagctttcctcacctcctgcaaacagtgctgcacatcatccaggtggtcataagctacttcctcatgctcatcttcatgacctacaacgggtacctctgcattgcagtagcagcaggggccggtacaggatacttcctcttcagctggaagaaggcagtggtagtggatatcacagagcattgccattgacatcaaactctatggcgtggccttatcgattgcagtgggaagttgttgaagacttgaagacgtgattcctgctccaatcatcccttcttgctcctctttgtgcacgtacacacacacacacacacacacacacacacacccctgctcaacagaggtttagtttacagtctctgaactaaagtagtaacctcccaaattgttttttctaataagctgagattcccatttctcttaaggagaagccacccatgagatgtcttttccttctccatcatcttagagccaagttatatgttcttgtctaatccatgtagctttttgttcaatgacttgatcatctgcttcctttttgaatttttaacagatagtaagtaaatttggtggttttttcccctgggtcagtgatggaaaggggttaacttcagccaggattgatggcagctgagggaaattcttgcccaactaaacccagaactcaaacttaacattagaaaataaggtccagggccggacacagtggcccatgcctgtaatcccagcactttggggggccaaggcaggctggatcacctgaggacaggagttcgagaccagtctggccaacatggggaaaccccgtctctactaaaaatacaaaaattagccgggcatggtggtgggcgcctgtaatcccagctactcagaaggctgaggcaggagaatcacttgaacctaggaggcggaggttgcagtgagccaagatggcgccattgcactccagcctgggtgacaagagtgaaactccatctcaaaaaaaaagaaaagaaggtccagcttttggattcaatgagtgggaaatacattgtgcctttctctagatgtgatacgttataccaaaatctttgtagtgtgcagagcggtggtttgagactaaatacaggcttagaacttgcagagtgtgtattcttggatggctgatgcatcgacttgcattcccacttaacactttgattagcatgaacttgccaatcaaaaaatgacaatcaatttgagaaaatagaaatagatatttttaaataaaaccattcacagtttactttgtcttgataccttggtttgtcccagctgaagtgaagcaagagagtttgaattaatttttccattataatgttttcgcatgtctgcctctaaaactgtgattttcaagctttagcgtgcatcagaatcacctgtagggcttgttaaaacactaattgctgggcctcaacccaaaagcccccaaagtggcacttctgagttcctgctgatgttacaagggaccacacttttgagaatctgtgctttaagctaaggaaatattgcctggtgggttggctgcctggtattgggcatggaaatttgaattgctgattggtagatggtgtgtctggacttaactcacgtagtaaatactgctgatcaatacctaatcattccacatttattgagctccacctgtgtgtatgtgtacccaagcacacatgtgtgaagggctatagccaaagtatttttactagcctgtatgaaatcactagtccttatttttaaaggtctatggtttcttggaagtagtttgattgttgagagagacctttgatctgcagtgtaaatctaccagtcatgggccagaagggcaaaagcccagctttctctttggaaagactcaggctgtggtttgttgatggccaggttttcctcaggctccaacaactgtgcttataccaagcagatcctcatcctccatataatcatctttgttattcgtgggggtttaattacattacaagtggccaaaacccctgttctcagtgaagaaccacattggatttgtattctgttcagttgtagtctacactgcagtcttattcctggttcaaactacctctttaaattgatttgtcttgtgctggtctgttaaatcctgccctccttggtgctagatccagttgtgcctcagggcagaggaaacaaaacacagctatcctgttggcctgtgttgtggttttgaagtttgtactttctctgtgggtgccagttaaatattggagagcaaggaatgtggacttgtatggctttgaaccaagagagggttatgagcctactggattgaggttaaaatccaagaaccaacatttagagctttgtgcttttctctcattccatcactttgtaatgatgatacttaacatgagcagggtgaatgacaggtactgacgaagtccaacacaaaggtataatacagcctgttgtctaaagccaaggagtcataaaaccatgagaaataaataggaatcaatagttagtagtgacattggtgctctctagaaatctcagcatgagctgctatagaataccctcccagcaacaaaacctaatcagtaaggccagctagacccaatggctcatgcctgtaatcccaacactttgggaggccaaggtgggaggatggcttgtgtccagaagttcgagaccagcctggacaacatagtgagatcctatctctataaaaaatcaaaaattagccaggcatggtggtgcatacctatagtcctggctatttgggaggctgaggcaggaggattgctttagccctggaggtcgaggctgcagtaagccatgattgcgccactgcactcagcccgggtgacaaagcaagaccctgtctcagaaaaaaagaaaattcaaggccagttaagacaaaatgctatgactttgaaattcacagaaagaaataacagtttagattaggtcttcaggtattcaggatagagataatctcctgaaaaacctgaatttcagagattcttagactggctgccaaaggatgaagctagtgaaggagaaaaagcttaaattccatcttgagctcttggattgtgataatacaatgatttcattaacttttcatttctgtatacctgttcatttggaatttaatgcttgacttctttgttcattttggatctaaacttctcttttcttccttccccattcacatctattagaagactgcatcaccatttctttggcccccttactctgttgtcctttcccttttctttcagtttttttaatcgcatgtctagtatattaagtctccatagccctcctgatgcagtagacagtgctatgctgtggatataataccaaccagaaattggcatttataaacctgttaagagactttaagcatgcttcaagaggcagttgacccactggaatttctataaggctggtacccttcccagagttacagaatcttaggtgccgtctctagtctgtgagggaggaactcccagcatccccattgcccacaaatggaatcctcactgtatccactaggagattagaaattaaggtttcttcactacttctatggtagggttgtctgaaattccctttcaggctgtgggtactggtcttgggttctagtcataaggggttccttataaggagcaggcggaggggagtacactttcatgtgatttaattttgatcctgccctctccagctgctccttcaaaagatacatcaaaagatagaaactctgggctgggcacagtggctcacacactttgggaggccaagcgggggtgcagatcacctgaggtcaggagtttgagaccagcctggccaatgtggtgaaaccccatctctactaaaaatacaaaaattagctgggcgtggtggtgcatgcctgtaatcccagctactcgggaggctgaggcaggagaatcgcttgaacccaggaggcggaggttgcagtgagccaagatggcgccattgcactccagcctgggcgacaagagcaaaactccgtctcaaaaaaaaaaaaaagatacaaagtctgcatttgatataatgccttaattactgggtctacaattaatgttgactgttttagattgtaagctcctggagagcagtattgctgtagtaggaatgttttaacagtgtcatatgaaaaagaacaaaataaatattttgattttgtgattctaaaaaaaaaaaaaaaaaaaa

SEQ ID NO: 2515 - DNA, 6253 bp, Homo sapiens
catctgaattccttctctgtggcatatgctttaggagaggagcagacagctcttagctagggtcagatttcaaattctcatctcttggtgccaataccaccaccagattcttctttgaagtcaacttttgagatcttcactaagtacacgttggtgtctgaagattcacacgagtgcctctggtaatcattttcttcagggaatcacagtctctcctctcagcaaagcatccactgtactgaactttgcttttggaaacatcttcttcctgagacctcgttgaaagaaactctctggtgtcatactttccaatatggaggtgaagaactttgcagtttgggattatgttgtatttgcagccctctttttcatttcctctggaattggggtgttctttgccattaaggagagaaaaaaggcaacttcccgagagttcctggttgggggaaggcaaatgagctttggccctgtcggcttgtctctgacagccagcttcatgtcagctgtcacggtcctggggaccccttctgaagtctaccgctttggggcatccttcctagtcttcttcattgcttacctatttgtcatcctcttaacatcagagctctttctccctgtgttctacagatctggtatcaccagcacttatgagtacttacaactacgattcaacaaaccagttcgctatgctgccacggtcatctacattgtacagacgattctctacacaggagtggtggtgtatgctcctgccctggcactcaatcaagtgactgggtttgatctctggggctctgtgtttgcaacaggaattgtttgcacattctactgtaccctgggaggattaaaagcagtggtgtggacagatgcatttcagatggttgtcatgattgtgggcttcttaacggttctcattcaaggatcaactcatgctgggggattccacaatgtattagagcaatcaacaaatggatctcgactacatatatttgactttgatgtagatcctctcaggcgacacactttttggactatcacagtgggaggaacttttacttggctcggaatctatggggtcaatcaatcaactattcagcgatgcatctcttgcaaaacagaaaagcatgctaagcttgccttgtattttaacttgctgggtctctggatcattctggtgtgtgctgtcttctctggcttaatcatgtactctcactttaaagactgtgacccttggacttctggcatcatctcagcaccagaccagctgatgccgtactttgtcatggagatatttgccacaatgccaggactgccaggactttttgtggcttgtgccttcagtggaactctgagcaccgtggcttccagcatcaatgccttggcaacagtgacctttgaggattttgtcaagagctgttttcctcatctctccgacaagctgagcacctggatcagtaaaggcttatgtctcttatttggcgtgatgtgtacctctatggctgtggctgcatctgtcatgggaggtgttgtgcaggcttccctcagcattcacggcatgtgtggaggaccaatgctgggcttattctccctgggaatcgtgttcccttttgtgaattggaagggtgcactaggaggtcttcttactggaatcaccttgtcattttgggtggccattggggccttcatttaccctgcaccagcctctaagacatggcctttgcctctgtcaacagaccaatgtatcaaatcaaatgtgacagcaacagggcctccagtactatccagcagacctggaatagctgatacctggtactcgatctcctacctttactacagtgcagtgggctgcttaggatgcattgttgctggagtaatcatcagcctcataacaggtcgccaaagaggtgaggatattcaaccactgttaattagaccagtttgtaatttattttgcttttggtctaagaagtacaaaacactatgctggtgtggagttcagcatgacagtgggacagagcaggaaaaccttgagaatggcagtgcccggaaacagggggctgaatctgtcttacagaacggactcagaagagaaagcctggtacatgttccaggctatgatcctaaggacaaaagctacaacaatatggcatttgagactacccatttctaaggcaatacctgtatgaatgcacacacacacgtgcaatacacacacacacacacaaactccacatacttcttgcctacttgttagtagatatgtatagttgccattgctagaagacagggatgtctggtgcctatttctacttatttataactacatgcaaaatgactgtctctcgggatattctttgaaagactccaactttcacagagaaaaaccaacctgctccaaatgcccttgactacttccttcttgaataaattagggctggatttcattaccattcaagaaagcgaagtctttttgcttggtgtcatattaaacttcaggtttttcgttttagtagttttttaaccatcaaaatatcttggagtttagaggcagaacgggaaacagaaatatgcatatttaacactttcctgccacgagggataaaatagaggaatgacatccacccctgacctcatacctgacatacatgtagatatattttatgccacccatctcccatcctgtagctacaattggcatacaactactattaacctcccttcaccaccactgtcaggtcctcttccagtcattccagtcattagctgtcctgaccaaacattaaaaaaaaaattcagctaaatacagaagaagatggtatgtctggctagtgggagtgattataactaaaaactttgctccttttgtgctgtccatgcagtatgtcttcttcctttctatcactttacaatgaaaaattgcctcagagctcaataagaagtctagagcctttttccagggctaaggaaagagaaaaggaatgtcctatagaaggttgttaggatagaatttggtaaaagaacgttgcaaatattgtaacagaccataggagatttcatcagcaataggattcttctttggagaaaatacattgtccataagacttgtactctgctcattcaactcatgtgagcaagctcaactcactccacctgggttaggtaacagaagtggagaacttcatagttcgtgtctagaaaataatgtttaaagttctggagaatgagggtattgcagattaaaaggcgagttgacaaatgaaggagcagtgaaagatttttggaagaagtgaagaagtgaaattctgaaaaggtaaaagaaagaaccagtatgtcacaggggccaagtcagaggacagataataagaaacaaagttgtatctgagagtcatatattaggacaggtgtcagatatttattttggtggccagataaaagcaaaaggcctagaaacagtgtgttagcaaagtaagaagaaatggtccaaataggcaaggataaggaaatccaaaggttgtctttaaatatttctcaaaagagaaagccttgaaagaagcatacaatagagaaaaaataaattaccagtatttattattagaaaagatagaaagacagacaaatcagtggaggaattaaaacagagaaactggagtttataaaacagagcccaatccttgccttctctccctccactcaaatagaaaaggagaatggagaaagagaaagaaggtattaggctacagtttataagagagatgagaaaaaaatacatttgggaatagagggaaagggtcaaaaggggtcacatttggagaaatatctgaaaatgagaaggagcagaatttttggaaacattttttaaagtctggcaacgctaattaagctgttgatctaaggatttgcaaattgagaggtgcaattattttccaaatgatttgtgacactcttattaattagaatatatattttgtgaatattgaaatctgagccaaaactagttagctttattaatatcttagggaaagaagagagaaagaaagagggagggagagagagaaagaaagaaagaaagaaagaaagaaagaaaagaagaaagaaagaaagaaaaagacaggaagaggaagagagagacagaaagaataaaaaaacagcaattctgaggatgagaataaattaatggtaggtattacatatgcatatacatatatatatctgtacacatatatatgtaaatatgatttggaatacatcaggattgtgaacttccacttgggatagcataaaagcaaaatataccatacaatttttcattttactcacaaattttactcacaaattctcctaaagacatttcactaggtcagtacatttccgagaaagttttaaaaacgtttcttcttttatagtccctaattatcttacctggagtgttatcaaaatgtcatacaactggaaaatgcaattattattataaaaatatctctgccttctcttgtgtaatgaaatttatggcattaggagatgacatttcaagagattttagaggtcaatgtagagactccccccattcttcttaattgaacaaacatgcataaatctagggtttcaggtagagagcagatgggaatctacaggaaactgtcttccatagtgtatgaaaaccgtgtttgttgtgtggtgaagcaaaaggaaactatgaagcgcacagtcaatagattcagctagtgagtcccagcactcctttcaggccctcactaggattagcagcccagagtcatgccaaggccactggtgcagtacaaagacagttcagtgacaagttccatccataccatggaagagggttaaacttgtggctgtttttgccacagcatgaccagagacattctcaataaatggcactaggaatgatgagttttagaggggcctaaaatgttccaaacttgatactcaccactgtacctttaaagcacaaccacagatattggtaaaaatggaacagaattacctcaatacctctttaactcattctgtatgaattcattttgatgacagacattttttgtcaccatttggaataagaactacaacagcttatgattgaggtgaggaactgcagtcaaatggcttaggttcaaacacgagttctgacacaaatctaggtaattttgggcaatattttaaaatcttagtttattcaccaattaataggagtaaaaattacccctacttaatagaattattatgaagatttatataagtaaatcatataaagtgcttagcacagtgtgactggcccacatggaacatttaatacttggtctgcagtatatgaagaaaatggtgtacatgttaacttaaatggtttcattatttctcttcaggatttttaagatgtgggatcagaatatatgttactattttgagaattagaaataataagaaaaacagaatgtatacattaaaagtcatgcctaaatttccaaagagtagtttttttaatgccagagtttaaataaaatattattttccagagagtaacttttctaaaggtcctaaattctgaaaagagagaaaactactgttataaacaagtttattactaaaagatgcaattcattactatgatttattattattttgtacatgtaaaccttgataaataaacagcatctcaacccaagtttattactcattgcacagttcaaagcaactatgactctcaaaatagcaacagaaggtggggagggtcttttccctttgtttatatagtatttgctaaaaatgaactttactattttgtggctttatagggttacaccatttcattctaaagagaaacaaaaagtaaaccattggccatgtggctttcaaacagtatttcaaagagaatattactgaaatatttttgtgctgttacagtcttaatcaaacattattacaaagatcagatacggaaaaaatagaggagtctccccttaattgttccctttgaaataaattgttttaaattattacagaagttatagctgtatgtacatgcacatttgtatatttacaagtctcatgtacttaatctcaatattgcaaattagctaggtttactatagagttaactgcttttatctagcatttataatcttgtagtataacctattttcaaataactaaaatttaattgatgtcatcaatggtacacatgaaaatgatacaaatttataaactaataaaatgtaactcgtcattgatagtaaat

SEQ ID NO: 2516 - DNA, 3744 bp, Homo sapiens
tttcagccaaccagactggagcagctgcgagtgctacatcttggctgtctgaagcgattggctcctctctggggagtggagggtgttcagttattaatgaccgctgagcaggcagcaccatgtcagtgtgacaactgatcgggtgaacgatgcaccactaaccaccatggaaacaaggaaaaataaagccagctcacaggatctctcttcactggattgagagcctcagcctgccgactgagaaaaagagttccaggaaaaagaaggaatcccggctgcagcctcctgccttcctttatattttaaaatagagagataagattgcgtgcatgtgtgcatatctatagtatatattttgtacactttgttacacagacacacaaatgcacctatttataccgggcaagaacacaaccatgtgattatctcaaccaaggaactgaggaatccagcacgcaaggacatcggaggtgggctagcactgaaactgcttttcaaggaggtgaagcattccacagataatcagctactctattcagggaaggagtgtaaacatcaccactttttgcatgtttgcataaaaaaggcccactgaatcagttaaagacgaggaagaggaggagaaagagaaagaagaggaagatgttgggcaacatttatttaacatgctccacagcccggaccctggcatcatgctgctattcctgcaaatactgaagaagcatgggatttaaatattttacttctaaataaatgaattactcaatctcctatgaccatctatacatactccaccttcaaaaagtacatcaatattatatcattaaggaaatagtaaccttctcttctccaatatgcatgacatttttggacaatgcaattgtggcactggcacttatttcagtgaagaaaaactttgtggttctatggcattcatcatttgacaaatgcaagcatcttccttatcaatcagctcctattgaacttactagcactgactgtggaatccttaagggcccattacatttctgaagaagaaagctaagatgaaggacatgccactccgaattcatgtgctacttggcctagctatcactacactagtacaagctgtagataaaaaagtggattgtccacggttatgtacgtgtgaaatcaggccttggtttacacccagatccatttatatggaagcatctacagtggattgtaatgatttaggtcttttaactttcccagccagattgccagctaacacacagattcttctcctacagactaacaatattgcaaaaattgaatactccacagactttccagtaaaccttactggcctggatttatctcaaaacaatttatcttcagtcaccaatattaatgtaaaaaagatgcctcagctcctttctgtgtacctagaggaaaacaaacttactgaactgcctgaaaaatgtctgtccgaactgagcaacttacaagaactctatattaatcacaacttgctttctacaatttcacctggagcctttattggcctacataatcttcttcgacttcatctcaattcaaatagattgcagatgatcaacagtaagtggtttgatgctcttccaaatctagagattctgatgattggggaaaatccaattatcagaatcaaagacatgaactttaagcctcttatcaatcttcgcagcctggttatagctggtataaacctcacagaaataccagataacgccttggttggactggaaaacttagaaagcatctctttttacgataacaggcttattaaagtaccccatgttgctcttcaaaaagttgtaaatctcaaatttttggatctaaataaaaatcctattaatagaatacgaaggggtgattttagcaatatgctacacttaaaagagttggggataaataatatgcctgagctgatttccatcgatagtcttgctgtggataacctgccagatttaagaaaaatagaagctactaacaaccctagattgtcttacattcaccccaatgcatttttcagactccccaagctggaatcactcatgctgaacagcaatgctctcagtgccctgtaccatggtaccattgagtctctgccaaacctcaaggaaatcagcatacacagtaaccccatcaggtgtgactgtgtcatccgttggatgaacatgaacaaaaccaacattcgattcatggagccagattcactgttttgcgtggacccacctgaattccaaggtcagaatgttcggcaagtgcatttcagggacatgatggaaatttgtctccctcttatagctcctgagagctttccttctaatctaaatgtagaagctgggagctatgtttcctttcactgtagagctactgcagaaccacagcctgaaatctactggataacaccttctggtcaaaaactcttgcctaataccctgacagacaagttctatgtccattctgagggaacactagatataaatggcgtaactcccaaagaagggggtttatatacttgtatagcaactaacctagttggcgctgacttgaagtctgttatgatcaaagtggatggatcttttccacaagataacaatggctctttgaatattaaaataagagatattcaggccaattcagttttggtgtcctggaaagcaagttctaaaattctcaaatctagtgttaaatggacagcctttgtcaagactgaaaattctcatgctgcgcaaagtgctcgaataccatctgatgtcaaggtatataatcttactcatctgaatccatcaactgagtataaaatttgtattgatattcccaccatctatcagaaaaacagaaaaaaatgtgtaaatgtcaccaccaaaggtttgcaccctgatcaaaaagagtatgaaaagaataataccacaacacttatggcctgtcttggaggccttctggggattattggtgtgatatgtcttatcagctgcctctctccagaaatgaactgtgatggtggacacagctatgtgaggaattacttacagaaaccaacctttgcattaggtgagctttatcctcctctgataaatctctgggaagcaggaaaagaaaaaagtacatcactgaaagtaaaagcaactgttataggtttaccaacaaatatgtcctaaaaaccaccaaggaaacctactccaaaaatgaacaaaaaaaaaaaaagcgaaagactgcagttgtgctaaaaacaaaacaaaacaaacaaacaaacaaaaaagtaaaaaaagattactttcgagagagaagtttaagcttcaccaatgctgctcctgaccaatggaaatatgtacaacttcagcattttaagtaactggcttcaaggggtactgtggcaaccaaataaaataactccattttctaaaactttcatgtaacttttatgtctggactacagttcaagtggacaaaaacatttctgtattttttttaagtaaataagagtagttgaactgagcaatacctcctcctgtgttgtattacacatattagccacgagtttttgcagtgaccagataaacttgaattgacacgtggtgtaataaaatggacaaattctgtagagtagacacagtgagtatgtggacctcttttataaggaaaaatacattttggattaaaatcaattgcttctgtcttgttttgtttctaaataaagaataatttctgggaaaaaaaaaaaaaaaaaaa

SEQ ID NO: 2517 - DNA, 3638 bp, Homo sapiens; identical to SEQ ID NO: 2444

SEQ ID NO: 2518 - DNA, 3296 bp, Homo sapiens
ccggcaccgacaagtgcgctgcaccagtggcaccggctgggggcgagccgacctcgagcagccgccgccgccgccgtcgttgctactgccgcagcggagttcagagggcccggaggtgggagacttcccacacggtgactgagatgtcgtccactgcggctttttaccttctctctacgctaggaggatacttggtgacctcattcttgttgcttaaatacccgaccttgctgcaccagagaaagaagcagcgattcctcagtaaacacatctctcaccgcggaggtgctggagaaaatttggagaatacaatggcagcctttcagcatgcggttaaaatcggaactgatatgctagaattggactgccatatcacaaaagatgaacaagttgtagtgtcacatgatgagaatctaaagagagcaactggggtcaatgtaaacatctctgatctcaaatactgtgagctcccaccttaccttggcaaactggatgtctcatttcaaagagcatgccagtgtgaaggaaaagataaccgaattccattactgaaggaagtttttgaggcctttcctaacactcccattaacatcgatatcaaagtcaacaacaatgtgctgattaagaaggtttcagagttggtgaagcggtataatcgagaacacttaacagtgtggggtaatgccaattatgaaattgtagaaaagtgctacaaagagaattcagatattcctatactcttcagtctacaacgtgtcctgctcattcttggccttttcttcactggcctcttgccctttgtgcccattcgagaacagttttttgaaatcccaatgccttctattatactgaagctaaaagaaccacacaccatgtccagaagtcaaaagtttctcatctggctttctgatctcttactaatgaggaaagctttgtttgaccacctaactgctcgaggcattcaagtgtatatttgggtattaaatgaagaacaagaatacaaaagagcttttgatttgggagcaactggggtgatgacagactatccaacaaagcttagggattttttacataacttttcagcatagaaaaagaggtacttagaagtattgaaggaaaaaatgaagacctaagaaaaaaatatttcatgatcatttccctaagccatttccagaatggtaaaaggtttaatcagtttttattacctcatttttaagcctgtatgagaatgtagaaactatatattatatgtatatttattttaaataatattgtatattttatgtttgtaaattgtttagaaagataattggttatgagatgtaagttttaatttcttaatgtgcatttttgtttctagatcttatacagaaatcttgattaataacatacacagaaatgtacatactacatcatctacagaaatcttgatcaataacctagaaactaggttatctaggttattgatcaagatttctgtagatgatgcagtgttctatcataagtaattctggaatcaaagactattggatacatttggcattgggctgagtgtggtggctcatgcctgtaatcccagcactttgggaggctgagacaggcggatcatctgaagtcaggagttaaagaccagcctggccaacatggcaaaaccccatctctaccaaaaatacaaaaattaaccatgcgtggtggtacacgtctgtcatcccagcagctcttaaggctgaggcacaagaattgcttgaacccgggaggcagaggctgtagtgagccaagatagcaccactgcactccagcctgggagacagagtgagactccgtctcaaaaaaaaaaaaaaaaaaaaaaaatgggaggccgaggcgggcggatcacgaggtcaggagatcgagaccatcctggctaacatggtgaaaccccgtctctactaaaaatacaaaaaattagctgggcgtggtggtgggcaccttagtcccagctactcgggaggctgagtcaggagaatggcgtgaacccgggaggcggagcttgcagtgagccgagatcgcgccactgcactccagcctgggctacagagcaagactccgtctcaaaaaaagaaaaaaagaaaaaaaattggcaatagtcttcactggaatacaatcaattagtaaaagattttttttttttttttgacatgtagtcttgctctgtcgccgaggccggagtgcagtggtgcgatcttggctcactgcaacctctgcctcccaggttccagcaattctcctgcctctgcctcccgagtacctgggattacaggtgcctgctaccatgcccagctaatttttgtatttttagtagagacagggttttgccacgttggccagactggtctcgaactcctgacctcaggtgatccacccacctcggcctctcaaagtgctgggattacaggtttgaaccactgcacccggccagtaaaagaaattttgaaggccattgcagctatttggtagtgtcttgttatttctaggtgtaccttagttaaagaggaaaaataaaacggaaaaaagcttggaaatcagtgatgtgtagttatttggcaagttatacataatcagcagcagccaggctcaagaaaataaaagttgattagttgatcagaaataaaatctgtagagtgaattagatttctgagttgttgttgttaatggaacattctatttgagacctttttcaggtgtgtagcaattctaccatgtccatttttttaagcattaaaaaggaacttaccagttgtaaattaagacaagatccaaatagtcatatttttgtgtttcctctaaaaaaatgtaagatttccatttttggcactgactaactgagcctacatctagattttaaataccatcttgaatcctaataattaaactgatgaaagtgcatatcattgttcctaacatttatgaacccccataaagatgttcctgatctttaaaactcattaatctgagtattaagtagaaacagaattttccaaagcattagacatcactttctcagtttatctgaggtgacttcgtgtacatctgtttctaatatatttgactaattttcatgatctcagattgtgaggtaaatgtaatctggaataataagtgtcttttacctagattacatctctcatttggagtttggcaatgaaactgctatgaagaatgactgtactctcctatctgtccctggatgacataaatatcatttgctttgttgtttaaactgaaataaagttttccaagaacaaaaaaaaaaaaaa

SEQ ID NO: 2519 - DNA, 3638 bp, Homo sapiens; identical to SEQ ID NO: 2444

SEQ ID NO: 2520 - DNA, 3638 bp, Homo sapiens; identical to SEQ ID NO: 2444

SEQ ID NO: 2521 - DNA, 2792 bp, Homo sapiens
aatttagagaagatgtagggagtgttcaacatgttcgttgtggaagagaaagagctaagagagaggagcttaaagacacaaacgggtagaatcaaggagtgtgctctcaaatgagaggaacaggagtgacattaaccttgaaatgctcggagactctactccttcatgacagtaggaggataattaacaatagatacaaatgcaggaattgatgagtgccatcagaaagctgtatcatgagctgcctgcacttctaaagtgtccagtggatttttaatcacatgagcctggaaatagggttatgaaaagaagctcagagcagagcaccgaaagtggccactaccagcatgaagagcccaacaattcaaactggtgaagtgagaaaaacagaatgcagctttcaaggttcgtttcaagcagttggcttgtgggactctgagagatgctgctgcccatgacatgcgggaattatcatgatcaactacccagcttggatttcatccagtggccaagagctttgtgtgggagacggcaagggttggatttttcaaaagagtaaaccaggataaatcatgaggaacctataacccttttggccacatgcaaaaaagcaagacccgtgaccaaggtgtagactaagaagtggagtcatgcttcacacggccatatcatgctggcagccattcctgggtctggctgtggtgttaatcttcatgggatccaccattggctgccccgctcgctgtgagtgctctgcccagaacaaatctgttagctgtcacagaaggcgattgatcgccatcccagagggcattcccatcgaaaccaaaatcttggacctcagtaaaaacaggctaaaaagcgtcaaccctgaagaattcatatcatatcctctgctggaagagatagacttgagtgacaacatcattgccaatgtggaaccaggagcattcaacaatctctttaacctgcgttccctccgcctaaaaggcaatcgtctaaagctggtccctttgggagtattcacggggctgtccaatctcactaagcttgacattagtgagaataagattgtcattttactagactacatgttccaagatctacataacctgaagtctctagaagtgggggacaatgatttggtttatatatcacacagggcattcagtgggcttcttagcttggagcagctcaccctggagaaatgcaacttaacagcagtaccaacagaagccctctcccacctccgcagcctcatcagcctgcatctgaagcatctcaatatcaacaatatgcctgtgtatgcctttaaaagattgttccacctgaaacacctagagattgactattggcctttactggatatgatgcctgccaatagcctctacggtctcaacctcacatccctttcagtcaccaacaccaatctgtctactgtacccttccttgcctttaaacacctggtatacctgactcaccttaacctctcctacaatcccatcagcactattgaagcaggcatgttctctgacctgatccgccttcaggagcttcatatagtgggggcccagcttcgcaccattgagcctcactccttccaagggctccgcttcctacgcgtgctcaatgtgtctcagaacctgctggaaactttggaagagaatgtcttctcctcccctagggctctggaggtcttgagcattaacaacaaccctctggcctgtgactgccgccttctctggatcttgcagcgacagcccaccctgcagtttggtggccagcaacctatgtgtgctggcccagacaccatccgtgagaggtctttcaaggatttccatagcactgccctttctttttactttacctgcaaaaaacccaaaatccgtgaaaagaagttgcagcatctgctagtagatgaagggcagacagtccagctagaatgcagtgcagatggagacccgcagcctgtgatttcctgggtgacaccccgaaggcgtttcatcaccaccaagtccaatggaagagccaccgtgttgggtgatggcaccttggaaatccgctttgcccaggatcaagacagcgggatgtatgtttgcatcgctagcaatgctgctgggaatgataccttcacagcctccttaactgtgaaaggattcgcttcagatcgttttctttatgcgaacaggacccctatgtacatgaccgactccaatgacaccatttccaatggcaccaatgccaatactttttccctggaccttaaaacaatactggtgtctacagctatgggctgcttcacattcctgggagtggttttattttgttttcttctcctttttgtgtggagccgagggaaaggcaagcacaaaaacagcattgaccttgagtatgtgcccagaaaaaacaatggtgctgttgtggaaggagaggtagctggacccaggaggttcaacatgaaaatgatttgaaggcccacccctcacattactgtctctttgtcaatgtgggtaatcagtaagacagtatggcacagtaaattactagattaagaggcagccatgtgcagctgcccctgtatcaaaagcagggtctatggaagcaggaggacttccaatggagactctccatcgaaaggcaggcaggcaggcatgtgtcagagcccttcacacagtgggatactaagtgtttgcgttgcaaatattggcgttctggggatctcagtaatgaacctgaatatttggctcacactcacggacaattattcagcattttctaccactgcaaaaaac

SEQ ID NO: 2522 - DNA, 1600 bp, Homo sapiens; identical to SEQ ID NO: 121

SEQ ID NO: 2523 - DNA, 1660 bp, Homo sapiens
aaaatgtgcttcttacaggaatataaatagtttctggaaaggacactgacaacttcaaagcaaaatgaagttctttctgttgcttttcaccattgggttctgctgggctcagtattccccaaatacacaacaaggacggacatctattgttcatctgtttgaatggcgatgggttgatattgctcttgaatgtgagcgatatttagctccgaagggatttggaggggttcaggtctctccaccaaatgaaaatgttgcaatttacaaccctttcagaccttggtgggaaagataccaaccagttagctataaattatgcacaagatctggaaatgaagatgaatttagaaacatggtgactagatgtaacaatgttggggttcgtatttatgtggatgctgtaattaatcatatgtgtggtaacgctgtgagtgcaggaacaagcagtacctgtggaagttacttcaaccctggaagtagggactttccagcagtcccatattctggatgggatttcaatgatggtaaatgtaaaactggaagtggagatatcgagaactacaatgatgctactcaggtcagagattgtcgtctgactggtcttcttgatcttgcactggagaaggattacgtgcgttctaagattgccgaatatatgaaccatctcattgacattggtgttgcagggttcagacttgatgcttccaagcacatgtggcctggagacataaaggcaattttggacaaactgcataatctaaacagtaactggttccctgcaggaagtaaacctttcatttaccaggaggtaattgatctgggtggtgagccaattaaaagcagtgactactttggtaatggccgggtgacagaattcaagtatggtgcaaaactcggcacagttattcgcaagtggaatggagagaagatgtcttacttaaagaactggggagaaggttggggtttcgtaccttctgacagagcgcttgtctttgtggataaccatgacaatcaacgaggacatggggctggaggagcctctattcttaccttctgggatgctaggctgtacaaaatggcagttggatttatgcttgctcatccttacggatttacacgagtaatgtcaagctaccgttggccaagacagtttcaaaatggaaacgatgttaatgattgggttgggccaccaaataataatggagtaattaaagaagttactattaatccagacactacttgtggcaatgactgggtctgtgaacatcgatggcgccaaataaggaacatggttattttccgcaatgtagtggatggccagccttttacaaattggtatgataatgggagcaaccaagtggcttttgggagaggaaacagaggattcattgttttcaacaatgatgactggtcattttctttaactttgcaaactggtcttcctgctggcacatactgtgatgtcatttctggagataaaattaatggcaattgcacaggcattaaaatttacgtttctgatgatggcaaagctcatttttctattagtaactctgctgaagatccatttattgcaattcatgctgaatctaaattgtaaaatttaaaattaaatgcatgtcctcaaaacaaaaaaaaaaaaaaaaaaaaaaaaaaaaaa

SEQ ID NO: 2524 - DNA, 3058 bp, Homo sapiens
aaaaatgcataaagagccaagtgcttatattctggccaagttatgaggctctgagaacaagagcttgaggggaagactgttaaccccatccacgccaccagaattagctctttcccttttggtttgcaagcactgcctgtaaagccctcgcatgagaggccagcctgctagggaaatccaggaatctgcaacaaaaacgatgacagtctgaaatactctctggtgccaacctccaaattctcgtctgtcacttcagacccccactagttgacagagcagcagaatttcaactccagtagacttgaatatgcctctgggcaaagaagcagagctaacgaggaaagggatttaaagagtttttcttgggtgtttgtcaaacttttattccctgtctgtgtgcagaggggattcaacttcaatttttctgcagtggctctgggtccagccccttacttaaaggccataagatgttttattgaaagaaactttcaatatcaagtaatccaaccaaccttctaagataagccttttccttcaacacaaagaagtgcattttgccaaatctggaaagcatgaagactgggctttttttcctatgtctcttgggaactgcagctgcaatcccgacaaatgcaagattattatctgatcattccaaaccaactgctgaaacggtagcacctgacaacactgcaatccccagtttaagggctgaagctgaagaaaatgaaaaagaaacagcagtatccacagaagacgattcccaccataaggctgaaaaatcatcagtactaaagtcaaaagaggaaagccatgaacagtcagcagaacagggcaagagttctagccaagagctgggattgaaggatcaagaggacagtgatggtcacttaagtgtgaatttggagtatgcaccaactgaaggtacattggacataaaagaagatatgagtgagcctcaggagaaaaaactctcagagaacactgattttttggctcctggtgttagttccttcacagattctaaccaacaagaaagtatcacaaagagagaggaaaaccaagaacaacctagaaattattcacatcatcagttgaacaggagcagtaaacatagccaaggcctaagggatcaaggaaaccaagagcaggatccaaatatttccaatggagaagaggaagaagaaaaagagccaggtgaagttggtacccacaatgataaccaagaaagaaagacagaattgcccagggagcatgctaacagcaagcaggaggaagacaatacccaatctgatgatattttggaagagtctgatcaaccaactcaagtaagcaagatgcaggaggatgaatttgatcagggtaaccaagaacaagaagataactccaatgcagaaatggaagaggaaaatgcatcgaacgtcaataagcacattcaagaaactgaatggcagagtcaagagggtaaaactggcctagaagctatcagcaaccacaaagagacagaagaaaagactgtttctgaggctctgctcatggaacctactgatgatggtaataccacgcccagaaatcatggagttgatgatgatggcgatgatgatggcgatgatggcggcactgatggccccaggcacagtgcaagtgatgactacttcatcccaagccaggcctttctggaggccgagagagctcaatccattgcctatcacctcaaaattgaggagcaaagagaaaaagtacatgaaaatgaaaatataggtaccactgagcctggagagcaccaagaggccaagaaagcagagaactcatcaaatgaggaggaaacgtcaagtgaaggcaacatgagggtgcatgctgtggattcttgcatgagcttccagtgtaaaagaggccacatctgtaaggcagaccaacagggaaaacctcactgtgtctgccaggatccagtgacttgtcctccaacaaaaccccttgatcaagtttgtggcactgacaatcagacctatgctagttcctgtcatctattcgctactaaatgcagactggaggggaccaaaaaggggcatcaactccagctggattattttggagcctgcaaatctattcctacttgtacggactttgaagtgattcagtttcctctacggatgagagactggctcaagaatatcctcatgcagctttatgaagccaactctgaacacgctggttatctaaatgagaagcagagaaataaagtcaagaaaatttacctggatgaaaagaggcttttggctggggaccatcccattgatcttctcttaagggactttaagaaaaactaccacatgtatgtgtatcctgtgcactggcagtttagtgaacttgaccaacaccctatggatagagtcttgacacattctgaacttgctcctctgcgagcatctctggtgcccatggaacactgcataacccgtttctttgaggagtgtgaccccaacaaggataagcacatcaccctgaaggagtggggccactgctttggaattaaagaagaggacatagatgaaaatctcttgttttgaacgaagattttaaagaactcaactttccagcatcctcctctgttctaaccacttcagaaatatatgcagctgtgatacttgtagatttatatttagcaaaatgttagcatgtatgacaagacaatgagagtaattgcttgacaacaacctatgcaccaggtatttaacattaactttggaaacaaaaatgtacaattaagtaaagtcaacatatgcaaaatactgtacattgtgaacagaagtttaattcatagtaatttcactctctgcattgacttatgagataattaatgattaaactattaatgataaaaataatgcatttgtattgttcataatatcatgtgcacttcaagaaaatggaatgctactcttttgtggtttacgtgtattattttcaatatcttaataccctaataaagagtccataaaaatccaaaaaaaaaaaaaaaaaaaaaaaaaaaaaaaaaaaaaaaaaaaaaaaaaaaaaa

SEQ ID NO: 2525 - DNA, 1398 bp, Homo sapiens
ctggttcctcccctctcaactgctctggttcttataaaaacctcacagccttccactaacatcccgtaggagcctctctccctactgctgctacacaagaccctgagactgacctgcaggacgaaaccatgaagagcctgatccttcttgccatcctggccgccttagcggtagtaactttgtgttatgaatcacatgaaagcatggaatcttatgaacttaatcccttcattaacaggagaaatgcaaataccttcatatcccctcagcagagatggagagctaaagtccaagagaggatccgagaacgctctaagcctgtccacgagctcaatagggaagcctgtgatgactacagactttgcgaacgctacgccatggtttatggatacaatgctgcctataatcgctacttcaggaagcgccgagggaccaaatgagactgagggaagaaaaaaaatctctttttttctggaggctggcacctgattttgtatccccctgtagcagcattactgaaatacataggcttatatacaatgcttctttcctgtatattctcttgtctggctgcacccctttttcccgcccccagattgataagtaatgaaagtgcactgcagtgagggtcaaaggagagtcaacatatgtgattgttccataataaacttctggtgtgatactttcatcttgtaaatctgctttcttttgggaagatattgagatatttaaatcatggcccaccttacccaaaataggagattctgttcatctcatatctagtattaattagaaaaataactacataaaaagaaggaagctaagaaggcactcactcagccataaattctctaaaccctctctaccttggaatccgtgaatggaatctggtatgttttttgcaggattttcctattgtaaattgtggcaaatacagggctcccttcatttgcttttcatctcttatgcatcaaagtcaaaaacatttctgaatcaagataatctagaagagaaaaaaggaggaaaaggaaaagagaaagcagaagggacaaataaaagcaattggcaaaaactgtcaataatagtttatacacttaactatatcaataatcacattatatgtaaatagtctaaacaatccaattattttttacttctacttatgttatatttttacttctacatttgttaaaggttccacgctacatttttactattcttgctttaaataattttaataatttcttttaaagtttagataataagaaaatatcccgggccaggcacagtggccacacctgtaatctcagtagccatgaccataccaatgcactccagcctgtgaaacagagtgagactctgtctctacagaaaaataaaaaagaaaagaaagaaaag

SEQ ID NO: 2526 - DNA, 4678 bp, Homo sapiens
gcacacagagcagcataaagcccagttgctttgggaagtgtttgggaccagatggattgtagggagtagggtacaatacagtctgttctcctccagctccttctttctgcaacatggggaagaacaaactccttcatccaagtctggttcttctcctcttggtcctcctgcccacagacgcctcagtctctggaaaaccgcagtatatggttctggtcccctccctgctccacactgagaccactgagaagggctgtgtccttctgagctacctgaatgagacagtgactgtaagtgcttccttggagtctgtcaggggaaacaggagcctcttcactgacctggaggcggagaatgacgtactccactgtgtcgccttcgctgtcccaaagtcttcatccaatgaggaggtaatgttcctcactgtccaagtgaaaggaccaacccaagaatttaagaagcggaccacagtgatggttaagaacgaggacagtctggtctttgtccagacagacaaatcaatctacaaaccagggcagacagtgaaatttcgtgttgtctccatggatgaaaactttcaccccctgaatgagttgattccactagtatacattcaggatcccaaaggaaatcgcatcgcacaatggcagagtttccagttagagggtggcctcaagcaattttcttttcccctctcatcagagcccttccagggctcctacaaggtggtggtacagaagaaatcaggtggaaggacagagcaccctttcaccgtggaggaatttgttcttcccaagtttgaagtacaagtaacagtgccaaagataatcaccatcttggaagaagagatgaatgtatcagtgtgtggcctatacacatatgggaagcctgtccctggacatgtgactgtgagcatttgcagaaagtatagtgacgcttccgactgccacggtgaagattcacaggctttctgtgagaaattcagtggacagctaaacagccatggctgcttctatcagcaagtaaaaaccaaggtcttccagctgaagaggaaggagtatgaaatgaaacttcacactgaggcccagatccaagaagaaggaacagtggtggaattgactggaaggcagtccagtgaaatcacaagaaccataaccaaactctcatttgtgaaagtggactcacactttcgacagggaattcccttctttgggcaggtgcgcctagtagatgggaaaggcgtccctataccaaataaagtcatattcatcagaggaaatgaagcaaactattactccaatgctaccacggatgagcatggccttgtacagttctctatcaacaccaccaatgttatgggtacctctcttactgttagggtcaattacaaggatcgtagtccctgttacggctaccagtgggtgtcagaagaacacgaagaggcacatcacactgcttatcttgtgttctccccaagcaagagctttgtccaccttgagcccatgtctcatgaactaccctgtggccatactcagacagtccaggcacattatattctgaatggaggcaccctgctggggctgaagaagctctccttctattatctgataatggcaaagggaggcattgtccgaactgggactcatggactgcttgtgaagcaggaagacatgaagggccatttttccatctcaatccctgtgaagtcagacattgctcctgtcgctcggttgctcatctatgctgttttacctaccggggacgtgattggggattctgcaaaatatgatgttgaaaattgtctggccaacaaggtggatttgagcttcagcccatcacaaagtctcccagcctcacacgcccacctgcgagtcacagcggctcctcagtccgtctgcgccctccgtgctgtggaccaaagcgtgctgctcatgaagcctgatgctgagctctcggcgtcctcggtttacaacctgctaccagaaaaggacctcactggcttccctgggcctttgaatgaccaggacgatgaagactgcatcaatcgtcataatgtctatattaatggaatcacatatactccagtatcaagtacaaatgaaaaggatatgtacagcttcctagaggacatgggcttaaaggcattcaccaactcaaagattcgtaaacccaaaatgtgtccacagcttcaacagtatgaaatgcatggacctgaaggtctacgtgtaggtttttatgagtcagatgtaatgggaagaggccatgcacgcctggtgcatgttgaagagcctcacacggagaccgtacgaaagtacttccctgagacatggatctgggatttggtggtggtaaactcagcaggtgtggctgaggtaggagtaacagtccctgacaccatcaccgagtggaaggcaggggccttctgcctgtctgaagatgctggacttggtatctcttccactgcctctctccgagccttccagcccttctttgtggagctcacaatgccttactctgtgattcgtggagaggccttcacactcaaggccacggtcctaaactaccttcccaaatgcatccgggtcagtgtgcagctggaagcctctcccgccttcctagctgtcccagtggagaaggaacaagcgcctcactgcatctgtgcaaacgggcggcaaactgtgtcctgggcagtaaccccaaagtcattaggaaatgtgaatttcactgtgagcgcagaggcactagagtctcaagagctgtgtgggactgaggtgccttcagttcctgaacacggaaggaaagacacagtcatcaagcctctgttggttgaacctgaaggactagagaaggaaacaacattcaactccctactttgtccatcaggtggtgaggtttctgaagaattatccctgaaactgccaccaaatgtggtagaagaatctgcccgagcttctgtctcagttttgggagacatattaggctctgccatgcaaaacacacaaaatcttctccagatgccctatggctgtggagagcagaatatggtcctctttgctcctaacatctatgtactggattatctaaatgaaacacagcagcttactccagagatcaagtccaaggccattggctatctcaacactggttaccagagacagttgaactacaaacactatgatggctcctacagcacctttggggagcgatatggcaggaaccagggcaacacctggctcacagcctttgttctgaagacttttgcccaagctcgagcctacatcttcatcgatgaagcacacattacccaagccctcatatggctctcccagaggcagaaggacaatggctgtttcaggagctctgggtcactgctcaacaatgccataaagggaggagtagaagatgaagtgaccctctccgcctatatcaccatcgcccttctggagattcctctcacagtcactcaccctgttgtccgcaatgccctgttttgcctggagtcagcctggaagacagcacaagaaggggaccatggcagccatgtatataccaaagcactgctggcctatgcttttgccctggcaggtaaccaggacaagaggaaggaagtactcaagtcacttaatgaggaagctgtgaagaaagacaactctgtccattgggagcgccctcagaaacccaaggcaccagtggggcatttttacgaaccccaggctccctctgctgaggtggagatgacatcctatgtgctcctcgcttatctcacggcccagccagccccaacctcggaggacctgacctctgcaaccaacatcgtgaagtggatcacgaagcagcagaatgcccagggcggtttctcctccacccaggacacagtggtggctctccatgctctgtccaaatatggagcagccacatttaccaggactgggaaggctgcacaggtgactatccagtcttcagggacattttccagcaaattccaagtggacaacaacaaccgcctgttactgcagcaggtctcattgccagagctgcctggggaatacagcatgaaagtgacaggagaaggatgtgtctacctccagacatccttgaaatacaatattctcccagaaaaggaagagttcccctttgctttaggagtgcagactctgcctcaaacttgtgatgaacccaaagcccacaccagcttccaaatctccctaagtgtcagttacacagggagccgctctgcctccaacatggcgatcgttgatgtgaagatggtctctggcttcattcccctgaagccaacagtgaaaatgcttgaaagatctaaccatgtgagccggacagaagtcagcagcaaccatgtcttgatttaccttgataaggtgtcaaatcagacactgagcttgttcttcacggttctgcaagatgtcccagtaagagatctgaaaccagccatagtgaaagtctatgattactacgagacggatgagtttgcaattgctgagtacaatgctccttgcagcaaagatcttggaaatgcttgaagaccacaaggctgaaaagtgctttgctggagtcctgttctcagagctccacagaagacacgtgtttttgtatctttaaagacttgatgaataaacactttttctggtcaatgtcaaaaaaaaaaaaaaaaaaaaaaaaa

SEQ ID NO: 2527 - DNA, 2305 bp, Homo sapiens
gaatctacaataagacaaatttcaaatcaagttgctccactatactgcataagcagtttagaatcttaagcagatgcaaaaagaataaagcaaatgggaggaaaaaaaaggccgataaagtttctggctacaatacaagagacatatcattaccatatgatctaatgtgggtgtcagccggattgtgttcattgagggaaaccttattttttaactgtgctatggagtagaagcaggaggttttcaacctagtcacagagcagcacctaccccctcctcctttccacacctgcaaactcttttacttgggctgaatatttagtgtaattacatctcagctttgagggctcctgtggcaaattcccggattaaaaggttccctggttgtgaaaatacatgagataaatcatgaaggccactatcatcctccttctgcttgcacaagtttcctgggctggaccgtttcaacagagaggcttatttgactttatgctagaagatgaggcttctgggataggcccagaagttcctgatgaccgcgacttcgagccctccctaggcccagtgtgccccttccgctgtcaatgccatcttcgagtggtccagtgttctgatttgggtctggacaaagtgccaaaggatcttccccctgacacaactctgctagacctgcaaaacaacaaaataaccgaaatcaaagatggagactttaagaacctgaagaaccttcacgcattgattcttgtcaacaataaaattagcaaagttagtcctggagcatttacacctttggtgaagttggaacgactttatctgtccaagaatcagctgaaggaattgccagaaaaaatgcccaaaactcttcaggagctgcgtgcccatgagaatgagatcaccaaagtgcgaaaagttactttcaatggactgaaccagatgattgtcatagaactgggcaccaatccgctgaagagctcaggaattgaaaatggggctttccagggaatgaagaagctctcctacatccgcattgctgataccaatatcaccagcattcctcaaggtcttcctccttcccttacggaattacatcttgatggcaacaaaatcagcagagttgatgcagctagcctgaaaggactgaataatttggctaagttgggattgagtttcaacagcatctctgctgttgacaatggctctctggccaacacgcctcatctgagggagcttcacttggacaacaacaagcttaccagagtacctggtgggctggcagagcataagtacatccaggttgtctaccttcataacaacaatatctctgtagttggatcaagtgacttctgcccacctggacacaacaccaaaaaggcttcttattcgggtgtgagtcttttcagcaacccggtccagtactgggagatacagccatccaccttcagatgtgtctacgtgcgctctgccattcaactcggaaactataagtaattctcaagaaagccctcatttttataacctggcaaaatcttgttaatgtcattgctaaaaaataaataaaagctagatactggaaacctaactgcaatgtggatgttttacccacatgacttattatgcataaagccaaatttccagtttaagtaattgcctacaataaaaagaaattttgcctgccattttcagaatcatcttttgaagctttctgttgatgttaactgagctactagagatattcttatttcactaaatgtaaaatttggagtaaatatatatgtcaatatttagtaaagcttttcttttttaatttccaggaaaaaataaaaagagtatgagtcttctgtaattcattgagcagttagctcatttgagataaagtcaaatgccaaacactagctctgtattaatccccatcattactggtaaagcctcatttgaatgtgtgaattcaatacaggctatgtaaaatttttactaatgtcattattttgaaaaaataaatttaaaaatacattcaaaattactattgtatacaagcttaattgttaatattccctaaacacaattttatgaagggagaagacattggtttgttgacaataacagtacatcttttcaagttctcagctatttcttctacctctccctatcttacatttgagtatggtaacttatgtcatctatgttgaatgtaagcttataaagcacaaagcatacatttcctgactggtctagagaactgatgtttcaatttacccctctgctaaataaatattaaaactatcatgtgaaaaaaaaaaaaaaaaaa

SEQ ID NO: 2528 - DNA, 5949 bp, Homo sapiens
tggggccgggcgggcggcggcagcggccaggtgcgcagcgagcgctccgagcggcgcgcaccaggcggatgccccagccggggcccagcgaacgccaggtagttccaatttgccagcagaatgagtacagaaagagactcagaaacgacatttgacgaggattctcagcctaatgacgaagtggttccctacagtgatgatgaaacagaagatgaacttgatgaccaggggtctgctgttgaaccagaacaaaaccgagtcaacagggaagcagaggagaaccgggagccattcagaaaagaatgtacatggcaagtcaaagcaaacgatcgcaagtaccacgaacaacctcactttatgaacacaaaattcttgtgtattaaggagagtaaatatgcgaataatgcaattaaaacatacaagtacaacgcatttacctttataccaatgaatctgtttgagcagtttaagagagcagccaatttatatttcctggctcttcttatcttacaggcagttcctcaaatctctaccctggcttggtacaccacactagtgcccctgcttgtggtgctgggcgtcactgcaatcaaagacctggtggacgatgtggctcgccataaaatggataaggaaatcaacaataggacgtgtgaagtcattaaggatggcaggttcaaagttgctaagtggaaagaaattcaagttggagacgtcattcgtctgaaaaaaaatgattttgttccagctgacattctcctgctgtctagctctgagcctaacagcctctgctatgtggaaacagcagaactggatggagaaaccaatttaaaatttaagatgtcacttgaaatcacagaccagtacctccaaagagaagatacattggctacatttgatggttttattgaatgtgaagaacccaataacagactagataagtttacaggaacactattttggagaaacacaagttttcctttggatgctgataaaattttgttacgtggctgtgtaattaggaacaccgatttctgccacggcttagtcatttttgcaggtgctgacactaaaataatgaagaatagtgggaaaaccagatttaaaagaactaaaattgattacttgatgaactacatggtttacacgatctttgttgttcttattctgctttctgctggtcttgccatcggccatgcttattgggaagcacaggtgggcaattcctcttggtacctctatgatggagaagacgatacaccctcctaccgtggattcctcattttctggggctatatcattgttctcaacaccatggtacccatctctctctatgtcagcgtggaagtgattcgtcttggacagagtcacttcatcaactgggacctgcaaatgtactatgctgagaaggacacacccgcaaaagctagaaccaccacactcaatgaacagctcgggcagatccattatatcttctctgataagacggggacactcacacaaaatatcatgacctttaaaaagtgctgtatcaacgggcagatatatggggaccatcgggatgcctctcaacacaaccacaacaaaatagagcaagttgattttagctggaatacatatgctgatgggaagcttgcattttatgaccactatcttattgagcaaatccagtcagggaaagagccagaagtacgacagttcttcttcttgctcgcagtttgccacacagtcatggtggataggactgatggtcagctcaactaccaggcagcctctcccgatgaaggtgccctggtaaacgctgccaggaactttggctttgccttcctcgccaggacccagaacaccatcaccatcagtgaactgggcactgaaaggacttacaatgttcttgccattttggacttcaacagtgaccggaagcgaatgtctatcattgtaagaaccccagaaggcaatatcaagctttactgtaaaggtgctgacactgttatttatgaacggttacatcgaatgaatcctactaagcaagaaacacaggatgccctggatatctttgcaaatgaaactcttagaaccctatgcctttgctacaaggaaattgaagaaaaagaatttacagaatggaataaaaagtttatggctgccagtgtggcctccaccaaccgggacgaagctctggataaagtatatgaggagattgaaaaagacttaattctcctgggagctacagctattgaagacaagctacaggatggagttccagaaaccatttcaaaacttgcaaaagctgacattaagatctgggtgcttactggagacaaaaaggaaactgctgaaaatataggatttgcttgtgaacttctgactgaagacaccaccatctgctatggggaggatattaattctcttcttcatgcaaggatggaaaaccagaggaatagaggtggcgtctacgcaaagtttgcacctcctgtgcaggaatctttttttccacccggtggaaaccgtgccttaatcatcactggttcttggttgaatgaaattcttctcgagaaaaagaccaagagaaataagattctgaagctgaagttcccaagaacagaagaagaaagacggatgcggacccaaagtaaaaggaggctagaagctaagaaagagcagcggcagaaaaactttgtggacctggcctgcgagtgcagcgcagtcatctgctgccgcgtcacccccaagcagaaggccatggtggtggacctggtgaagaggtacaagaaagccatcacgctggccatcggagatggggccaatgacgtgaacatgatcaaaactgcccacattggcgttggaataagtggacaagaaggaatgcaagctgtcatgtcgagtgactattcctttgctcagttccgatatctgcagaggctactgctggtgcatggccgatggtcttacataaggatgtgcaagttcctacgatacttcttttacaaaaactttgcctttactttggttcatttctggtactccttcttcaatggctactctgcgcagactgcatacgaggattggttcatcaccctctacaacgtgctgtacaccagcctgcccgtgctcctcatggggctgctcgaccaggatgtgagtgacaaactgagcctccgattccctgggttatacatagtgggacaaagagacttactattcaactataagagattctttgtaagcttgttgcatggggtcctaacatcgatgatcctcttcttcatacctcttggagcttatctgcaaaccgtagggcaggatggagaggcaccttccgactaccagtcttttgccgtcaccattgcctctgctcttgtaataacagtcaatttccagattggcttggatacttcttattggacttttgtgaatgctttttcaatttttggaagcattgcactttattttggcatcatgtttgactttcatagtgctggaatacatgttctctttccatctgcatttcaatttacaggcacagcttcaaacgctctgagacagccatacatttggttaactatcatcctgactgttgctgtgtgcttactacccgtcgttgccattcgattcctgtcaatgaccatctggccatcagaaagtgataagatccagaagcatcgcaagcggttgaaggcggaggagcagtggcagcgacggcagcaggtgttccgccggggcgtgtcaacgcggcgctcggcctacgccttctcgcaccagcggggctacgcggacctcatctcctccgggcgcagcatccgcaagaagcgctcgccgcttgatgccatcgtggcggatggcaccgcggagtacaggcgcaccggggacagctgatcccttacccccaggctgggatgcggccacaaagcacgtctatttttttatgaaagactctcaggactttgtgtgtgtgtgtgaattgcattcatcacaaagatattgaagacaataaataatctttataacaaactccttgggttggactattaaacaatagcagagccaagaaataggacttttaaaagtcctattattcggccgggcgtggtggctcaggtctgtaatcccagcactttaggaggctgaggaggggagatcacctgaggccaggagttcgagaccagcccagccaacatggtgaaaccctgtctctaccataaattaaaaattagccgggcttggtggtgggcacccgtaatcccacctatttgagaagctgaagcagaagaatcgcttgaacctgggagatggaggttacagtgagccgagattgcgccactgcactccagcctgggtgacagagcaagactctgtcttaagaaaaatttaaaaataggccgggcatggtggctcatgcctgtcatcctagcactttgggaggccaaggcaggtggatcacttgaggtcaggagaccagcccggccaacatggtgaaaccccatctctactaaaaatacaaaaattagctggaaatcgcttgaacctgggaggtggaggttccagtgagccgagatcgtggcactgcactccaacctgagcaacagagtgagacaccagctcaaaaaaaattttttaataataataaaagtcctattattcaactggttatgtacattatggttgaaagggaacgttttaatccagtctcaatccagggcaatagaattacaaagcatgttgtatttcagttcaaatggtattgtattataaaattacagttacattttcctttcggtgatcttcagcataatttcccagaggcccctttttcctccctataggccatcttattaacagattttaaaatttatagtaatgacaaatgacttatcagtgttcatcatctgaaagctaagtggttcgttcaatcactttttcaaagttgatagtagattgcatggtttcatgtttcctcatattggtttattaattctatttaatcaaggaaaataacttcagattccataaagtttcagtttatttttagtttactactaggtgagatagcacattacatacttttactatcaaatattattttagcagcttcccatagtaccaaatgatttgattccctactctcattttttaaagcatataaatatttatgggcttaaaaagggggtttttaaaaactgaggatatcagtaataaattgcagaatattttgcaaagctttcttttggaaagcaaacttttgtgcctgcctatatgcaaagtattttatcagggacttgaacaaagacctcactctttttcacttgtcttatgtcgagagaaaaggttattggcagccacattcctaagactggggaatggtgtgtccttttaaatttgaagataactttaggtaattatggaaactcctcaaagaggagaaagtaatttttttccagacatttttctcattctgtgtctttcacacactagtttccatagttcgagaattctgttttttaccattgggctgtgaatgttcacaatatcagtcctgttgaattcctatgaggtaatcacaatgtgtatatgttcattttctaggtatgataaaagaatgtatggctttttattctgtggaagtaaaatcctgaacgtttacaacttttccttaacttgtaaataaaaaattgtaagttttttctttttttacagaaaacttagcttgtgtaattctgttagtttcagatttctctcctgtttttgcaaattgtgggaaagattgacaatgcaaatgtgtcaaagacatactgttgggtgcaatattaacaattttaaatgcaaatttctttggataaattatttctatattctgtaaatctgagatttaatgtatattttgtttaaaaaaatgatttagtaaaatctttgaaaagtatgatcttctaaagtatttaaaaaaaaaaaaaa

SEQ ID NO: 2529 - DNA, 4973 bp, Homo sapiens
cagctatcaaaaaggccataaggattttgtccccaaatttcacatgagctaccttgcttcaaactactgagatgaagggggcaagattatttgtccttctttctagtttatggagtgggggcattgggcttaacaacagtaagcattcttggactatacctgaggatgggaactctcagaagactatgccttctgcttcagttcctccaaataaaatacaaagtttgcaaatactgccaaccactcgggtcatgtcggcggagatagctacaactccagaggcaagaacttctgaagacagtcttcttaaatcaacactgcctccctcagaaacaagtgcacctgctgagggtgtgagaaatcaaactctcacatccacagagaaagcagaaggagtggtcaagttacagaatcttaccctcccaaccaacgctagcatcaagttcaatcctggagcagaatcagtggtcctttccaattctacactgaaatttcttcagagctttgccagaaagtcaaatgaacaagcaacttctctaaacacagttggaggcactggaggcattggaggcgttggaggcactggaggcgtgggaaatcgagccccacgggaaacatacctcagccggggtgacagcagttccagccaaagaactgactaccaaaaatcaaatttcgaaacaactagaggaaagaattggtgtgcttatgtacataccaggttatctcccacagtgatattggacaaccaggtcacttatgtcccaggtgggaaaggaccttgtggctggaccggtggatcctgtcctcagagatctcagaagatatccaatcctgtctataggatgcaacataaaattgtcacctcattggattggaggtgctgtcctggatacagtgggccgaaatgtcaactaagagcccaggaacagcaaagtttgatacacaccaaccaggctgaaagtcatacagctgttggcagaggagtagctgagcagcagcagcagcaaggctgtggtgacccagaagtgatgcaaaaaatgactgatcaggtgaactaccaggcaatgaaactgactcttctgcagaagaagattgacaatatttctttgactgtgaatgatgtaaggaacacttactcctccctagaaggaaaagtcagcgaagataaaagcagagaatttcaatctcttctaaaaggtctaaaatccaaaagcattaatgtactgataagagacatagtaagagaacaatttaaaatttttcaaaatgacatgcaagagactgtagcacagctcttcaagactgtatcaagtctatcagaggacctcgaaagcaccaggcaaataattcaaaaagttaatgaatctgtggtttcaatagcagcccagcaaaagtttgttttggtgcaagagaatcggcccactttgactgatatagtggaactaaggaatcacattgtgaatgtaaggcaagaaatgactcttacatgtgagaagcctattaaagaactagaagtaaagcagactcatttagaaggtgctctagaacaggaacactcaagaagcattctgtattatgaatccctcaataaaactctttctaaattgaaggaagtacatgagcagcttttatcaactgaacaggtatcagaccagaagaatgctccagctgctgagtcagttagcaataatgtcactgagtacatgtctactttacatgaaaatataaagaagcagagtttgatgatgctgcaaatgtttgaagatttgcacattcaagaaagcaagattaacaatctcaccgtctctttggagatggagaaagagtctctcagaggtgaatgtgaagacatgttatccaaatgcagaaatgattttaaatttcaacttaaggacacagaagagaatttacatgtgttaaatcaaacattggctgaagttctctttccaatggacaataagatggacaaaatgagtgagcaactaaatgatttgacttatgatatggagatccttcaacccttgcttgagcagggagcatcactcagacagacaatgacatatgaacaaccaaaggaagcaatagtgataaggaaaaagatagaaaatctgactagtgctgtcaatagtctaaattttattatcaaagaacttacaaaaagacacaacttacttagaaatgaagtacagggtcgtgatgatgccttagaaagacgtatcaatgaatatgccttagaaatggaagatggcctcaataagacaatgactattataaataatgctattgatttcattcaagataactatgccctaaaagagactttaagtactattaaggataatagtgagatccatcataaatgtacctccgatatggaaactattttgacatttattcctcagttccaccgtctgaatgattctattcagactttggtcaatgacaatcagagatataactttgttttgcaagtcgccaagacccttgcaggtattcccagagatgagaaactaaatcagtccaacttccaaaagatgtatcaaatgttcaatgaaaccacttcccaagtgagaaaataccagcaaaatatgagtcatttggaagaaaaactactcttaactaccaagatttccaaaaattttgagactcggttgcaagacattgagtctaaagttacccagacgctcataccttattatatttcagttaaaaaaggcagtgtagttacaaatgagagagatcaggctcttcaactgcaagtattaaattccagatttaaggcgttggaagcaaaatctatccatctttcaattaacttcttttcgcttaacaaaactctccacgaagttttaacaatgtgtcacaatgcttctacaagtgtgtcagaactgaatgctaccatccctaagtggataaaacattccctgccagatattcaacttcttcagaaaggtctaacagaatttgtggaaccaataattcaaataaaaactcaagctgccctatctaatttaacttgttgtatagatcgatcgttgcctggtagtctggcaaatgttgtcaagtctcagaagcaagtaaaatcattgccaaagaaaattaacgcacttaagaaaccaacggtaaatcttaccacagtcctgataggccggactcaaagaaacacggacaacataatatatcctgaggagtattcaagctgtagtcggcatccgtgccaaaatgggggcacgtgcataaatggaagaactagctttacctgtgcctgcagacatccttttactggtgacaactgcactatcaagcttgtggaagaaaatgctttagctccagatttttccaaaggatcttacagatatgcacccatggtggcattttttgcatctcatacgtatggaatgactatacctggtcctatcctgtttaataacttggatgtcaattatggagcttcatataccccaagaactggaaaatttagaattccgtatcttggagtatatgttttcaagtacaccatcgagtcatttagtgctcatatttctggatttttagtggttgatggaatagacaagcttgcatttgagtctgaaaatattaacagtgaaatacactgtgatagggttttaactggggatgccttattagaattaaattatgggcaggaagtctggttacgacttgcaaaaggaacaattccagccaagtttccccctgttactacatttagtggctatttattatatcgtacataagttagtatgaaaaacagactatcacctttattgagaaacagccagtgttttcatttatctttgcttgcacatctgctctgttttggtttttctacaggaaatgaaaatcaacttgtttttttaatatgagtaaacttgtatgtctattttataaaattatttgaatattgtttaatgtctgaatatgaaagagttcttgatcctaaagaaatttagtggcacagaaaacaaagtgaatttgttagcataattattcctattcttatttcttcattttaagtcattgcaatggaaagtaatattataaaatggtaattacaacatattatcagtcacagttttctttccaattaaacacttaacttttgttattccctgtatataaatatataacacacattttctagattcacaaatttaaataaattactcaaaaaatgaaaattgattttgtaaacttttatttttactctttacgttgagttgatcaattttccatactaagattttcattcagaatcaaaattaagaaagttggactgaaaatatgaaaaatgcttaactattgttctcttcctataattctctaattataacatagtaatttacatgtagttggacatgtacactcaagtctaagaatatatgagtggatcatttaccgccccccgccccacaacatctataaggggcaaaaagtctttttctaataagtattcttctatggtagtacctacagatctgcccttcttcttctaaagggtaagtcataatctgtgtaatactacaatttatgggatgctcactatgccctgtttctcttctaaacaatttacatgtaatgtctcattcctcacaataacccttgtaaagtgggcatgattaccatgatttttatagttgaagaacctaagacacagagaccaaggcccatgagctcatagggctgaggcaggatttggaatcaggccatgtcttctccagagcccacatccatcctttctctatattgcctcccacagatgtgctaaaatttatttaactaatcctttatcctctatttgtgttgtctcccattttttattattacaatattactgtggtgaacatgcttaaaaatacattccttggatatctgacaacgtgtttctgaaaaacagattttcataagtaataataaaaataataataaaaaagttttggtatggtaaaaaa

SEQ ID NO: 2530 - DNA, 2804 bp, Homo sapiens
aaagccagactgattcatagaaactcctttaaaacacggtgaaaagaaaccgcccattacacaccccagtacaccagcagaggaaacttataacctcgggaggcaggtccttcccctcagtgcggtcacatacttccagaagagcggaccagggctgctgccagcacctgccactcagagcgcctctgtcgctgggacccttcagaactctctttgctcacaagttaccaaaaaaaaaagagccaacatgttggtattgctggctggtatctttgtggtccacatcgctactgttattatgctatttgttagcaccattgccaatgtctggttggtttccaatacggtagatgcatcagtaggtctttggaaaaactgtaccaacattagctgcagtgacagcctgtcatatgccagtgaagatgccctcaagacagtgcaggccttcatgattctctctatcatcttctgtgtcattgccctcctggtcttcgtgttccagctcttcaccatggagaagggaaaccggttcttcctctcaggggccaccacactggtgtgctggctgtgcattcttgtgggggtgtccatctacactagtcattatgcgaatcgtgatggaacgcagtatcaccacggctattcctacatcctgggctggatctgcttctgcttcagcttcatcatcggcgttctctatctggtcctgagaaagaaataaggccggacgagttcatggggatctggggggtggggaggaggaagccgttgaatctgggagggaagtggaggttgctgtacaggaaaaaccgagataggggaggggggagggggaagcaaaggggggaggtcaaatcccaaaccattactgaggggattctctactgccaagcccctgccctggggagaaagtagttggctagtactttgatgctcccttgatggggtccagagagcctccctgcagccaccagacttggcctccagctgttcttagtgacacacactgtctggggccccatcagctgccacaacaccagccccacttctgggtcatgcactgaggtccacagacctactgcactgagttaaaatagcggtacaagttctggcaagagcagatactgtctttgtgctgaatacgctaagcctggaagccatcctgcccttctgacccaaagcaaaacatcacattccagtctgaagtgcctactggggggctttggcctgtgagccattgtccctctttggaacagatatttagctctgtggaattcagtgacaaaatgggaggaggaaagagagtttgtaaggtcatgctggtgggttagctaaaccaagaaggagaccttttcacaatggaaaacctgggggatggtcagagcccagtcgagacctcacacacggctgtccctcatggagacctcatgccatggtctttgctaggcctcttgctgaaagccaaggcagctcttctggagtttctctaaagtcactagtgaacaattcggtggtaaaagtaccacacaaactatgggatccaaggggcagtcttgcaacagtgccatgttagggttatgtttttaggattcccctcaatgcagtcagtgtttcttttaagtatacaacaggagagagatggacatggctcattgtagcacaatcctattactcttcctctaacatttttgaggaagttttgtctaattatcaatattgaggatcagggctcctaggctcagtggtagctctggcttagacaccacctggagtgatcacctcttggggaccctgcctatcccacttcacaggtgaggcatggcaattctggaagctgattaaaacacacataaaccaaaaccaaacaacaggcccttgggtgaaaggtgctatataattgtgaagtattaagcctaccgtatttcagccatgataagaacagagtgcctgcattcccaggaaaatacgaaaatcccatgagataaataaaaatataggtgatgggcagatcttttctttaaaataaaaaagcaaaaactcttgtggtacctagtcagatggtagacgagctgtctgctgccgcaggagcacctctatacaggacttagaagtagtatgttattcctggttaagcaggcattgctttgccctggagcagctattttaagccatctcagattctgtctaaaggggttttttgggaagacgttttctttatcgccctgagaagatctaccccagggagaatctgagacatcttgcctacttttctttattagctttctcctcatccatttcttttatacctttcctttttggggagttgttatgccatgatttttggtatttatgtaaaaggattattactaattctatttctctatgtttattctagttaaggaaatgttgagggcaagccaccaaattacctaggctgaggttagagagattggccagcaaaaactgtgggaagatgaactttgtcattatgatttcattatcacatgattatagaaggctgtcttagtgcaaaaaacatacttacatttcagacatatccaaagggaatactcacattttgttaagaagttgaactatgactggagtaaaccatgtattcccttatcttttactttttttctgtgacatttatgtctcatgtaatttgcattactctggtggattgttctagtactgtattgggcttcttcgttaatagattatttcatatactataattgtaaatattttgatacaaatgtttataactctagggatataaaaacagattctgattcccttca

SEQ ID NO: 2531 - DNA, 1017 bp, Homo sapiens; identical to SEQ ID NO: 1674

SEQ ID NO: 2532 - DNA, 7319 bp, Homo sapiens
gggggccactgggaattcagtgaagagggcaccctataccatggcagtgcccggcgacgctgcacgagtcagggacaagcccgtccacagtggggtgagtcaagcccccacggcgggccgggactgccaccatcgtgcggaccccgcatcgccgcgggactcgggctgccgtggctgctggggagacctggtgctgcagccgctccggagctctcggaaactttcctccgcgctgtgcgcgggctccctgtcctttctgctggcgctgctggtgaggctggtccgcggggaggtcggctgtgacctggagcagtgtaaggaggcggcggcggcggaggaggaggaagcagccccgggagcagaagggggcgtcttcccggggcctcggggaggtgctcccgggggcggtgcgcggctcagcccctggctgcagccctcggcgctgctcttcagtctcctgtgtgccttcttctggatgggcttgtacctcctgcgcgccggggtgcgcctgcctctggctgtcgcgctgctggccgcctgctgcgggggggaagcgctcgtccagattgggctgggcgtcggggaggatcacttactctcactccccgccgcgggggtggtgctcagctgcttggccgccgcgacatggctggtgctgaggctgaggctgggcgtcctcatgatcgccttgactagcgcggtcaggaccgtgtccctcatttccttagagaggttcaaggtcgcctggagaccttacctggcgtacctggccggcgtgctggggatcctcttggccaggtacgtggaacaaatcttgccgcagtccgcggaggcggctccaagggagcatttggggtcccagctgattgctgggaccaaggaagatatcccggtgtttaagaggaggaggcggtccagctccgtcgtgtccgccgagatgtccggctgcagcagcaagtcccatcggaggacctccctgccctgtataccgagggaacagctcatggggcattcagaatgggaccacaaacgagggccaagaggatcacagtcttcaggaaccagtattactgtggacatcgccgtcatgggcgaggcccacggcctcattaccgacctcctggcagacccttctcttccaccaaacgtgtgcacatccttgagagccgtgagcaacttgctcagcacacagctcaccttccaggccattcacaagcccagagtgaatcccgtcacttcgctcagtgaaaactatacctgttctgactctgaagagagctctgaaaaagacaagcttgctattccaaagcgcctgagaaggagtttgcctcctggcttgttgagacgagtttcttccacttggaccaccaccacctcggccacaggtctacccaccttggagcctgcaccagtacggagagaccgcagcaccagcatcaaactgcaggaagcaccttcatccagtcctgattcttggaataatccagtgatgatgaccctcaccaaaagcagatcctttacttcatcctatgctatttctgcagctaaccatgtaaaggctaaaaagcaaagtcgaccaggtgccctcgctaaaatttcacctctttcatcgccctgctcctcacctctccaagggactcctgccagcagcctggtcagcaaaatttctgcagtgcagtttccagaatctgctgacacaactgccaaacaaagcctaggttctcacagggccttaacttacactcagagtgccccagacctatcccctcaaatcctgactccacctgttatatgtagcagctgtggcagaccatattcccaagggaatcctgctgatgagcccctggagagaagtggggtagccactcggacaccaagtagaacagatgacactgctcaagttacctctgattatgaaaccaataacaacagtgacagcagtgacattgtacagaatgaagatgaaacagagtgcctgagagagcctctgaggaaagcatcggcttgcagcacctatgctcctgagaccatgatgtttctggacaaaccaattcttgctcccgaacctcttgtcatggataacctggactcaattatggagcagctaaatacttggaattttccaatttttgatttagtggaaaatataggaagaaaatgtggccgtattcttagtcaggtatcttacagactttttgaagacatgggcctctttgaagcttttaaaattccaattagggaatttatgaattattttcatgctttggagattggatatagggatattccttatcataacagaatccatgccactgatgttttacatgctgtttggtatcttactacacagcctattccaggcctctcaactgtgattaatgatcatggttcaaccagtgattcagattctgacagtggatttacacatggacatatgggatatgtattctcaaaaacgtataatgtgacagatgataaatacggatgtctgtctgggaatatccctgccttggagttgatggcgctgtatgtggctgcagccatgcacgattatgatcatccaggaaggactaatgctttcctggttgcaactagtgctcctcaggcggtgctatataacgatcgttcagttttggagaatcatcacgcagctgctgcatggaatcttttcatgtcccggccagagtataacttcttaattaaccttgaccatgtggaatttaagcatttccgtttccttgtcattgaagcaattttggccactgacctgaagaaacactttgacttcgtagccaaatttaatggcaaggtaaatgatgatgttggaatagattggaccaatgaaaatgatcgtctactggtttgtcaaatgtgtataaagttggctgatatcaatggtccagctaaatgtaaagaactccatcttcagtggacagatggtattgtcaatgaattttatgaacagggtgatgaagaggccagccttggattacccataagccccttcatggatcgttctgctcctcagctggccaaccttcaggaatccttcatctctcacattgtggggcctctgtgcaactcctatgattcagcaggactaatgcctggaaaatgggtggaagacagcgatgagtcaggagatactgatgacccagaagaagaggaggaagaagcaccagcaccaaatgaagaggaaacctgtgaaaataatgaatctccaaaaaagaagactttcaaaaggagaaaaatctactgccaaataactcagcacctcttacagaaccacaagatgtggaagaaagtcattgaagaggagcaacggttggcaggcatagaaaatcaatccctggaccagacccctcagtcgcactcttcagaacagatccaggctatcaaggaagaagaagaagagaaagggaaaccaagaggcgaggagataccaacccaaaagccagaccagtgacaatggatagaatgggctgtgtttccaaacagattgacttgtcaaagactctcttcaagccagcacaacatttagacacaacactgtagaaatttgagatgggcaaatggctattgcattttgggattcttcgcattttgtgtgtatatttttacagtgaggtacattgttaaaaactttttgctcaaagaagctttcacattgcaacaccagcttctaaggattttttaaggagggaatatatatgtgtgtgtgtatataagctcccacatagatacatgtaaaacatattcacacccatgcacgcacacacatacacactgaaggccacgattgctggctccacaatttagtaacatttatattaagatatatatatagtggtcactgtgatataataaatcataaaggaaaccaaatcacaaaggagatggtgtggcttagcaaggaaacagtgcaggaaatgtaggttaccaactaagcagcttttgctcttagtactgagggatgaaagttccagagcattatttgaattctgatacatcctgccaacactgtgtgtgtgtgtgtgtgtgtgtgtgtgtgtgtgtgtgtgtgtgaaagagagacagaagggaatggtttgagagggtgcttgtgtgcatgtgtgtgcatatgtaaagagatttttgtggtttaagtaactcagaatagctgtagcaaatgactgaatacatgtgaacaaacagaaggaagttcactctggagtgtctttgggaggcagccattccaaatgccctcctccatttagcttcaataaagggccttttgctgatggagggcactcaagggctgggtgagagggccacgtgtttggtattacattactgctatgcaccacttgaaggagctctatcaccagcctcaaacccgaaagactgaggcattttccagtctacttgcctaatgaatgtataggaactgtctatgagtatggatgtcactcaactaagatcaaatcaccatttaaggggatggcattctttatacctaaacacctaagagctgaagtcaggtcttttaatcaggttagaattctaaatgatgccagagaaggcttgggaaattgtacttcagcgtgatagcctgtgtcttcttaatttgctgcaaaatatgtggtagagaaagaaaaggaaacagaaaaatcactctgggttatatagcaagagatgaaggagaatatttcaacacagggtttttgtgttgacataggaaaagcctgattcttggcaactgttgtagtttgtctttcaggggtgaaggtcccactgacaacccctgttgtggtgttccacacgctgtttgttggggtagcttccatcggcagtctggcccattgtcagtcatgcttcttctggccggggagattatagagagattgtttgaagattgggttattattgaaagtctttttttttgtttgttttgttttggtttgtttgtttatctacacttgtttatgctgtgagccaaacctctatttaaaaagttgatactcactttcaatattttatttcatattattatatatgtcatgatagttatcttgatgtaaatatgaagatttttttgtttctgtagatagtaaactctttttttaaaaaaggaaaagggaaacatttttataaagttatattttaatcaccatttttatacattgtagttctctccaagcccagtaagagaatgatgattcatttgcatggaggtcgatggacaaccaatcatctaccttttctaatttaaatgataatctgatatagttttattgccagttaaatgaggatgctgcaaagcatgttttttcactagtaacttttgctaactgaatgaattctgggtccatatctcccagatgaaaaactgttaaccaataccatattttatagttggtgtccatttctttccaacactgtttgttatgattcttccttgagtacttatatacagacctgctcattatctaaacaatcttaccttctaagtaaaccttgattgtgatttccagtttttattttctctgacgtagtagaaaggaatgtttacattaaaaatacttttgtttctcataaatggatattgtactcccccctttcaaagcattattttacaataattcatggcattttaaaaaataaggcaaagataatacgacaaaaaatatacatggtttcaaggcaaattctccaataagttggaaaatgtaaaaaggatcaagtggatgcagcctctacctaaataattaaaatatatttcagtatatttctgaattaacaccaggtcttcattatttagaacttactaaattgttttcattttcttagttttacctgtgtatctccatgtttgcaaaaattactataagtcaaattttgccagtgaatttaactatttttctttccttgcaattaaggggaaaaaagcatttatcttatcttctcataccccttgcatctaagtacttagcaaagtcaatattttcccattttccaaatgcgtccatctctaacataaatattaattgaacatagagctatgtttggagtgagtggactggcaggacagttggaagtccatcacagtctattgacagtttcatcaaagctgtatagtccaactagtggggcagcttggctactatggtggaagtctcagcaaactgcctggttttgtttgtttgttttgttttaaggtacaggaaataagaggaataatagtggccaaagcaattagaacatcttcattccagaactgtgttcagcaatccaggcagattgatacatttttctttaaaaataaattgctattacagctagacgtcaattgggataaataaagggatgaagatccactaagtttgtgactttcatacacacccagtacatctcaaaggatgctaagggacattttctgccagtagagttctccccctttttggtgacagcaatattattatgttcacatctaactccagagcttacttcctgtggtgccaatgtatttgttgcaatttactacatttttatatgagcctatttataggtgccattaaactcaggtctttcaaatgaaagagtttctagcccacttagggaaaaagataattgtttagaaaaccataaaatcaatggtaggaaaagttggaactggttacctggatgccatggttctctgttaaataaagtaagagaccaggtgtattctgagtgtcatcagtgttattttcagcatgctaataaatgtctttccggttatatatctatctaaattaacctttaaaatattggtttccttgataaaagcaccacttttgcttttgttagctgtaatattttttgtcatttagataagacctggtttggctctcaataaaagatgaagacagtagctctgtacagggatatatctatattagtcttcatctgatgaatgaagaaattttctcatattatgttcaagaaagtatttacttcctaaaaatagaattcccgattctgtctattttggttgaataccagaacaaatctttccgttgcaatcccagtaaaacgaaagaaaaggaatatcttacagactgttcatattagatgtatgtagactgttaatttgcaatttccccatatttcctgcctatcttacccagataactttctttgaaggtaaaagctgtgcaaaaggcatgagactcaggcctactctttgtttaaatgatggaaaaatataaattattttctaagtaataaaagtataaaaattatcattataaataaagtctaaagtttgaaattattaatttaaaaaaaaaaaaaaaaaa

SEQ ID NO: 2533 - DNA, 3057 bp, Homo sapiens
cactttcgagagtgccgtctatttgccacacacttccctgatgaaatgtctggatttggactaaagaaaaaaggaaaggctagcagtcatccaacagaatcatgagacagactttgccttgtatctacttttgggggggccttttgccctttgggatgctgtgtgcatcctccaccaccaagtgcactgttagccatgaagttgctgactgcagccacctgaagttgactcaggtacccgatgatctacccacaaacataacagtgttgaaccttacccataatcaactcagaagattaccagccgccaacttcacaaggtatagccagctaactagcttggatgtaggatttaacaccatctcaaaactggagccagaattgtgccagaaacttcccatgttaaaagttttgaacctccagcacaatgagctatctcaactttctgataaaacctttgccttctgcacgaatttgactgaactccatctcatgtccaactcaatccagaaaattaaaaataatccctttgtcaagcagaagaatttaatcacattagatctgtctcataatggcttgtcatctacaaaattaggaactcaggttcagctggaaaatctccaagagcttctattatcaaacaataaaattcaagcgctaaaaagtgaagaactggatatctttgccaattcatctttaaaaaaattagagttgtcatcgaatcaaattaaagagttttctccagggtgttttcacgcaattggaagattatttggcctctttctgaacaatgtccagctgggtcccagccttacagagaagctatgtttggaattagcaaacacaagcattcggaatctgtctctgagtaacagccagctgtccaccaccagcaatacaactttcttgggactaaagtggacaaatctcactatgctcgatctttcctacaacaacttaaatgtggttggtaacgattcctttgcttggcttccacaactagaatatttcttcctagagtataataatatacagcatttgttttctcactctttgcacgggcttttcaatgtgaggtacctgaatttgaaacggtcttttactaaacaaagtatttcccttgcctcactccccaagattgatgatttttcttttcagtggctaaaatgtttggagcaccttaacatggaagataatgatattccaggcataaaaagcaatatgttcacaggattgataaacctgaaatacttaagtctatccaactcctttacaagtttgcgaactttgacaaatgaaacatttgtatcacttgctcattctcccttacacatactcaacctaaccaagaataaaatctcaaaaatagagagtgatgctttctcttggttgggccacctagaagtacttgacctgggccttaatgaaattgggcaagaactcacaggccaggaatggagaggtctagaaaatattttcgaaatctatctttcctacaacaagtacctgcagctgactaggaactcctttgccttggtcccaagccttcaacgactgatgctccgaagggtggcccttaaaaatgtggatagctctccttcaccattccagcctcttcgtaacttgaccattctggatctaagcaacaacaacatagccaacataaatgatgacatgttggagggtcttgagaaactagaaattctcgatttgcagcataacaacttagcacggctctggaaacacgcaaaccctggtggtcccatttatttcctaaagggtctgtctcacctccacatccttaacttggagtccaacggctttgacgagatcccagttgaggtcttcaaggatttatttgaactaaagatcatcgatttaggattgaataatttaaacacacttccagcatctgtctttaataatcaggtgtctctaaagtcattgaaccttcagaagaatctcataacatccgttgagaagaaggttttcgggccagctttcaggaacctgactgagttagatatgcgctttaatccctttgattgcacgtgtgaaagtattgcctggtttgttaattggattaacgagacccataccaacatccctgagctgtcaagccactacctttgcaacactccacctcactatcatgggttcccagtgagactttttgatacatcatcttgcaaagacagtgccccctttgaactctttttcatgatcaataccagtatcctgttgatttttatctttattgtacttctcatccactttgagggctggaggatatctttttattggaatgtttcagtacatcgagttcttggtttcaaagaaatagacagacagacagaacagtttgaatatgcagcatatataattcatgcctataaagataaggattgggtctgggaacatttctcttcaatggaaaaggaagaccaatctctcaaattttgtctggaagaaagggactttgaggcgggtgtttttgaactagaagcaattgttaacagcatcaaaagaagcagaaaaattatttttgttataacacaccatctattaaaagacccattatgcaaaagattcaaggtacatcatgcagttcaacaagctattgaacaaaatctggattccattatattggttttccttgaggagattccagattataaactgaaccatgcactctgtttgcgaagaggaatgtttaaatctcactgcatcttgaactggccagttcagaaagaacggataggtgcctttcgtcataaattgcaagtagcacttggatccaaaaactctgtacattaaatttatttaaatattcaattagcaaaggagaaactttctcaatttaaaaagttctatggcaaatttaagttttccataaaggtgttataatttgtttattcatatttgtaaatgattatattctatcacaattacatctcttctaggaaaatgtgtctccttatttcaggcctatttttgacaattgacttaattttacccaaaataaaacatataagcacgtaaaaaaaaaaaaaaaaaa

SEQ ID NO: 2534 - DNA, 5160 bp, Homo sapiens
aaaacccggaggagcgggatggcgcgctttgactctggagtgggagtgggagcgagcgcttctgcgactccagttgtgagagccgcaagggcatgggaattgacgccactcaccgacccccagtctcaatctcaacgctgtgaggaaacctcgactttgccaggtccccaagggcagcggggctcggcgagcgaggcacccttctccgtccccatcccaatccaagcgctcctggcactgacgacgccaagagactcgagtgggagttaaagcttccagtgagggcagcaggtgtccaggccgggcctgcgggttcctgttgacgtcttgccctaggcaaaggtcccagttccttctcggagccggctgtcccgcgccactggaaaccgcacctccccgcagcatgggcaccagcctcagcccgaacgacccttggccgctaaacccgctgtccatccagcagaccacgctcctgctactcctgtcggtgctggccactgtgcatgtgggccagcggctgctgaggcaacggaggcggcagctccggtccgcgcccccgggcccgtttgcgtggccactgatcggaaacgcggcggcggtgggccaggcggctcacctctcgttcgctcgcctggcgcggcgctacggcgacgttttccagatccgcctgggcagctgccccatagtggtgctgaatggcgagcgcgccatccaccaggccctggtgcagcagggctcggccttcgccgaccggccggccttcgcctccttccgtgtggtgtccggcggccgcagcatggctttcggccactactcggagcactggaaggtgcagcggcgcgcagcccacagcatgatgcgcaacttcttcacgcgccagccgcgcagccgccaagtcctcgagggccacgtgctgagcgaggcgcgcgagctggtggcgctgctggtgcgcggcagcgcggacggcgccttcctcgacccgaggccgctgaccgtcgtggccgtggccaacgtcatgagtgccgtgtgtttcggctgccgctacagccacgacgaccccgagttccgtgagctgctcagccacaacgaagagttcgggcgcacggtgggcgcgggcagcctggtggacgtgatgccctggctgcagtacttccccaacccggtgcgcaccgttttccgcgaattcgagcagctcaaccgcaacttcagcaacttcatcctggacaagttcttgaggcactgcgaaagccttcggcccggggccgccccccgcgacatgatggacgcctttatcctctctgcggaaaagaaggcggccggggactcgcacggtggtggcgcgcggctggatttggagaacgtaccggccactatcactgacatcttcggcgccagccaggacaccctgtccaccgcgctgcagtggctgctcctcctcttcaccaggtatcctgatgtgcagactcgagtgcaggcagaattggatcaggtcgtggggagggaccgtctgccttgtatgggtgaccagcccaacctgccctatgtcctggccttcctttatgaagccatgcgcttctccagctttgtgcctgtcactattcctcatgccaccactgccaacacctctgtcttgggctaccacattcccaaggacactgtggtttttgtcaaccagtggtctgtgaatcatgacccactgaagtggcctaacccggagaactttgatccagctcgattcttggacaaggatggcctcatcaacaaggacctgaccagcagagtgatgattttttcagtgggcaaaaggcggtgcattggcgaagaactttctaagatgcagctttttctcttcatctccatcctggctcaccagtgcgatttcagggccaacccaaatgagcctgcgaaaatgaatttcagttatggtctaaccattaaacccaagtcatttaaagtcaatgtcactctcagagagtccatggagctccttgatagtgctgtccaaaatttacaagccaaggaaacttgccaataagaagcaagaggcaagctgaaattttagaaatattcacatcttcggagatgaggagtaaaattcagtttttttccagttcctcttttgtgctgcttctcaattagcgtttaaggtgagcataaatcaactgtccatcaggtgaggtgtgctccatacccagcggttcttcatgagtagtgggctatgcaggagcttctgggagatttttttgagtcaaagacttaaagggcccaatgaattattatatacatactgcatcttggttatttctgaaggtagcattctttggagttaaaatgcacatatagacacatacacccaaacacttacaccaaactactgaatgaagcagtattttggtaaccaggccatttttggtgggaatccaagattggtctcccatatgcagaaatagacaaaaagtatattaaacaaagtttcagagtatattgttgaagagacagagacaagtaatttcagtgtaaagtgtgtgattgaaggtgataagggaaaagataaagaccagaaattcccttttcaccttttcaggaaaataacttagactctagtatttatgggtggatttatccttttgccttctggtatacttccttacttttaaggataaatcataaagtcagttgctcaaaaagaaatcaatagttgaattagtgagtatagtggggttccatgagttatcatgaattttaaagtatgcattattaaattgtaaaactccaaggtgatgttgtacctcttttgcttgccaaagtacagaatttgaattatcagcaaagaaaaaaaaaaaagccagccaagctttaaattatgtgaccataatgtactgatttcagtaagtctcataggttaaaaaaaaaagtcaccaaatagtgtgaaatatattacttaactgtccgtaagcagtatattagtattatcttgttcaggaaaaggttgaataatatatgccttgtataatattgaaaattgaaaagtacaactaacgcaaccaagtgtgctaaaaatgagcttgattaaatcaaccacctatttttgacatggaaatgaagcagggtttcttttcttcactcaaattttggcgaatctcaaaattagatcctaagatgtgttcttatttttataacatctttattgaaattctatttataatacagaatcttgttttgaaaataacctaattaatatattaaaattccaaattcatggcatgcttaaattttaactaaattttaaagccattctgattattgagttccagttgaagttagtggaaatctgaacattctcctgtggaaggcagagaaatctaagctgtgtctgcccaatgaataatggaaaatgccatgaattacctggatgttctttttacgaggtgacaagagttggggacagaactcccattacaactgaccaagtttctcttctagatgattttttgaaagttaacattaatgcctgctttttggaaagtcagaatcagaagatagtcttggaagctgtttggaaaagacagtggagatgaggtcagttgtgttttttaagatggcaattactttggtagctgggaaagcataaagctcaaatgaaatgtatgcattcacatttagaaaagtgaattgaagtttcaagttttaaagttcattgcaattaaacttccaaagaaagttctacagtgtcctaagtgctaagtgcttattacattttattaagctttttggaatctttgtaccaaaattttaaaaaagggagtttttgatagttgtgtgtatgtgtgtgtggggtggggggatggtaagagaaaagagagaaacactgaaaagaaggaaagatggttaaacattttcccactcattctgaattaattaatttggagcacaaaattcaaagcatggacatttagaagaaagatgtttggcgtagcagagttaaatctcaaataggctattaaaaaagtctacaacatagcagatctgttttgtggtttggaatattaaaaaacttcatgtaattttattttaaaatttcatagctgtacttcttgaatataaaaaatcatgccagtatttttaaaggcattagagtcaactacacaaagcaggcttgcccagtacatttaaattttttggcacttgccattccaaaatattatgccccaccaaggctgagacagtgaatttgggctgctgtagcctatttttttagattgagaaatgtgtagctgcaaaaataatcatgaaccaatctggatgcctcattatgtcaaccaggtccagatgtgctataatctgtttttacgtatgtaggcccagtcgtcatcagatgcttgcggcaaaaggaaagctgtgtttatatggaagaaagtaaggtgcttggagtttacctggcttatttaatatgcttataacctagttaaagaaaggaaaagaaaacaaaaaacgaatgaaaataactgaatttggaggctggagtaatcagattactgctttaatcagaaaccctcattgtgtttctaccggagagagaatgtatttgctgacaaccattaaagtcagaagttttactccaggttattgcaataaagtataatgtttattaaatgcttcatttgtatgtcaaagctttgactctataagcaaattgcttttttccaaaacaaaaagatgtctcaggtttgttttgtgaattttctaaaagctttcatgtcccagaacttagcctttacctgtgaagtgttactacagccttaatattttcctagtagatctatattagatcaaatagttgcatagcagtatatgttaatttgtgtgtttttagctgtgacacaactgtgtgattaaaaggtatactttagtagacatttataactcaaggataccttcttatttaatcttttcttatttttgtactttatcatgaatgcttttagtgtgtgcataatagctacagtgcatagttgtagacaaagtacattctggggaaacaacatttatatgtagcctttactgtttgatataccaaattaaaaaaaaattgtatctcattacttatactgggacaccattaccaaaataataaaaatcactttcataatcttgaaaaaa

SEQ ID NO: 2535 - DNA, 5603 bp, Homo sapiens
ggagtgggccaggccgccagccccgccagccccgccagccccgccagccccgcgatggcttgggccgcgctcctcggcctcctggccgcactgttgctgctgctgctactgagccgccgccgcacgcggcgacctggtgagcctcccctggacctgggcagcatcccctggttggggtatgccttggactttggaaaagatgctgccagcttcctcacgaggatgaaggagaagcacggtgacatctttactatactggttgggggcaggtatgtcaccgttctcctggacccacactcctacgacgcggtggtgtgggagcctcgcaccaggctcgacttccatgcctatgccatcttcctcatggagaggatttttgatgtgcagcttccacattacagccccagtgatgaaaaggccaggatgaaactgactcttctccacagagagctccaggcactcacagaagccatgtataccaacctccatgcagtgctgttgggcgatgctacagaagcaggcagtggctggcacgagatgggtctcctcgacttctcctacagcttcctgctcagagccggctacctgactctttacggaattgaggcgctgccacgcacccatgaaagccaggcccaggaccgcgtccactcagctgatgtcttccacacctttcgccagctcgaccggctgctccccaaactggcccgtggctccctgtcagtgggggacaaggaccacatgtgcagtgtcaaaagtcgcctgtggaagctgctatccccagccaggctggccaggcgggcccaccggagcaaatggctggagagttacctgctgcacctggaggagatgggtgtgtcagaggagatgcaggcacgggccctggtgctgcagctgtgggccacacaggggaatatgggtcccgctgccttctggctcctgctcttccttctcaagaatcctgaagccctggctgctgtccgcggagagctcgagagtatcctttggcaagcggagcagcctgtctcgcagacgaccactctcccacagaaggttctagacagcacacctgtgcttgatagcgtgctgagtgagagcctcaggcttacagctgcccccttcatcacccgcgaggttgtggtggacctggccatgcccatggcagacgggcgagaattcaacctgcgacgtggtgaccgcctcctcctcttccccttcctgagcccccagagagacccagaaatctacacagacccagaggtatttaaatacaaccgattcctgaaccctgacggatcagagaagaaagacttttacaaggatgggaaacggctgaagaattacaacatgccctggggggcggggcacaatcactgcctggggaggagttatgcggtcaacagcatcaaacaatttgtgttccttgtgctggtgcacttggacttggagctgatcaacgcagatgtggagatccctgagtttgacctcagcaggtacggcttcggtctgatgcagccggaacacgacgtgcccgtccgctaccgcatccgcccatgacacagggagcagatggatccacgtgctcgcctctgcccagcctgccccagcctgccccagcctcccagctttctgtgtgcacagttggcccgggtgcaggtgctagcattaccacttccctgcttttctcccagaaggctgggtccaggggagggaaaagctaagagggtgaacaaagaaaagacattgaaagctctatggattatccactgcaaagttttctttccaaaatcaggctttgtctgctcccaattcacctcgttactctcacctcgtgatatccacaaatgctattcagataaggcagaactaggagtcttcactgctctgcccccaactcccggaggtgtcaccttcctagttcttatgagctagcatggcccgggccttatccagtcaaagcggatgctggccacagaaaggccactcaggatgtcctttgtgtccattgatgtcattcagcagtcagtcccccaataatccttaaactagctaaaaccaaaggagtcccttagaagatctgcttccctggggccccatttgccagattgccccattgctcacactacttgagaaaatgcaggagagcttcccccaaggctgatgcattcccggtgcagaacaggggcaccctccaaacactgggctctgaggagtggagttctctgttctagagtgacaggcaccagatgggatgggctttctcagtgtcagcactcaggtagggagctaaggaagacacagcccagacaagatggctggaaggagccagccaggactccttagactgatcaagccaaaaaagaaggtgccgatttcatgcattctagtgcagaagccccaactgtgatcacgatccagtctgcagacgtgttttgtttggacttcacttaaaaaaatgccttagttgttatcatctttgggagagttcattcaaaatgtccagcttctcttgaaaacttggtatatctggccacactgggctcacattcccaagggtaactcttggccagagctgagtggcagccgcctcccttatgcaggacatgtgctctcggcttcaccagggttctgaccgggtctgcttctgcattcacagcgcctcctggacctgaaggcatctgagtgtgagaccctgttctaactcttagaagtgacattgtaagaggtggtggggaccagctaattggtccaacccagcctgagtgcaccaccctttgaacaaatgtatcagtgatgaaaatttgcctttgccccggcttgcctgtaatcccagcactttgggaggccgaggtgggcggatcacttgaggtcgggagttcaagaccagcctggccaacatggcgaaaccccgtctctactaaacataaaaaaattagtcaggtgtggcggtgcgtgcctgtaatcccagctattcaggaggctgaggcaccagaattgcttgaacccaggaggtggaggttgcagtgaactgagactgcgccacggcactccagcctgggcgacagagcaagactctgtctcaataaataaataattaattaaaataaaaaacagcttaaagagaaaaatggcctgcaaaccttttttatgatgctatttttattaatataaagtcctgtttattgagaccctttaaatgcctgcgagagaccctacagacagtatgtctactcctcacagcatctctatgaagagaaggagggttgtgcccacttcatagatgagaaaactgagaggtgaggtgacttgcctggggccacatagctcataagctgtagaactctgcaggcagatttactgtcccaggagcaaatgctggatgagcaactcctgttctttgggctcaaggggactggtgatgggacaattcttctcgacttcaggagctgacagagccagaggcacctaaacttgggtacatcttgtaagacacataatgaggtccctctagctttagctggagggagataaaagaaccccagacctctgaatgtcccagaggctagtctcttctcagagcagcactggggtttgggggcttccctgggcctcagcctccaggcacccccaggattcccagagagacgctgtgattggcaggaggcaggatatccccagggaaacccatcttcacgcctgggtgacccccactgccgcctccttcttaactctgcaggaaatcagagctggcagcctccagtgggaggacagagccggtttccgtggcaaccctcagctgcctcatcgtggctgggaagggaaggaagcaagccggcagaaatagctatggaaggtcttgcgcaggctgcaaccctggtgtgctgggcgaaaacccttatgactccccccttccaaatcaggctgggttgtcactgagactagattctcacctgccttcaaagaagggccaattccctttaaaggtcgcacctccttggaaccacagtcattagtgaattacactcaaggaaaagatgtgctcccaccaggcagctccagctgttacctgagatactgaagtgcagctcaggagacgattatttaaacctgcccttgttttaatcgttatttttctctttaaaaaaaatagaagctataaagaaaagagggagagatgagtgggttagctacctgctatgcgctagttaggaagttacctggatgccattgtatttcttcatcccttgcttaagaatcaaaattactggacatatgttaggaatactctttctttctttctttctttttaagctcagtggcaagaatgaaatactctttttttttttttttttttgagatggagtctcgctctgctgcccaggctagagtgcagtggcgtgatctcggctcactgcaagctctgcctcccgtgttcacaccattctcctgcctcagcctcctgagtagctgggactacaggcacccgccaccacacccggctaatttttggatttttagtagagatgggatttcaccgtattagccaggatggtcttgatctcctgagctcgtgatctgcccgcctcggcctcccaaagtgctgggattacaggtgtgagccaccgcgcccagccaagaataaaatactcttaagttgatctaatgaagtgtttccttaccattgtgattattgttactattatttgctatattttaatattgttgtttaccaaatattctcctttaaacagactcgctttttaaacttttttttttttttttgagacggagtttcacgcttattgcccaggctggagtgcaatggcacgatctcagctcaccacaacctccacctcctgggtttaagcaatgcttctgcctcagcttcccaagtagctgagattacaggcgcacaccaccacgcccaactgatttttgtatttttagtagagacggggtttccccatgttggtcaggctggtctcgaactcctgacctcgtgatttgcctgcctgggcctcccaaagtgctaggattacaggcatgagccaccatgcccggcctaaactttgtttttaaaatgaactttttttccccccaattgctgccaatagtggataacatgtatcactcactgccaaaaatagaaagtgaccatgaaaaataaattcgctggggaagggggctccatgctggtgtggccaaggctgagagctctctcttctctgttacaaaacgagataagcaagtgttagaattgccttaaggccacactggcatctccctgaccttctccagggacagaagcaggagtaagtttctcatcccatgggcgaccagggccatctcctcccaccagtggcccccactcacagggagctggcaatgccctacctgcctgttctccagatggagaaacaggctctgagatttcacaggtcttgcccaaagtcattgattttgatgattaaaaagaataaacacagtgtttcctgagtagcagtgattgttatgccttgctattttaataaagattctattttcgtataacattgtcaagtggaaacatgctgaaatctattaaaccatctttgtttgtggaa

SEQ ID NO: 2536 - DNA, 3131 bp, Homo sapiens
aatagacaaagcaccgctggtgccctgagcgacagaactctggtagggggctggctgtaaattgacgtggcatggaaattctccgctaagttgtagcagcttgcatgtttctctaagatcaagcccagcctcctggagctgtagcttaatcatgggttcaatgactttacagaaaaatggatagaaaaattcttcaactcctttctttggacccagatggttttttttgggttttttttttttttttggtttttgcttttttttttttttttggttatctatagtttagctgaaaacaaaatcaaagcagttaagtctgtaactttctttttgcagcttaaacaacagaatttgctgctctccctcccctttcctgcaatttaattccttacagattttgccatggggtgcggacttagaaagctagaagaccctgatgatagcagccctggaaaaatattttctaccctgaagagaccgcaagtggaaacaaagacagaatttgcttacgaatatgtattgctggattttactctacaagcttcatcaaacccagaagtcatcaagataaattcaattctggatatagtaacaaaagtggaaaactattatcttaaaggatatattgtcggggctattcatcctgttatacaacctgtggggcagcgaaaacacctacctgcaagttacctatacagagtggtgctattgcgcttgaaattaagcccaaagaattcggcagcacccagtggacaaagacgcccaaggctcgtgattgaggaatgtcccctaacttctgaggcacaaacaaatgacgcagcaaaagaactgatagaaaagattaatgtcgctgctaaaagaggaatgaaatttgttggattcatatcacagcattattctccatctaaattctgcaatggaaccaaccatgatggagatatagaatcgatgctacatgtgagacacggttcagatgaaaactgtagaagttggaatgaagggacgttaagtgggcagtcatctgaaagcggaattgaggaagaacttcatcatgaaagtggacagtatcaaatggaacaaaatggcagccctacttcctctaaatcaagaaagggagaagcctcagataacaaattgtatacagtcttcaatgcttttgatgatgattcaacctcctgggcctatcaggaaggcatcctgtcaatgaaagtaacaagaaaaggatcagtcattagtacacttgatgctgattggctggagttaactaccttttattataaacaaggcttgtctttaattgattcttttgtattctgggaaacatctaaaggggaacatttgcctaaatctttggaaggattttttatctatgaagaagaaggttctggagttccaggttctagtaggaaaggaaatgatgccatcgtagtagaacaatggactgttattgagggatgtgaaatcaaaacagattatggccctctgctgcacactctggctgaattcggatggcttctgacaagcgtgttgcccacacctgtattgagacatgacagtgaagggaatttggctacaaagcagatcgtattccttcagaggccagttatgtggaattcagctgctcaaacaccagataagaaagccagccgccacataaaaggtgaagacaagaataaagccactagtagaagcatcggattagacacaacctcgtcacaacctgcagagagcagacacctgcctgaggagtgccgcctttctccctcccgggaatgctggacaaaggagggaaggctggcacagcacaacagcttctctgggttcagcagcagtgacaacgtcctccgggaattagacgacggacagtttgatcaggaagatggagtgactcaggtcacttgtatgtgagccatgaggtgaagcaaaggaaggccctgtaaataattgttaaaatcattgccaactgaccttattgtattactttctctgcatttatgtaatatttttgaatttttccagacccagcctttcctctaatctatgtaaactttggcacaacctcccagacaaggaagaataaccaacatatttatacatttagaatcatgtttacacttctctcaactaaaacatctggttaaacagatgttccattcggttattacacaataatctatttcagcttctcatgaatgtacaaagtagactttcttacaattcctggtaaggagactgaatatctcaatcagtattttacccaattagagagagttctcaggaagttacagtcttatttaagctgaaaaataacctctctctctctttttttttctctctctctcatacacacacacagctaattagtgcaaataaatatctatttcccaaatataataattaatccacattttgtctttaactatagcatgtatatacaaagcaagcccctatgtgttaaaatattttttgaaaaaaatcttttttatgtatctttgcttttaaagggtcatgtcaccaaccctgtactgattcattgtacataaatgttgttgctcctaaaagcctaaaaatgcagacagcaaagcagcatctcttaaaattcaatatgaaaagaacccataatctcaatacataaataccttagtagagagtaagatttaatttttttttattttaaagtccaaatactatgaagaggaaaaatatcaacttcaatttgaaactgaagtcttttacatctgtctagatttgaattctgcttttattttgacttgttaaatcctgaagaatgttgaaacctagaattttcaatctggcaggagtagaaagatgctcatagcacacgcgatatgtatgataacatattttgtttcatcttgcttttctttccccttctaatagaggtggctttgccttgacccagcctttaacaatctttaaaattctacaaaataaaggattttcatttatctatgaaaggcttactttgaaagatggaacctccaagtgaattacaacttattctatcattgatgaattcagcctattatatatttttattaacattgatgttgacattgtaagatcattttaataataaaacatcatttttaaaaaaaaaaaaaaaaaaa

SEQ ID NO: 2537 - DNA, 5656 bp, Homo sapiens; identical to SEQ ID NO: 1719

SEQ ID NO: 2538 - DNA, 3716 bp, Homo sapiens
attcccatggcccgggctcaggcgtccaacctgctgccgcctgggccccgccgagcggagctagcgccgcgcgcagagcacacgctcgcgctccagctcccctcctgcgcggttcatgactgtgtcccctgaccgcagcctctgcgagcccccgccgcaggaccacggcccgctccccgccgccgcgagggccccgagcgaaggaaggaagggaggcgcgctgtgcgccccgcggagcccgcgaaccccgctcgctgccggctgcccagcctggctggcaccatgctgcccgcgcgctgcgcccgcctgctcacgccccacttgctgctggtgttggtgcagctgtcccctgctcgcggccaccgcaccacaggccccaggtttctaataagtgaccgtgacccacagtgcaacctccactgctccaggactcaacccaaacccatctgtgcctctgatggcaggtcctacgagtccatgtgtgagtaccagcgagccaagtgccgagacccgaccctgggcgtggtgcatcgaggtagatgcaaagatgctggccagagcaagtgtcgcctggagcgggctcaagccctggagcaagccaagaagcctcaggaagctgtgtttgtcccagagtgtggcgaggatggctcctttacccaggtgcagtgccatacttacactgggtactgctggtgtgtcaccccggatgggaagcccatcagtggctcttctgtgcagaataaaactcctgtatgttcaggttcagtcaccgacaagcccttgagccagggtaactcaggaaggaaagatgacgggtctaagccgacacccacgatggagacccagccggtgttcgatggagatgaaatcacagccccaactctatggattaaacacttggtgatcaaggactccaaactgaacaacaccaacataagaaattcagagaaagtctattcgtgtgaccaggagaggcagagtgccctggaagaggcccagcagaatccccgtgagggtattgtcatccctgaatgtgcccctgggggactctataagccagtgcaatgccaccagtccactggctactgctggtgtgtgctggtggacacagggcgcccgctgcctgggacctccacacgctacgtgatgcccagttgtgagagcgacgccagggccaagactacagaggcggatgaccccttcaaggacagggagctaccaggctgtccagaagggaagaaaatggagtttatcaccagcctactggatgctctcaccactgacatggttcaggccattaactcagcagcgcccactggaggtgggaggttctcagagccagaccccagccacaccctggaggagcgggtagtgcactggtatttcagccagctggacagcaatagcagcaacgacattaacaagcgggagatgaagcccttcaagcgctacgtgaagaagaaagccaagcccaagaaatgtgcccggcgtttcaccgactactgtgacctgaacaaagacaaggtcatttcactgcctgagctgaagggctgcctgggtgttagcaaagaagtaggacgcctcgtctaaggagcagaaaacccaagggcaggtggagagtccagggaggcaggatggatcaccagacacctaaccttcagcgttgcccatggccctgccacatcccgtgtaacataagtggtgcccaccatgtttgcacttttaataactcttacttgcgtgttttgtttttggtttcattttaaaacaccaatatctaataccacagtgggaaaaggaaagggaagaaagactttattctctctcttattgtaagtttttggatctgctactgacaacttttagagggttttgggggggtgggggagggtgttgttggggctgagaagaaagagatttatatgctgtatataaatatatatgtaaattgtatagttcttttgtacaggcattggcattgctgtttgtttatttctctccctctgcctgctgtgggtggtgggcactctggacacatagtccagctttctaaaatccaggactctatcctgggcctactaaacttctgtttggagactgacccttgtgtataaagacgggagtcctgcaattgtactgcggactccacgagttcttttctggtgggaggactatattgccccatgccattagttgtcaaaattgataagtcacttggctctcggccttgtccagggaggttgggctaaggagagatggaaactgccctgggagaggaagggagtccagatcccatgaatagcccacacaggtaccggctctcagagggtccgtgcattcctgctctccggacccccaaagggcccagcattggtgggtgcaccagtatcttagtgaccctcggagcaaattatccacaaaggatttgcattacgtcactcgaaacgttttcatccatgcttagcatctactctgtataacgcatgagaggggaggcaaagaagaaaaagacacacagaagggcctttaaaaaagtagatatttaatatctaagcaggggaggggacaggacagaaagcctgcactgaggggtgcggtgccaacagggaaactcttcacctccctgcaaacctaccagtgaggctcccagagacgcagctgtctcagtgccaggggcagattgggtgtgacctctccactcctccatctcctgctgttgtcctagtggctatcacaggcctgggtgggtgggttgggggaggtgtcagtcaccttgttggtaacactaaagttgttttgttggttttttaaaaacccaatactgaggttcttcctgttccctcaagttttcttatgggcttccaggctttaagctaattccagaagtaaaactgatcttgggtttcctattctgcctcccctagaagggcaggggtgataacccagctacagggaaatcccggcccagctttccacaggcatcacaggcatcttccgcggattctagggtgggctgcccagccttctggtctgaggcgcagctccctctgcccaggtgctgtgcctattcaagtggccttcaggcagagcagcaagtggcccttagcgccccttcccataagcagctgtggtggcagtgagggaggttgggtagccctggactggtcccctcctcagatcacccttgcaaatctggcctcatcttgtattccaacccgacatccctaaaagtacctccacccgttccgggtctggaaggcgttggcaccacaagcactgtccctgtgggaggagcacaaccttctcgggacaggatctgatggggtcttgggctaaaggaggtccctgctgtcctggagaaagtcctagaggttatctcaggaatgactggtggccctgccccaacgtggaaaggtgggaaggaagccttctcccattagccccaatgagagaactcaacgtgccggagctgagtgggccttgcacgagacactggccccactttcaggcctggaggaagcatgcacacatggagacggcgcctgcctgtagatgtttggatcttcgagatctccccaggcatcttgtctcccacaggatcgtgtgtgtaggtggtgttgtgtggttttcctttgtgaaggagagagggaaactatttgtagcttgttttataaaaaataaaaaatgggtaaatcttgaaaaaaaaaaaaaaaaaa

SEQ ID NO: 2539 - DNA, 3108 bp, Homo sapiens; identical to SEQ ID NO: 1771

SEQ ID NO: 2540 - DNA, 1721 bp, Homo sapiens
acgaggggaagaaaggagttggggcaaaacaggaggcgtttccctacccgcatacatccccgtccccgagacacccaatccccccacccccagcctgcccgcgcctcccgcccccagctcctcgccctggggacagctggcagccccgcgcggaccagacacaaagccgatcaatcccggaggcgtgggggcggagggacgacccgccggggctttcccgggcgctgctctcctcctgctgccccctcgctaggacccggcggacgcctcgtctggttttcacgccctctagcccctacccccacacccccaaaacagaacagacccccatccctgggctggaggacccgcctcttggcagccagctgagaaggcgccccggggagggggaaactgacatcccatctagagccgtccctcctcttcctcccctcccgactctctgctcctttcccgccccagaagttcaagggcccccggcctcctgcgctcctgccgccgggaccctcgacctcctcagagcagccggctgccgccccgggaagatggcgaggaggagccgccaccgcctcctcctgctgctgctgcgctacctggtggtcgccctgggctatcataaggcctatgggttttctgccccaaaagaccaacaagtagtcacagcagtagagtaccaagaggctattttagcctgcaaaaccccaaagaagactgtttcctccagattagagtggaagaaactgggtcggagtgtctcctttgtctactatcaacagactcttcaaggtgattttaaaaatcgagctgagatgatagatttcaatatccggatcaaaaatgtgacaagaagtgatgcggggaaatatcgttgtgaagttagtgccccatctgagcaaggccaaaacctggaagaggatacagtcactctggaagtattagtggctccagcagttccatcatgtgaagtaccctcttctgctctgagtggaactgtggtagagctacgatgtcaagacaaagaagggaatccagctcctgaatacacatggtttaaggatggcatccgtttgctagaaaatcccagacttggctcccaaagcaccaacagctcatacacaatgaatacaaaaactggaactctgcaatttaatactgtttccaaactggacactggagaatattcctgtgaagcccgcaattctgttggatatcgcaggtgtcctgggaaacgaatgcaagtagatgatctcaacataagtggcatcatagcagccgtagtagttgtggccttagtgatttccgtttgtggccttggtgtatgctatgctcagaggaaaggctacttttcaaaagaaacctccttccagaagagtaattcttcatctaaagccacgacaatgagtgaaaatgatttcaagcacacaaaatcctttataatttaaagactccactttagagatacaccaaagccaccgttgttacacaagttattaaactattataaaactctgctttgtccgacatttgcaaagaggtacacgaggaaatggaattggtatttcattttaattttcatgactactaactcacctgaacttgctattttaaacaaatagttctgtcgacacctaaaatataatctggcttcttgtgtctggactaagttaaaagaattaaaatactttgtaatgtcaaaaaaaaaaaaaaaaaaaaaaaaaaaa

SEQ ID NO: 2541 - DNA, 7650 bp, Homo sapiens; identical to SEQ ID NO: 2265

SEQ ID NO: 2542 - DNA, 1244 bp, Homo sapiens
gcggagctaagatgcggaggagggtgacgcactagctctccagttcgcccgttcctggcctgacccccaccaaggcccataccgcagtaggctcctcgggctgcccctcggttgacaatggtctccaggatggtctctaccatgctatctggcctactgttttggctggcatctggatggactccagcatttgcttacagcccccggacccctgaccgggtctcagaagcagatatccagaggctgcttcatggtgttatggagcaattgggcattgccaggccccgagtggaatatccagctcaccaggccatgaatcttgtgggcccccagagcattgaaggtggagctcatgaaggacttcagcatttgggtccttttggcaacatccccaacatcgtggcagagttgactggagacaacattcctaaggactttagtgaggatcaggggtacccagaccctccaaatccctgtcctgttggaaaaacagcagatgatggatgtctagaaaacacccctgacactgcagagttcagtcgagagttccagttgcaccagcatctctttgatccggaacatgactatccaggcttgggcaagtggaacaagaaactcctttacgagaagatgaagggaggagagagacgaaagcggaggagtgtcaatccatatctacaaggacagagactggataatgttgttgcaaagaagtctgtcccccatttttcagatgaggataaggatccagagtaaagagaagatgctagacgaaaacccacattacctgttaggcctcagcatggcttatgtgcacgtgtaaatggagtccctgtgaatgacagcatgtttcttacatagataattatggatacaaagcagctgtatgtagatagtgtattgtcttcacaccgatgattctgctttttgctaaattagaataagagcttttttgtttcttgggtttttaaaatgtgaatctgcaatgatcataaaaattaaaatgtgaatgtcaacaataaaaagcaagactatgaaaggctcagatttcttgcagtttaaaatggtgtctgaggttgtactattttggccaagtctgtagaaagctgtcatttgattttgattatgtagttcatccagcccttgggcattgttatacaccagtaaagaaggctgtactcaagaggaggagctgacacatttcacttggctgcgtcttaataaacatgaatgcaagcattggc

SEQ ID NO: 2543 - DNA, 1124 bp, Homo sapiens
gccgctgccaccgcaccccgccatggagcggccgtcgctgcgcgccctgctcctcggcgccgctgggctgctgctcctgctcctgcccctctcctcttcctcctcttcggacacctgcggcccctgcgagccggcctcctgcccgcccctgcccccgctgggctgcctgctgggcgagacccgcgacgcgtgcggctgctgccctatgtgcgcccgcggcgagggcgagccgtgcgggggtggcggcgccggcagggggtactgcgcgccgggcatggagtgcgtgaagagccgcaagaggcggaagggtaaagccggggcagcagccggcggtccgggtgtaagcggcgtgtgcgtgtgcaagagccgctacccggtgtgcggcagcgacggcaccacctacccgagcggctgccagctgcgcgccgccagccagagggccgagagccgcggggagaaggccatcacccaggtcagcaagggcacctgcgagcaaggtccttccatagtgacgccccccaaggacatctggaatgtcactggtgcccaggtgtacttgagctgtgaggtcatcggaatcccgacacctgtcctcatctggaacaaggtaaaaaggggtcactatggagttcaaaggacagaactcctgcctggtgaccgggacaacctggccattcagacccggggtggcccagaaaagcatgaagtaactggctgggtgctggtatctcctctaagtaaggaagatgctggagaatatgagtgccatgcatccaattcccaaggacaggcttcagcatcagcaaaaattacagtggttgatgccttacatgaaataccagtgaaaaaaggtgaaggtgccgagctataaacctccagaatattattagtctgcatggttaaaagtagtcatggataactacattacctgttcttgcctaataagtttcttttaatccaatccactaacactttagttatattcactggttttacacagagaaatacaaaataaagatcacacatcaagactatctacaaaaatttattatatatttacagaagaaaagcatgcatatcattaaacaaataaaatactttttatcacaaaaaaaaaaaaaaaa

SEQ ID NO: 2544 - DNA, 7447 bp, Homo sapiens
atgagatcaaatgcgagggagatgcaccgtcaattacaaacacttggacaagtctaactttttttttcttctacaaaaacgctttcaaaagcaaccttagcaacgcccaaataagaagccacctctaagcaaaatagtatatgtataaacggagggcgaatatatacaagtatatatatatgtatattacagacgcacaggtttacacccggtgaactttttctttttctttttcttttttttttaagaaaaactagtgacattgcagagaaggacgcttcctctctatcttttggcgcattagtgaagggggtattctattttgttaaagcgcccaagggggcgcagggaccttggagagaagagtggggaggaaagaggaagggtgggtggggggcagagggcgagtcggcggcggcgagggcaagctctttcttgcggcacgatgccgtctctgctggtgctcactttctccccgtgcgtactactcggctgggcgttgctggccggcggcaccggtggcggtggcgttggcggcggcggcggtggcgcgggcataggcggcggacgccaggagagagaggcgctgccgccacagaagatcgaggtgctggtgttactgccccaggatgactcgtacttgttttcactcacccgggtgcggccggccatcgagtatgctctgcgcagcgtggagggcaacgggactgggaggcggcttctgccgccgggcactcgcttccaggtggcttacgaggattcagactgtgggaaccgtgcgctcttcagcttggtggaccgcgtggcggcggcgcggggcgccaagccagaccttatcctggggccagtgtgcgagtatgcagcagcgccagtggcccggcttgcatcgcactgggacctgcccatgctgtcggctggggcgctggccgctggcttccagcacaaggactctgagtactcgcacctcacgcgcgtggcgcccgcctacgccaagatgggcgagatgatgctcgccctgttccgccaccaccactggagccgcgctgcactggtctacagcgacgacaagctggagcggaactgctacttcaccctcgagggggtccacgaggtcttccaggaggagggtttgcacacgtccatctacagtttcgacgagaccaaagacttggatctggaagacatcgtgcgcaatatccaggccagtgagagagtggtgatcatgtgtgcgagcagtgacaccatccggagcatcatgctggtggcgcacaggcatggcatgaccagtggagactacgccttcttcaacattgagctcttcaacagctcttcctatggagatggctcatggaagagaggagacaaacacgactttgaagctaagcaagcatactcgtccctccagacagtcactctactgaggacagtgaaacctgagtttgagaagttttccatggaggtgaaaagttcagttgagaaacaagggctcaatatggaggattacgttaacatgtttgttgaaggattccacgatgccatcctcctctacgtcttggctctacatgaagtactcagagctggttacagcaaaaaggatggagggaaaattatacagcagacttggaacagaacatttgaaggtatcgccgggcaggtgtccatagatgccaacggagaccgatatggggatttctctgtgattgccatgactgatgtggaggcgggcacccaggaggttattggtgattattttggaaaagaaggtcgttttgaaatgcggccgaatgtcaaatatccttggggccctttaaaactgagaatagatgaaaaccgaattgtagagcatacaaacagctctccctgcaaatcatgtggcctagaagaatcggcagtgacaggaattgtcgtgggggctttactaggagctggcttgctaatggccttctactttttcaggaagaaatacagaataaccattgagaggcgaacccagcaagaagaaagtaaccttggaaaacatcgggaattacgggaagattccatcagatcccatttttcagtagcttaaaggaagccccccactttttttttttctgcctgagattctttaaggagatagacgggttgaaagacatcaatgaaacagaaggggcgttcttgaagaattcataattttaagcagttagtaatttcattttaaaatttctgtagaagctcaggaattatgattaatcaccatctgcctccaggcctttcatctcatgacaaacaaatataataatgatatcgtgtcactctgttaaatgttcatactgtttcaagcccatatgattagatttatgtttttaaaatctgttgtctccatatcttgatggcttttgggagcatttcacacaaggatataaaatgcggttttcttaaatgaaatgttttgtagctagaataaaatcatttttacaagtacagcattcttggaaagaatttaacacccaaaaaggggaaaatgtaatgaaaaatctcaaggttggaaatacagccttactctctctagagctggaggacaggtttgtggttgaggacttctctgtccgatgtctacattcaggttctgacttcatatcttgaaaaaggatttcctccctgtctttttcagtgtctcataaacgctactctggattgttgtaaatattagtgagatgggaggatttacagaagaaaagcaagtcaaaaatatttcctttttgatgtaaaaaaaaaaagccctatttcgcactaacattttattttacaagtattttaatcttatattttggtattagaaaaatttgtctattttttcattttgaagattaaatgttgcttacattttaaaagcatgggtgaagtgtacaacaaaccaataatgataaaaaatacttctctttttctccctgtttccctttttcccttggccacagccaaatgctaattgctgctttaattacagagatgtgtaaatgtattcagattacaaactctacaggaatacatcaacattttaactcttttgcgtttttactgtttaactgttttaaatgcaagttattttagggtgacactccttccagttctggccagatcatgagtttcaagatcaagagtaaaaagttattagaattaaacagttttataaagggaggcagcccttttccctcaagaacaactttgttgagagttactacttgacagcaagcacagaaatgacaaatttaaaacttttacacatggcatttaccaaaattcccagtgattattttgtttaaaagagggaacctaaatatctactctattccctttcagttaactccacagaactttgtaggcatccatgaatacctgtaatagtgggttaggtgtggagataaggaatttggacaaagttgagtaagtttttactgggtatctgctttgcacccagtagtctgcaacatgagtttaaactcaggttactactttcacttatactttatggagaagatagacagtgagggaggaatgggaagctgtcatgagagtgcaccgtcttggaattacataactggggtctttcctcaataacattttgagcatctgaaaaatagtttaaaaaattgtcttaatatctattaaaaggcatgtctagtgaggaaacaggagagtctgagcaatcccttggtggcgatgaaggtggtagttcacacaagtaacagtggaggcaaaggtaagcgcaagctgcctgtcccagatgctggcccatgtgtgagtgcttccctggagaagtccgcttctgttgctcccacctgagtcacagttaacagattatttctgtgtgaggcacatttcccttctgttgtttaagaaatgggagctgggaggcagctgagagggcgtgataaaagaattaagtgtgatcaactgaaacaactatgttgtagttctccatgctggatgcaaaggaaaaagtgtcgaattccaaaaaggatggaagaagaaggcaagaagggcaaactccagaagttctagtgcaggaagagagtttgagaagtaaaatccaggcaagcaaagcgttgtaccacttgggactccccaaagtgaaacagcaaggaaggattgtgtccatcttacttacttgaattggagagcttgtttctctctcatttttatttttcaatgatgttttctttatattttagagatattcattttctcttatcttgtgcttgtaaaaagcatttacatttcaagtctatgtgcttattacaggggaaaaataatctacctggttgcagtctttgagtataaacatttctaacctttttaaaacttctatagcagcccattaacactaacatttttagagcaaatatattctattttaacttcaggtagaggaatagtcctaaacttaatatgatagctctagataagatcttagagataagtgagcatttagtattctaaaagtggcagaacaaatcatgaggtttctggatgctataccaatttaaaatcaattcttatgttaatattgattgcttatttacatgtcagtcatctactttttttctttgaaatctgcatatgggttacaaaaactctgttaggttttgaaaattccattaagttggaaaccttggttaaaaatgtaggtgcctggcccatggttaccctggattcaggtctctcatgattatatttggggatttacgttcctaactgctaagcaacatctttgacaactagtaattcatactctactagtagtcacatgtcatatagtaaaataaatagggctttagttcttaagtaattctataggattttaccctgaaatccagggtgttcagatttcaaaaaggataatttatcagtattttctcatccagtcaaacttcagctgacattgatacaggtcaaaatgcgtagatgctttttggtgttggaaataagtgtctgtcttatggtcatcattgtcttcttagatttttgggtaggggggccaggtagggggagactcagaaataaaagcgttccccagataacttcaatctggaaagaattttttgtatagagtccatctctccctcaagactgaccacaggtttcatgagaaggtccctgaaaacatcacatttctctgaagaaccatcaacttgtcttttcttgaaccacaggaatggttctacagaccctactataattcttcacatttcagaacccatgtttaatggagggaagagagaaatgcatgggaaaagaacacctccttttctcctttctcttaaattcaaagacgtttgctttggaatgccctcacttctccctattcacaggcttctaaaatcattaatttactcaaggcacatgtgccttctttgccccaaatgcatcactttccttttagttatggctgattttgggtgtgtgtgtgtaagacatgcagtcaacaatgagatgaaggccattgcatagatctcatgcagatagtgatggattcagaaagtaggttccagtggcgtcactaccttcttgtaagccagtatacactggctatttgtggaaatctctttgggagatcaaatagagtattatgccactgtgagtgtttataaactggaaggaacaagtacctgtgtttcttgggacacaaagcactcagatcctgagtggatgcagacatgagagtaaatgtcagcccaaattaggcccctcgacctacagacatttcatgggttttatttaatcacaccccatggtttggggctacatgaggaagttggtaatgagctgaatttcttattcagtggaaaaaactgaaactgtctaaaaacacgggatatattttagaggcaattgtggaagcggagagaatgagatgatggtgttcagagggaccagcttctttttcagttgtctttagaactcaagaataatcaataatttagtgccccttcaacagccatactcagcaagaagaatcagaagcttgatcctctaacagaaatagaagagggtagctttgcccattgccactgtctttactgccccttctgcccctccacccacatccacattcagcatcactccaaggatgtgtcagcatcttgcccatgcaggtagaaatttgtgagtaggcctccatacttcctcgggggaagaaagagaaactagtgctggttttaagaatgtagctggcttttcatcagaacccttatgctaacctgaccacacttgctctcggggaagttcaagcctgtgatgtgcataaactccaacaagcctggctttggtgttcagcatgcacattccataaatatctcttgcaggcataccccacagctagactgcaggattaaaataacttccaaaaggtgctggattggagtttgttcaaatttctcattaaccactaatgttaattcataccaaatgcaaagtattctaaaccagctgatgctgtcagtgttcaagttttaagtgacttcaaacacaatggaagtgtttcaatgggagccagatctcatgagtaaaaatccattttataatagctctgtgatatatcagtgggagatgattcataggggagagatttgaacaagcagaattaagtgttagcaaaaatgctgcattgctttgattcatgtttaaagacctaaatttctatgcacaaggaataaagggcctacttaccaagtgtaaatcacaacataggctaccaaaatatttcttatttgctaggagaacaaagctgtcacggtgcatgatagttggacagagatggctaaaaaagaggcaaattcagatttggaaacagggtggcctcttcattatttattgccaagatctgaaaatcttcaacatcttataagacaacaatgaagtagcccctgaacagcatggagttgctgtgagtttgttcgttgcagacctttgtgttgggtcctgggaatctgagctttgttccctgtgcatggtggataattgaaaccaagaggacatgggatagaccttgtgacagaccaattctgtgacccctgtcttctgggtcacattattcattgttgatttaaatacaggactaccaaacagtacaaatctatcatgagtctggtagaaaagtaaaagtaaaagctgcacacgttacatactgtttattgttctaatgtacaactaactatttgcatataatgtgatttaatttattgctgttttgtgtagaaaaggagaactaatgactgtggatataacccatgttttgtataatatattttatttcttgtgcgaactggtcatttaaaatatctacttcatttgatgtttggatataaatgtgtatgtgtccttgtaaatgtttctatcaagcaagaatgccacgtactcagagtataacaatgtgttctcattaaaaaatacatcccacggaaacctc

SEQ ID NO: 2545 - DNA, 836 bp, Homo sapiens
ccagccttcagccggagaaccgtttactcgctgctgtgcccatctatcagcaggctccgggctgaagattgcttctcttctctcctccaaggtctagtgacggagcccgcgcgcggcgccaccatgcggcagaaggcggtatcgcttttcttgtgctacctgctgctcttcacttgcagtggggtggaggcaggtaagaaaaagtgctcggagagctcggacagcggctccgggttctggaaggccctgaccttcatggccgtcggaggaggactcgcagtcgccgggctgcccgcgctgggcttcaccggcgccggcatcgcggccaactcggtggctgcctcgctgatgagctggtctgcgatcctgaatgggggcggcgtgcccgccggggggctagtggccacgctgcagagcctcggggctggtggcagcagcgtcgtcataggtaatattggtgccctgatgggctacgccacccacaagtatctcgatagtgaggaggatgaggagtagccagcagctcccagaacctcttcttccttcttggcctaactcttccagttaggatctagaactttgcctttttttttttttttttttttttgagatgggttctcactatattgtccaggctagagtgcagtggctattcacagatgcgaacatagtacactgcagcctccaactcctagcctcaagtgatcctcctgtctcaacctcccaagtaggattacaagcatgcgccgacgatgcccagaatccagaactttgtctatcactctccccaacaacctagatgtgaaaacagaataaacttcacccagaaaacactt

SEQ ID NO: 2546 - DNA, 1837 bp, Homo sapiens; identical to SEQ ID NO: 806

SEQ ID NO: 2547 - DNA, 933 bp, Homo sapiens; identical to SEQ ID NO: 2271

SEQ ID NO: 2548 - DNA, 1325 bp, Homo sapiens
ggaaaggattttctcagcccccatctccagcactgtgtgttggccgcacccatgagagcctcagcactctgaaggtgcagggggcaaaggccaaaagagctctggcctgaacttgggtggtccctactgtgtgacttggggcatggcctcatctgtgctgaaatgattccacaaagattaaactggctatcatttgttgatttcccccttcttacatttaatccttgcaggagaaagctaagcctcaagatagtttgcttctctttcccccaaggccaaggagaaggtggagtgagggctggggtcgggacaggttgaacgggaaccctgtgctctaacagttagggcccgccgaggaactgaacccaaaggatcacctggtattccctgagagtacagatttctccggcgtggccctcaagggacagacatggctcagcggatgacaacacagctgctgctccttctagtgtgggtggctgtagtaggggaggctcagacaaggattgcatgggccaggactgagcttctcaatgtctgcatgaacgccaagcaccacaaggaaaagccaggccccgaggacaagttgcatgagcagtgtcgaccctggaggaagaatgcctgctgttctaccaacaccagccaggaagcccataaggatgtttcctacctatatagattcaactggaaccactgtggagagatggcacctgcctgcaaacggcatttcatccaggacacctgcctctacgagtgctcccccaacttggggccctggatccagcaggtggatcagagctggcgcaaagagcgggtactgaacgtgcccctgtgcaaagaggactgtgagcaatggtgggaagattgtcgcacctcctacacctgcaagagcaactggcacaagggctggaactggacttcagggtttaacaagtgcgcagtgggagctgcctgccaacctttccatttctacttccccacacccactgttctgtgcaatgaaatctggactcactcctacaaggtcagcaactacagccgagggagtggccgctgcatccagatgtggttcgacccagcccagggcaaccccaatgaggaggtggcgaggttctatgctgcagccatgagtggggctgggccctgggcagcctggcctttcctgcttagcctggccctaatgctgctgtggctgctcagctgacctccttttaccttctgatacctgaaaatccctgccctgttcagccccacagctcccaactatttggttcctgctccatggtcgggcctctgacagccactttgaataaaccagacaccgc

SEQ ID NO: 2549 - DNA, 2597 bp, Homo sapiens
gaatgtctgcacagccgctttccacacagacatcataacaaaaaatttccaccaaaccccctccccccgcttctggccacagcacttaaacacatctctgccaaacccataaaataacaaaaccaacccgcagtggccgaccggagatagctaagatgccgcgcaggagtttccacctggatgtttgaggttgtgtagatgtggccggcacccttgagagtggagctagggggtgcagactgagcagtgaacagaaggagccttggacagggctgggccagcctcccgagttccaggagcgaattgcaaacccaccgggaaaatgagcgaagagacggtccccgaggctgcctcgccgccgcccccgcaggggcagccttactttgaccgcttctcagaggacgaccccgagtacatgcgccttcgcaaccgggcggcggacctgcggcaggacttcaacctgatggagcagaagaagcgcgtcaccatgatcctgcagagtccctctttcagggaggagctggaaggcctcatccaggagcagatgaagaaggggaacaactcctccaacatctgggccctgcgacagatcgcggacttcatggccagcacctcccacgcagtcttcccgacatcttccatgaatgtctccatgatgacgcctatcaatgacctccacacagctgactccctgaacctggccaaaggggagcggctcatgcggtgcaagatcagcagtgtctaccgactcctggacctctatggctgggcccagctgagtgacacctatgtcacgttgagagtcagcaaggagcaggaccacttcctgatcagccctaagggagtttcttgcagtgaagtcacagcgtccagcctgatcaaggtgaacattctgggagaggtggtggagaagggcagcagctgcttcccagtggacaccacaggcttctgtctgcactcggccatctatgcagcgaggcccgacgtgcgctgcatcatccacctgcacacaccggccacagcagcggtgtcggccatgaagtggggcctcctgcctgtctcccacaatgccctgctggtgggggacatggcctattatgacttcaatggggaaatggagcaggaagccgatcggatcaacctgcagaagtgccttggacccacctgcaagatcctggtgctaagaaaccatggagtggttgctctgggtgacacggtagaggaggcattttacaagatcttccacctgcaggctgcatgtgagatacaggtgtcggctctgtccagtgccgggggagtggagaacctcatcctcctggagcaggagaagcaccggccccatgaggtgggctccgtgcagtgggccgggagcacctttgggcctatgcagaagagtcggctgggggagcatgagtttgaggccctcatgaggatgctggacaacctgggctacagaacaggttacacgtatcgccacccctttgttcaagagaaaaccaaacacaaaagtgaggtggagattccagccacggtcacagccttcgtgtttgaggaggacggtgccccggtgcccgccctgcgacagcatgcccagaagcagcagaaggagaagacccgctggctcaatacgcccaacacctacctgcgggtcaatgtggccgatgaggtccagaggagcatgggcagcccccgacccaagaccacgtggatgaaggctgacgaggtggagaaatccagcagtggcatgccgattcgcatcgaaaacccaaaccaatttgtgcctctctatactgacccccaggaagtactggagatgaggaacaagattcgagaacaaaaccgacaagatgtgaagtcagcggggcctcagtcccagctcctggcgagcgtcattgccgagaagagccgaagcccgtctacagagagccagctgatgtccaagggagacgaggataccaaagacgattcagaggagacggtgcccaaccccttcagccaactcactgaccaggagttggaggagtacaagaaagaggtggagaggaagaaactagaacttgatggagagaaagaaactgccccagaagagcctggctcacctgcaaagtctgcacctgcttctccagtgcagagcccagcgaaggaggcagagacaaagagccctttagtctctccttccaagtctttagaggaaggtactaagaagacagaaacaagcaaagccgccaccacagagcccgaaacaacccagccggaaggggtggtggtcaacgggagggaggaggagcagacggcagaggaaatcctcagcaaaggcctgagccagatgaccaccagtgctgacacggatgttgatacctctaaggacaaaaccgagtcggtcaccagcggccccatgtccccagagggctcaccttccaagtctccctcaaagaagaaaaagaaattccgaaccccctccttcctgaaaaagagcaaaaagaaggagaaagtggagtcctgattcatgacacccttgggctccctcctgcctcctctctctcctccccttcccttctcccatctctgtccctgcaagcacagggctaaggagggat

SEQ ID NO: 2550 - DNA, 2156 bp, Homo sapiens
gccggagccgactcggagcgcgcggcgcggccgggaggagccgagcgcgccgggcgcggcgtgggggcgccggctgccccgcgcgcccagggagcggcaggaatgtgacaatcgcgcgcccgcaccgtagcactcctcgctcggctcctagggctctcgccctctgagctgagccgggttccgcccgggctgggatcccatcaccctccacggccgtccgtccaggtagacgcaccctctgaagatggtgactccctcctgagaagctggaccccttggtaaaagacaaggccttctccaagaagaatatgaaagtgttactcagacttatttgtttcatagctctactgatttcttctctggaggctgataaatgcaaggaacgtgaagaaaaaataattttagtgtcatctgcaaatgaaattgatgttcgtccctgtcctcttaacccaaatgaacacaaaggcactataacttggtataaagatgacagcaagacacctgtatctacagaacaagcctccaggattcatcaacacaaagagaaactttggtttgttcctgctaaggtggaggattcaggacattactattgcgtggtaagaaattcatcttactgcctcagaattaaaataagtgcaaaatttgtggagaatgagcctaacttatgttataatgcacaagccatatttaagcagaaactacccgttgcaggagacggaggacttgtgtgcccttatatggagttttttaaaaatgaaaataatgagttacctaaattacagtggtataaggattgcaaacctctacttcttgacaatatacactttagtggagtcaaagataggctcatcgtgatgaatgtggctgaaaagcatagagggaactatacttgtcatgcatcctacacatacttgggcaagcaatatcctattacccgggtaatagaatttattactctagaggaaaacaaacccacaaggcctgtgattgtgagcccagctaatgagacaatggaagtagacttgggatcccagatacaattgatctgtaatgtcaccggccagttgagtgacattgcttactggaagtggaatgggtcagtaattgatgaagatgacccagtgctaggggaagactattacagtgtggaaaatcctgcaaacaaaagaaggagtaccctcatcacagtgcttaatatatcggaaattgaaagtagattttataaacatccatttacctgttttgccaagaatacacatggtatagatgcagcatatatccagttaatatatccagtcactaatttccagaagcacatgattggtatatgtgtcacgttgacagtcataattgtgtgttctgttttcatctataaaatcttcaagattgacattgtgctttggtacagggattcctgctatgattttctcccaataaaagcttcagatggaaagacctatgacgcatatatactgtatccaaagactgttggggaagggtctacctctgactgtgatatttttgtgtttaaagtcttgcctgaggtcttggaaaaacagtgtggatataagctgttcatttatggaagggatgactacgttggggaagacattgttgaggtcattaatgaaaacgtaaagaaaagcagaagactgattatcattttagtcagagaaacatcaggcttcagctggctgggtggttcatctgaagagcaaatagccatgtataatgctcttgttcaggatggaattaaagttgtcctgcttgagctggagaaaatccaagactatgagaaaatgccagaatcgattaaattcattaagcagaaacatggggctatccgctggtcaggggactttacacagggaccacagtctgcaaagacaaggttctggaagaatgtcaggtaccacatgccagtccagcgacggtcaccttcatctaaacaccagttactgtcaccagccactaaggagaaactgcaaagagaggctcacgtgcctctcgggtagcatggagaagttgccaagagttctttaggtgcctcctgtcttatggcgttgcaggccaggttatgcctcatgctgacttgcagagttcatggaatgtaactatatcatcctttatccctgaggtcaccaggaatcagg

SEQ ID NO: 2551 - DNA, 3591 bp, Homo sapiens
agatcttggaacgagacgacctgctctctctcccagaacgtgtctctgctgcaaggcaccgggccctttcgctctgcagaactgcacttgcaagaccattatcaactcctaatcccagctcagaaagggagcctctgcgactcattcatcgccctccaggactgactgcattgcacagatgatggatatttacgtatgtttgaaacgaccatcctggatggtggacaataaaagaatgaggactgcttcaaatttccagtggctgttatcaacatttattcttctatatctaatgaatcaagtaaatagccagaaaaagggggctcctcatgatttgaagtgtgtaactaacaatttgcaagtgtggaactgttcttggaaagcaccctctggaacaggccgtggtactgattatgaagtttgcattgaaaacaggtcccgttcttgttatcagttggagaaaaccagtattaaaattccagctctttcacatggtgattatgaaataacaataaattctctacatgattttggaagttctacaagtaaattcacactaaatgaacaaaacgtttccttaattccagatactccagagatcttgaatttgtctgctgatttctcaacctctacattatacctaaagtggaacgacaggggttcagtttttccacaccgctcaaatgttatctgggaaattaaagttctacgtaaagagagtatggagctcgtaaaattagtgacccacaacacaactctgaatggcaaagatacacttcatcactggagttgggcctcagatatgcccttggaatgtgccattcattttgtggaaattagatgctacattgacaatcttcatttttctggtctcgaagagtggagtgactggagccctgtgaagaacatttcttggatacctgattctcagactaaggtttttcctcaagataaagtgatacttgtaggctcagacataacattttgttgtgtgagtcaagaaaaagtgttatcagcactgattggccatacaaactgccccttgatccatcttgatggggaaaatgttgcaatcaagattcgtaatatttctgtttctgcaagtagtggaacaaatgtagtttttacaaccgaagataacatatttggaaccgttatttttgctggatatccaccagatactcctcaacaactgaattgtgagacacatgatttaaaagaaattatatgtagttggaatccaggaagggtgacagcgttggtgggcccacgtgctacaagctacactttagttgaaagtttttcaggaaaatatgttagacttaaaagagctgaagcacctacaaacgaaagctatcaattattatttcaaatgcttccaaatcaagaaatatataattttactttgaatgctcacaatccgctgggtcgatcacaatcaacaattttagttaatataactgaaaaagtttatccccatactcctacttcattcaaagtgaaggatattaattcaacagctgttaaactttcttggcatttaccaggcaactttgcaaagattaattttttatgtgaaattgaaattaagaaatctaattcagtacaagagcagcggaatgtcacaatcaaaggagtagaaaattcaagttatcttgttgctctggacaagttaaatccatacactctatatacttttcggattcgttgttctactgaaactttctggaaatggagcaaatggagcaataaaaaacaacatttaacaacagaagccagtccttcaaaggggcctgatacttggagagagtggagttctgatggaaaaaatttaataatctattggaagcctttacccattaatgaagctaatggaaaaatactttcctacaatgtatcgtgttcatcagatgaggaaacacagtccctttctgaaatccctgatcctcagcacaaagcagagatacgacttgataagaatgactacatcatcagcgtagtggctaaaaattctgtgggctcatcaccaccttccaaaatagcgagtatggaaattccaaatgatgatctcaaaatagaacaagttgttgggatgggaaaggggattctcctcacctggcattacgaccccaacatgacttgcgactacgtcattaagtggtgtaactcgtctcggtcggaaccatgccttatggactggagaaaagttccctcaaacagcactgaaactgtaatagaatctgatgagtttcgaccaggtataagatataattttttcctgtatggatgcagaaatcaaggatatcaattattacgctccatgattggatatatagaagaattggctcccattgttgcaccaaattttactgttgaggatacttctgcagattcgatattagtaaaatgggaagacattcctgtggaagaacttagaggctttttaagaggatatttgttttactttggaaaaggagaaagagacacatctaagatgagggttttagaatcaggtcgttctgacataaaagttaagaatattactgacatatcccagaagacactgagaattgctgatcttcaaggtaaaacaagttaccacctggtcttgcgagcctatacagatggtggagtgggcccggagaagagtatgtatgtggtgacaaaggaaaattctgtgggattaattattgccattctcatcccagtggcagtggctgtcattgttggagtggtgacaagtatcctttgctatcggaaacgagaatggattaaagaaaccttctaccctgatattccaaatccagaaaactgtaaagcattacagtttcaaaagagtgtctgtgagggaagcagtgctcttaaaacattggaaatgaatccttgtaccccaaataatgttgaggttctggaaactcgatcagcatttcctaaaatagaagatacagaaataatttccccagtagctgagcgtcctgaagatcgctctgatgcagagcctgaaaaccatgtggttgtgtcctattgtccacccatcattgaggaagaaataccaaacccagccgcagatgaagctggagggactgcacaggttatttacattgatgttcagtcgatgtatcagcctcaagcaaaaccagaagaagaacaagaaaatgaccctgtaggaggggcaggctataagccacagatgcacctccccattaattctactgtggaagatatagctgcagaagaggacttagataaaactgcgggttacagacctcaggccaatgtaaatacatggaatttagtgtctccagactctcctagatccatagacagcaacagtgagattgtctcatttggaagtccatgctccattaattcccgacaatttttgattcctcctaaagatgaagactctcctaaatctaatggaggagggtggtcctttacaaacttttttcagaacaaaccaaacgattaacagtgtcaccgtgtcacttcagtcagccatctcaataagctcttactgctagtgttgctacatcagcactgggcattcttggagggatcctgtgaagtattgttaggaggtgaacttca

SEQ ID NO: 2552 - DNA, 540 bp, Homo sapiens
atccctgactcggggtcgcctttggagcagagaggaggcaatggccaccatggagaacaaggtgatctgcgccctggtcctggtgtccatgctggccctcggcaccctggccgaggcccagacagagacgtgtacagtggccccccgtgaaagacagaattgtggttttcctggtgtcacgccctcccagtgtgcaaataagggctgctgtttcgacgacaccgttcgtggggtcccctggtgcttctatcctaataccatcgacgtccctccagaagaggagtgtgaattttagacacttctgcagggatctgcctgcatcctgacggggtgccgtccccagcacggtgattagtcccagagctcggctgccacctccaccggacacctcagacacgcttctgcagctgtgcctcggctcacaacacagattgactgctctgactttgactactcaaaattggcctaaaaattaaaagagatcgatattaaaaaaaaaaaaaaaaaaaaaaaaaaaaaaaaaaaaaaaaaaaaaaaaaa

SEQ ID NO: 2553 - DNA, 1594 bp, Homo sapiens; identical to SEQ ID NO: 111

SEQ ID NO: 2554 - DNA, 121 bp, Homo sapiens; identical to SEQ ID NO: 1521
  misc_feature (1)..(2): n is a, c, g, or t

SEQ ID NO: 2555 - DNA, 945 bp, Homo sapiens
ctgggtgtacagcgtcctcgaaaccacgagcaagtgagcagatcctccgaggcaccagggactccagcccatgccatggcggattctgagcgcctctcggctcctggctgctgggccgcctgcaccaacttctcgcgcactcgaaagggaatcctcctgtttgctgagattatattatgcctggtgatcctgatctgcttcagtgcctccacaccaggctactcctccctgtcggtgattgagatgatccttgctgctattttctttgttgtctacatgtgtgacctgcacaccaagataccattcatcaactggccctggagtgatttcttccgaaccctcatagcggcaatcctctacctgatcacctccattgttgtccttgttgagagaggaaaccactccaaaatcgtcgcaggggtactgggcctaatcgctacgtgcctctttggctatgacgcctatgtcaccttccccgttcggcagccaagacatacagcagcccccactgaccccgcagatggcccggtgtaggcgaacttccctcatttctctctgcaatctgcaaataactcctccattgaaataactcctccccaccccaacaacaacattcccagcagaccaactcccaccccctctttgaggtaaaagtgcctttattgggagacttttgtcttccagcctgccaatcaaccctcctgggtgtggccaccatatgtgtgtgcctaggtcctccttctgcacgatccaataggagacaccagttctgactgaaccatgcccccacctaagtcacaaaatgagggaagtggggagttagatttcagagtccaggccctaggttgggacccactccaaataatctcctcggtgtgggtggtggttctatagagggataaatgaataataaacattgttaaaatataaaaaaaaaaaaaaaaa

SEQ ID NO: 2556 - DNA, 1329 bp, Homo sapiens
gcagcccagccaagcactgtacaggaatcctgtgaagcagctccagctatgtgtgaagaagaggacagcactgccttggtgtgtgacaatggctctgggctctgtaaggccggctttgctggggacgatgctcccagggctgttttcccatccattgtgggacgtcccagacatcagggggtgatggtgggaatgggacaaaaagacagctacgtgggtgacgaagcacagagcaaaagaggaatcctgaccctgaagtacccgatagaacatggcatcatcaccaactgggacgacatggaaaagatctggcaccactctttctacaatgagcttcgtgttgcccctgaagagcatcccaccctgctcacggaggcacccctgaaccccaaggccaaccgggagaaaatgactcaaattatgtttgagactttcaatgtcccagccatgtatgtggctatccaggcggtgctgtctctctatgcctctggacgcacaactggcatcgtgctggactctggagatggtgtcacccacaatgtccccatctatgagggctatgccttgccccatgccatcatgcgtctggatctggctggccgagatctcactgactacctcatgaagatcctgactgagcgtggctattccttcgttactactgctgagcgtgagattgtccgggacatcaaggagaaactgtgttatgtagctctggactttgaaaatgagatggccactgccgcatggtcatcctcccttgagaagagttacgagttgcctgatgggcaagtgatcaccatcggaaatgaacgtttccgctgcccagagaccctgttccagccatccttcatcgggatggagtctgctggcatccatgaaaccacctacaacagcatcatgaagtgtgatattgacatcaggaaggacctctatgctaacaatgtcctatcagggggcaccactatgtaccctggcattgccgaccgaatgcagaaggagatcacggccctagcacccagcaccatgaagatcaagatcattgcccctccggagcgcaaatactctgtctggatcggtggctccatcctggcctctctgtccaccttccagcagatgtggatcagcaaacaggaatacgatgaagccgggccttccattgtccaccgcaaatgcttctaaaacactttcctgctcctctctgtctcatgcacacaactgtgaatgtcctgtggaattatgccttcagttcttttccaaatcattcctagccaaagctctgactcgttacctatgtgttttttaataaatctgaaataggctactggt

SEQ ID NO: 2557 - DNA, 2487 bp, Homo sapiens
catactccatacctgggatttccgcctcgccgctctccgactgcttccagacatgcaggggccctgggtgctgctcctgctgggcctgaggctacagctctccctgggcatcatcccagttgaggaggagaacccggacttctggaaccgccaggcagccgaggccctgggtgccgccaagaagctgcagcctgcacagacagccgccaagaacctcatcatcttcctgggtgacgggatgggggtgtctacggtgacagctgccaggatcctaaaagggcagaagaaggacaaactggggcctgagaccttcctggccatggaccgcttcccgtacgtggctctgtccaagacatacagtgtagacaagcatgtgccagacagtggagccacagccacggcctacctgtgcggggtcaagggcaacttccagaccattggcttgagtgcagccgcccgctttaaccagtgcaacacgacacgcggcaacgaggtcatctccgtgatgaatcgggccaagaaagcaggaaagtcagtgggagtggtaaccaccacacgggtgcagcatgcctcgccagccggcacctacgcccacacggtgaaccgcaactggtactcggatgccgacgtgcctgcctcggcccgccaggaggggtgccaggacatcgccacgcagctcatctccaacatggacattgatgtgatcctaggtggaggccgaaagtacatgtttcccatggggaccccagaccctgagtacccagatgactacagccaaggtgggaccaggctggacgggaagaatctggtgcaggaatggctggcgaagcaccagggtgcccggtacgtgtggaaccgcactgagctcctgcaggcttccctggacccgtctgtgacccatctcatgggtctctttgagcctggagacatgaaatacgagatccaccgagactccacactggacccctccctgatggagatgacagaggctgccctgctcctgctgagcaggaacccccgcggcttcttcctcttcgtggagggtggtcgcatcgaccatggtcatcatgaaagcagggcttaccgggcactgactgagacgatcatgttcgacgacgccattgagagggcgggccagctcaccagcgaggaggacacgctgagcctcgtcactgccgaccactcccacctcttctccttcggaggctaccccctgcgagggagctccatcttcgggctggcccctggcaaggcccgggacaggaaggcctacacggtcctcctatacggaaacggtccaggctatgtgctcaaggacggcgcccggccggatgttacggagagcgagagcgggagccccgagtatcggcagcagtcagcagtgcccctggacggagagacccacgcaggcgaggacgtggcggtgttcgcgcgcggcccgcaggcgcacctggttcacggcgtgcaggagcagaccttcatagcgcacgtcatggccttcgccgcctgcctggagccctacaccgcctgcgacctggcgccccgcgccggcaccaccgacgccgcgcacccggggccgtccgtggtccccgcgttgcttcctctgctggcagggaccttgctgctgctggggacggccactgctccctgagtgtcccgtccctgggggctcctgcttccccatcccggagttcccctgctccccacctccagtcgtcctgccggacctccacctggagctgtcacccccggagtcgccacacagacgttcctgccatggaaccttccctcccggtgcaccctggggaccgagcccttgacaccacgcctttgctttatcttgctcttaaattttggccccaactccagggactggggatttgtgcctggcagctgcctgcatttcaggaaaagaggaggctcagaccatccagcccccgcccatatcctgaggtggatcaggcaggctctctccccggggacatgaggcacccatacctaggaccccctgcgccttttttagcttcagtcatggcagcacctgagggacacaaggacttgggtgcatcaggacgccttggagaagcgtggcttcctgccaccctgcaacccaccctcccagccaaggaggctgctgtggtggggatccccaggggctttgacacagtcctctgctgtcctccactgggctaattctacacccctgtgcccctcctaggggcccatgagtcagagaggcttgccccaagtcacagccactcagatgttcgacgccccctaaggtccattccagcacccacctgagttccgaggagcacctgggaagctctgggtgcaggatagcagtccagagtccatgccccgctaggccatctgggtgctgggcatggatttctcagcaaggaagactcattaccttccctccctgggcctccattctctcctgggaaacacaaagcaataataaaaggaagtgttagacaatgt

SEQ ID NO: 2558 - DNA, 14070 bp, Homo sapiens
gaggagcccgcccagccagccagggccgcgaggccgaggccaggccgcagcccaggagccgccccaccgcagctggcgatggacccgccgaggcccgcgctgctggcgctgctggcgctgcctgcgctgctgctgctgctgctggcgggcgccagggccgaagaggaaatgctggaaaatgtcagcctggtctgtccaaaagatgcgacccgattcaagcacctccggaagtacacatacaactatgaggctgagagttccagtggagtccctgggactgctgattcaagaagtgccaccaggatcaactgcaaggttgagctggaggttccccagctctgcagcttcatcctgaagaccagccagtgcatcctgaaagaggtgtatggcttcaaccctgagggcaaagccttgctgaagaaaaccaagaactctgaggagtttgctgcagccatgtccaggtatgagctcaagctggccattccagaagggaagcaggttttcctttacccggagaaagatgaacctacttacatcctgaacatcaagaggggcatcatttctgccctcctggttcccccagagacagaagaagccaagcaagtgttgtttctggataccgtgtatggaaactgctccactcactttaccgtcaagacgaggaagggcaatgtggcaacagaaatatccactgaaagagacctggggcagtgtgatcgcttcaagcccatccgcacaggcatcagcccacttgctctcatcaaaggcatgacccgccccttgtcaactctgatcagcagcagccagtcctgtcagtacacactggacgctaagaggaagcatgtggcagaagccatctgcaaggagcaacacctcttcctgcctttctcctacaagaataagtatgggatggtagcacaagtgacacagactttgaaacttgaagacacaccaaagatcaacagccgcttctttggtgaaggtactaagaagatgggcctcgcatttgagagcaccaaatccacatcacctccaaagcaggccgaagctgttttgaagactgtccaggaactgaaaaaactaaccatctctgagcaaaatatccagagagctaatctcttcaataagctggttactgagctgagaggcctcagtgatgaagcagtcacatctctcttgccacagctgattgaggtgtccagccccatcactttacaagccttggttcagtgtggacagcctcagtgctccactcacatcctccagtggctgaaacgtgtgcatgccaacccccttctgatagatgtggtcacctacctggtggccctgatccccgagccctcagcacagcagctgcgagagatcttcaacatggcgagggatcagcgcagccgagccaccttgtatgcgctgagccacgcggtcaacaactatcataagacaaaccctacagggacccaggagctgctggacattgctaattacctgatggaacagattcaagatgactgcactggggatgaagattacacctatttgattctgcgggtcattggaaatatgggccaaaccatggagcagttaactccagaactcaagtcttcaatcctgaaatgtgtccaaagtacaaagccatcactgatgatccagaaagctgccatccaggctctgcggaaaatggagcctaaagacaaggaccaggaggttcttcttcagactttccttgatgatgcttctccgggagataagcgactggctgcctatcttatgttgatgaggagtccttcacaggcagatattaacaaaattgtccaaattctaccatgggaacagaatgagcaagtgaagaactttgtggcttcccatattgccaatatcttgaactcagaagaattggatatccaagatctgaaaaagttagtgaaagaagttctgaaagaatctcaacttccaactgtcatggacttcagaaaattctctcggaactatcaactctacaaatctgtttctattccatcacttgacccagcctcagccaaaatagaagggaatcttatatttgatccaaataactaccttcctaaagaaagcatgctgaaaactaccctcactgcctttggatttgcttcagctgacctcatcgagattggcttggaaggaaaaggctttgagccaacattggaagctctttttgggaagcaaggatttttcccagacagtgtcaacaaagctttgtactgggttaatggtcaagttcctgatggtgtctctaaggtcttagtggaccactttggctataccaaagatgataaacatgagcaggatatggtaaatggaataatgctcagtgttgagaagctgattaaagatttgaaatccaaagaagtcccggaagccagagcctacctccgcatcttgggagaggagcttggttttgccagtctccatgacctccagctcctgggaaagctgcttctgatgggtgcccgcactctgcaggggatcccccagatgattggagaggtcatcaggaagggctcaaagaatgacttttttcttcactacatcttcatggagaatgcctttgaactccccactggagctggattacagttgcaaatatcttcatctggagtcattgctcccggagccaaggctggagtaaaactggaagtagccaacatgcaggctgaactggtggcaaaaccctccgtgtctgtggagtttgtgacaaatatgggcatcatcattccggacttcgctaggagtggggtccagatgaacaccaacttcttccacgagtcgggtctggaggctcatgttgccctaaaacctgggaagctgaagtttatcattccttccccaaagagaccagtcaagctgctcagtggaggcaacacattacatttggtctctaccaccaaaacggaggtgatcccacctctcattgagaacaggcagtcctggtcagtttgcaagcaagtctttcctggcctgaattactgcacctcaggcgcttactccaacgccagctccacagactccgcctcctactatccgctgaccggggacaccagattagagctggaactgaggcctacaggagagattgagcagtattctgtcagcgcaacctatgagctccagagagaggacagagccttggtggataccctgaagtttgtaactcaagcagaaggtgcgaagcagactgaggctaccatgacattcaaatataatcggcagagtatgaccttgtccagtgaagtccaaattccggattttgatgttgacctcggaacaatcctcagagttaatgatgaatctactgagggcaaaacgtcttacagactcaccctggacattcagaacaagaaaattactgaggtcgccctcatgggccacctaagttgtgacacaaaggaagaaagaaaaatcaagggtgttatttccataccccgtttgcaagcagaagccagaagtgagatcctcgcccactggtcgcctgccaaactgcttctccaaatggactcatctgctacagcttatggctccacagtttccaagagggtggcatggcattatgatgaagagaagattgaatttgaatggaacacaggcaccaatgtagataccaaaaaaatgacttccaatttccctgtggatctctccgattatcctaagagcttgcatatgtatgctaatagactcctggatcacagagtccctcaaacagacatgactttccggcacgtgggttccaaattaatagttgcaatgagctcatggcttcagaaggcatctgggagtcttccttatacccagactttgcaagaccacctcaatagcctgaaggagttcaacctccagaacatgggattgccagacttccacatcccagaaaacctcttcttaaaaagcgatggccgggtcaaatataccttgaacaagaacagtttgaaaattgagattcctttgccttttggtggcaaatcctccagagatctaaagatgttagagactgttaggacaccagccctccacttcaagtctgtgggattccatctgccatctcgagagttccaagtccctacttttaccattcccaagttgtatcaactgcaagtgcctctcctgggtgttctagacctctccacgaatgtctacagcaacttgtacaactggtccgcctcctacagtggtggcaacaccagcacagaccatttcagccttcgggctcgttaccacatgaaggctgactctgtggttgacctgctttcctacaatgtgcaaggatctggagaaacaacatatgaccacaagaatacgttcacactatcatgtgatgggtctctacgccacaaatttctagattcgaatatcaaattcagtcatgtagaaaaacttggaaacaacccagtctcaaaaggtttactaatattcgatgcatctagttcctggggaccacagatgtctgcttcagttcatttggactccaaaaagaaacagcatttgtttgtcaaagaagtcaagattgatgggcagttcagagtctcttcgttctatgctaaaggcacatatggcctgtcttgtcagagggatcctaacactggccggctcaatggagagtccaacctgaggtttaactcctcctacctccaaggcaccaaccagataacaggaagatatgaagatggaaccctctccctcacctccacctctgatctgcaaagtggcatcattaaaaatactgcttccctaaagtatgagaactacgagctgactttaaaatctgacaccaatgggaagtataagaactttgccacttctaacaagatggatatgaccttctctaagcaaaatgcactgctgcgttctgaatatcaggctgattacgagtcattgaggttcttcagcctgctttctggatcactaaattcccatggtcttgagttaaatgctgacatcttaggcactgacaaaattaatagtggtgctcacaaggcgacactaaggattggccaagatggaatatctaccagtgcaacgaccaacttgaagtgtagtctcctggtgctggagaatgagctgaatgcagagcttggcctctctggggcatctatgaaattaacaacaaatggccgcttcagggaacacaatgcaaaattcagtctggatgggaaagccgccctcacagagctatcactgggaagtgcttatcaggccatgattctgggtgtcgacagcaaaaacattttcaacttcaaggtcagtcaagaaggacttaagctctcaaatgacatgatgggctcatatgctgaaatgaaatttgaccacacaaacagtctgaacattgcaggcttatcactggacttctcttcaaaacttgacaacatttacagctctgacaagttttataagcaaactgttaatttacagctacagccctattctctggtaactactttaaacagtgacctgaaatacaatgctctggatctcaccaacaatgggaaactacggctagaacccctgaagctgcatgtggctggtaacctaaaaggagcctaccaaaataatgaaataaaacacatctatgccatctcttctgctgccttatcagcaagctataaagcagacactgttgctaaggttcagggtgtggagtttagccatcggctcaacacagacatcgctgggctggcttcagccattgacatgagcacaaactataattcagactcactgcatttcagcaatgtcttccgttctgtaatggccccgtttaccatgaccatcgatgcacatacaaatggcaatgggaaactcgctctctggggagaacatactgggcagctgtatagcaaattcctgttgaaagcagaacctctggcatttactttctctcatgattacaaaggctccacaagtcatcatctcgtgtctaggaaaagcatcagtgcagctcttgaacacaaagtcagtgccctgcttactccagctgagcagacaggcacctggaaactcaagacccaatttaacaacaatgaatacagccaggacttggatgcttacaacactaaagataaaattggcgtggagcttactggacgaactctggctgacctaactctactagactccccaattaaagtgccacttttactcagtgagcccatcaatatcattgatgctttagagatgagagatgccgttgagaagccccaagaatttacaattgttgcttttgtaaagtatgataaaaaccaagatgttcactccattaacctcccattttttgagaccttgcaagaatattttgagaggaatcgacaaaccattatagttgtactggaaaacgtacagagaaacctgaagcacatcaatattgatcaatttgtaagaaaatacagagcagccctgggaaaactcccacagcaagctaatgattatctgaattcattcaattgggagagacaagtttcacatgccaaggagaaactgactgctctcacaaaaaagtatagaattacagaaaatgatatacaaattgcattagatgatgccaaaatcaactttaatgaaaaactatctcaactgcagacatatatgatacaatttgatcagtatattaaagatagttatgatttacatgatttgaaaatagctattgctaatattattgatgaaatcattgaaaaattaaaaagtcttgatgagcactatcatatccgtgtaaatttagtaaaaacaatccatgatctacatttgtttattgaaaatattgattttaacaaaagtggaagtagtactgcatcctggattcaaaatgtggatactaagtaccaaatcagaatccagatacaagaaaaactgcagcagcttaagagacacatacagaatatagacatccagcacctagctggaaagttaaaacaacacattgaggctattgatgttagagtgcttttagatcaattgggaactacaatttcatttgaaagaataaatgatgttcttgagcatgtcaaacactttgttataaatcttattggggattttgaagtagctgagaaaatcaatgccttcagagccaaagtccatgagttaatcgagaggtatgaagtagaccaacaaatccaggttttaatggataaattagtagagttggcccaccaatacaagttgaaggagactattcagaagctaagcaatgtcctacaacaagttaagataaaagattactttgagaaattggttggatttattgatgatgctgtcaagaagcttaatgaattatcttttaaaacattcattgaagatgttaacaaattccttgacatgttgataaagaaattaaagtcatttgattaccaccagtttgtagatgaaaccaatgacaaaatccgtgaggtgactcagagactcaatggtgaaattcaggctctggaactaccacaaaaagctgaagcattaaaactgtttttagaggaaaccaaggccacagttgcagtgtatctggaaagcctacaggacaccaaaataaccttaatcatcaattggttacaggaggctttaagttcagcatctttggctcacatgaaggccaaattccgagagactctagaagatacacgagaccgaatgtatcaaatggacattcagcaggaacttcaacgatacctgtctctggtaggccaggtttatagcacacttgtcacctacatttctgattggtggactcttgctgctaagaaccttactgactttgcagagcaatattctatccaagattgggctaaacgtatgaaagcattggtagagcaagggttcactgttcctgaaatcaagaccatccttgggaccatgcctgcctttgaagtcagtcttcaggctcttcagaaagctaccttccagacacctgattttatagtccccctaacagatttgaggattccatcagttcagataaacttcaaagacttaaaaaatataaaaatcccatccaggttttccacaccagaatttaccatccttaacaccttccacattccttcctttacaattgactttgtagaaatgaaagtaaagatcatcagaaccattgaccagatgctgaacagtgagctgcagtggcccgttccagatatatatctcagggatctgaaggtggaggacattcctctagcgagaatcaccctgccagacttccgtttaccagaaatcgcaattccagaattcataatcccaactctcaaccttaatgattttcaagttcctgaccttcacataccagaattccagcttccccacatctcacacacaattgaagtacctacttttggcaagctatacagtattctgaaaatccaatctcctcttttcacattagatgcaaatgctgacatagggaatggaaccacctcagcaaacgaagcaggtatcgcagcttccatcactgccaaaggagagtccaaattagaagttctcaattttgattttcaagcaaatgcacaactctcaaaccctaagattaatccgctggctctgaaggagtcagtgaagttctccagcaagtacctgagaacggagcatgggagtgaaatgctgttttttggaaatgctattgagggaaaatcaaacacagtggcaagtttacacacagaaaaaaatacactggagcttagtaatggagtgattgtcaagataaacaatcagcttaccctggatagcaacactaaatacttccacaaattgaacatccccaaactggacttctctagtcaggctgacctgcgcaacgagatcaagacactgttgaaagctggccacatagcatggacttcttctggaaaagggtcatggaaatgggcctgccccagattctcagatgagggaacacatgaatcacaaattagtttcaccatagaaggacccctcacttcctttggactgtccaataagatcaatagcaaacacctaagagtaaaccaaaacttggtttatgaatctggctccctcaacttttctaaacttgaaattcaatcacaagtcgattcccagcatgtgggccacagtgttctaactgctaaaggcatggcactgtttggagaagggaaggcagagtttactgggaggcatgatgctcatttaaatggaaaggttattggaactttgaaaaattctcttttcttttcagcccagccatttgagatcacggcatccacaaacaatgaagggaatttgaaagttcgttttccattaaggttaacagggaagatagacttcctgaataactatgcactgtttctgagtcccagtgcccagcaagcaagttggcaagtaagtgctaggttcaatcagtataagtacaaccaaaatttctctgctggaaacaacgagaacattatggaggcccatgtaggaataaatggagaagcaaatctggatttcttaaacattcctttaacaattcctgaaatgcgtctaccttacacaataatcacaactcctccactgaaagatttctctctatgggaaaaaacaggcttgaaggaattcttgaaaacgacaaagcaatcatttgatttaagtgtaaaagctcagtataagaaaaacaaacacaggcattccatcacaaatcctttggctgtgctttgtgagtttatcagtcagagcatcaaatcctttgacaggcattttgaaaaaaacagaaacaatgcattagattttgtcaccaaatcctataatgaaacaaaaattaagtttgataagtacaaagctgaaaaatctcacgacgagctccccaggacctttcaaattcctggatacactgttccagttgtcaatgttgaagtgtctccattcaccatagagatgtcggcattcggctatgtgttcccaaaagcagtcagcatgcctagtttctccatcctaggttctgacgtccgtgtgccttcatacacattaatcctgccatcattagagctgccagtccttcatgtccctagaaatctcaagctttctcttccagatttcaaggaattgtgtaccataagccatatttttattcctgccatgggcaatattacctatgatttctcctttaaatcaagtgtcatcacactgaataccaatgctgaactttttaaccagtcagatattgttgctcatctcctttcttcatcttcatctgtcattgatgcactgcagtacaaattagagggcaccacaagattgacaagaaaaaggggattgaagttagccacagctctgtctctgagcaacaaatttgtggagggtagtcataacagtactgtgagcttaaccacgaaaaatatggaagtgtcagtggcaacaaccacaaaagcccaaattccaattttgagaatgaatttcaagcaagaacttaatggaaataccaagtcaaaacctactgtctcttcctccatggaatttaagtatgatttcaattcttcaatgctgtactctaccgctaaaggagcagttgaccacaagcttagcttggaaagcctcacctcttacttttccattgagtcatctaccaaaggagatgtcaagggttcggttctttctcgggaatattcaggaactattgctagtgaggccaacacttacttgaattccaagagcacacggtcttcagtgaagctgcagggcacttccaaaattgatgatatctggaaccttgaagtaaaagaaaattttgctggagaagccacactccaacgcatatattccctctgggagcacagtacgaaaaaccacttacagctagagggcctctttttcaccaacggagaacatacaagcaaagccaccctggaactctctccatggcaaatgtcagctcttgttcaggtccatgcaagtcagcccagttccttccatgatttccctgaccttggccaggaagtggccctgaatgctaacactaagaaccagaagatcagatggaaaaatgaagtccggattcattctgggtctttccagagccaggtcgagctttccaatgaccaagaaaaggcacaccttgacattgcaggatccttagaaggacacctaaggttcctcaaaaatatcatcctaccagtctatgacaagagcttatgggatttcctaaagctggatgtaaccaccagcattggtaggagacagcatcttcgtgtttcaactgcctttgtgtacaccaaaaaccccaatggctattcattctccatccctgtaaaagttttggctgataaattcattattcctgggctgaaactaaatgatctaaattcagttcttgtcatgcctacgttccatgtcccatttacagatcttcaggttccatcgtgcaaacttgacttcagagaaatacaaatctataagaagctgagaacttcatcatttgccctcaacctaccaacactccccgaggtaaaattccctgaagttgatgtgttaacaaaatattctcaaccagaagactccttgattcccttttttgagataaccgtgcctgaatctcagttaactgtgtcccagttcacgcttccaaaaagtgtttcagatggcattgctgctttggatctaaatgcagtagccaacaagatcgcagactttgagttgcccaccatcatcgtgcctgagcagaccattgagattccctccattaagttctctgtacctgctggaattgccattccttcctttcaagcactgactgcacgctttgaggtagactctcccgtgtataatgccacttggagtgccagtttgaaaaacaaagcagattatgttgaaacagtcctggattccacatgcagctcaaccgtacagttcctagaatatgaacttaatgttttgggaacacacaaaatcgaagatggtacgttagcctctaagactaaaggaacatttgcacaccgtgacttcagtgcagaatatgaagaagatggcaaatatgaaggacttcaggaatgggaaggaaaagcgcacctcaatatcaaaagcccagcgttcaccgatctccatctgcgctaccagaaagacaagaaaggcatctccacctcagcagcctccccagccgtaggcaccgtgggcatggatatggatgaagatgacgacttttctaaatggaacttctactacagccctcagtcctctccagataaaaaactcaccatattcaaaactgagttgagggtccgggaatctgatgaggaaactcagatcaaagttaattgggaagaagaggcagcttctggcttgctaacctctctgaaagacaacgtgcccaaggccacaggggtcctttatgattatgtcaacaagtaccactgggaacacacagggctcaccctgagagaagtgtcttcaaagctgagaagaaatctgcaggaccatgctgagtgggtttatcaaggggccattagggaaattgatgatatcgacgagaggttccagaaaggagccagtgggaccactgggacctaccaagagtggaaggacaaggcccagaatctgtaccaggaactgttgactcaggaaggccaagccagtttccagggactcaaggataacgtgtttgatggcttggtacgagttactcaagaattccatatgaaagtcaagcatctgattgactcactcattgattttctgaacttccccagattccagtttccggggaaacctgggatatacactagggaggaactttgcactatgttcataagggaggtagggacggtactgtcccaggtatattcgaaagtccataatggttcagaaatactgttttcctatttccaagacctagtgattacacttcctttcgagttaaggaaacataaactaatagatgtaatctcgatgtatagggaactgttgaaagatttatcaaaagaagcccaagaggtatttaaagccattcagtctctcaagaccacagaggtgctacgtaatcttcaggaccttttacaattcattttccaactaatagaagataacattaaacagctgaaagagatgaaatttacttatcttattaattatatccaagatgagatcaacacaatcttcaatgattatatcccatatgtttttaaattgttgaaagaaaacctatgccttaatcttcataagttcaatgaatttattcaaaacgagcttcaggaagcttctcaagagttacagcagatccatcaatacattatggcccttcgtgaagaatattttgatccaagtatagttggctggacagtgaaatattatgaacttgaagaaaagatagtcagtctgatcaagaacctgttagttgctcttaaggacttccattctgaatatattgtcagtgcctctaactttacttcccaactctcaagtcaagttgagcaatttctgcacagaaatattcaggaatatcttagcatccttaccgatccagatggaaaagggaaagagaagattgcagagctttctgccactgctcaggaaataattaaaagccaggccattgcgacgaagaaaataatttctgattaccaccagcagtttagatataaactgcaagatttttcagaccaactctctgattactatgaaaaatttattgctgaatccaaaagattgattgacctgtccattcaaaactaccacacatttctgatatacatcacggagttactgaaaaagctgcaatcaaccacagtcatgaacccctacatgaagcttgctccaggagaacttactatcatcctctaattttttaaaagaaatcttcatttattcttcttttccaattgaactttcacatagcacagaaaaaattcaaaatgcctatattgatcaaaccatacagtgagccagccttgcagtaggcagtagactataagcagaagcacatatgaactggacctgcaccaaagctggcaccagggctcggaaggtctctgaactcagaaggatggcattttttgcaagttaaagaaaatcaggatctgagttattttgctaaacttgggggaggaggaacaaataaatggagtctttattgtgtatcat

SEQ ID NO: 2559 - DNA, 7364 bp, Homo sapiens
gcggcggcggctgcggcggtggggccgggcgaggtccgctgcggtcccggcggctccgtggctgctccgctctgagcgcctggcgcgccccgcgccctccctgccggggccgctgggccggggatgcacgcggggcccgggagccatggtccgcttcggggacgagctgggcggccgctatggaggccccggcggcggagagcgggcccggggcggcggggccggcggggcggggggcccgggtcccggggggctgcagcccggccagcgggtcctctacaagcaatcgatcgcgcagcgcgcgcggaccatggcgctgtacaaccccatcccggtcaagcagaactgcttcaccgtcaaccgctcgctcttcgtcttcagcgaggacaacgtcgtccgcaaatacgcgaagcgcatcaccgagtggcctccattcgagtatatgatcctggccaccatcatcgccaactgcatcgtgctggccctggagcagcacctccctgatggggacaaaacgcccatgtccgagcggctggacgacacggagccctatttcatcgggatcttttgcttcgaggcagggatcaaaatcatcgctctgggctttgtcttccacaagggctcttacctgcggaacggctggaacgtcatggacttcgtggtcgtcctcacagggatccttgccacggctggaactgacttcgacctgcgaacactgagggctgtgcgtgtgctgaggcccctgaagctggtgtctgggattccaagtttgcaggtggtgctcaagtccatcatgaaggccatggttccactcctgcagattgggctgcttctcttctttgccatcctcatgtttgccatcattggcctggagttctacatgggcaagttccacaaggcctgtttccccaacagcacagatgcggagcccgtgggtgacttcccctgtggcaaggaggccccagcccggctgtgcgagggcgacactgagtgccgggagtactggccaggacccaactttggcatcaccaactttgacaatatcctgtttgccatcttgacggtgttccagtgcatcaccatggagggctggactgacatcctctataatacaaacgatgcggccggcaacacctggaactggctctacttcatccctctcatcatcatcggctccttcttcatgctcaacctggtgctgggcgtgctctcgggggagtttgccaaggagcgagagagggtggagaaccgccgcgccttcctgaagctgcgccggcagcagcagatcgagcgagagctcaacgggtacctggagtggatcttcaaggcggaggaagtcatgctggccgaggaggacaggaatgcagaggagaagtcccctttggacgtgctgaagagagcggccaccaagaagagcagaaatgacctgatccacgcagaggagggagaggaccggtttgcagatctctgtgctgttggatcccccttcgcccgcgccagcctcaagagcgggaagacagagagctcgtcatacttccggaggaaggagaagatgttccggttttttatccggcgcatggtgaaggctcagagcttctactgggtggtgctgtgcgtggtggccctgaacacactgtgtgtggccatggtgcattacaaccagccgcggcggcttaccacgaccctgtattttgcagagtttgttttcctgggtctcttcctcacagagatgtccctgaagatgtatggcctggggcccagaagctacttccggtcctccttcaactgcttcgactttggggtcatcgtggggagcgtctttgaagtggtctgggcggccatcaagccgggaagctcctttgggatcagtgtgctgcgggccctccgcctgctgaggatcttcaaagtcacgaagtactggagctccctgcggaacctggtggtgtccctgctgaactccatgaagtccatcatcagcctgctcttcttgctcttcctgttcattgtggtcttcgccctgctggggatgcagctgtttgggggacagttcaacttccaggatgagactcccacaaccaacttcgacaccttccctgccgccatcctcactgtcttccagatcctgacgggagaggactggaatgcagtgatgtatcacgggatcgaatcgcaaggcggcgtcagcaaaggcatgttctcgtccttttacttcattgtcctgacactgttcggaaactacactctgctgaatgtctttctggccatcgctgtggacaacctggccaacgcccaagagctgaccaaggatgaagaggagatggaagaagcagccaatcagaagcttgctctgcaaaaggccaaagaagtggctgaagtcagccccatgtctgccgcgaacatctccatcgccgccaggcagcagaactcggccaaggcgcgctcggtgtgggagcagcgggccagccagctacggctgcagaacctgcgggccagctgcgaggcgctgtacagcgagatggaccccgaggagcggctgcgcttcgccactacgcgccacctgcggcccgacatgaagacgcacctggaccggccgctggtggtggagctgggccgcgacggcgcgcgggggcccgtgggaggcaaagcccgacctgaggctgcggaggcccccgagggcgtcgaccctccgcgcaggcaccaccggcaccgcgacaaggacaagacccccgcggcgggggaccaggaccgagcagaggccccgaaggcggagagcggggagcccggtgcccgggaggagcggccgcggccgcaccgcagccacagcaaggaggccgcggggcccccggaggcgcggagcgagcgcggccgaggcccaggccccgagggcggccggcggcaccaccggcgcggctccccggaggaggcggccgagcgggagccccgacgccaccgcgcgcaccggcaccaggatccgagcaaggagtgcgccggcgccaagggcgagcggcgcgcgcggcaccgcggcggcccccgagcggggccccgggaggcggagagcggggaggagccggcgcggcggcaccgggcccggcacaaggcgcagcctgctcacgaggctgtggagaaggagaccacggagaaggaggccacggagaaggaggctgagatagtggaagccgacaaggaaaaggagctccggaaccaccagccccgggagccacactgtgacctggagaccagtgggactgtgactgtgggtcccatgcacacactgcccagcacctgtctccagaaggtggaggaacagccagaggatgcagacaatcagcggaacgtcactcgcatgggcagtcagcccccagacccgaacactattgtacatatcccagtgatgctgacgggccctcttggggaagccacggtcgttcccagtggtaacgtggacctggaaagccaagcagaggggaagaaggaggtggaagcggatgacgtgatgaggagcggcccccggcctatcgtcccatacagctccatgttctgtttaagccccaccaacctgctccgccgcttctgccactacatcgtgaccatgaggtacttcgaggtggtcattctcgtggtcatcgccttgagcagcatcgccctggctgctgaggacccagtgcgcacagactcgcccaggaacaacgctctgaaatacctggattacattttcactggtgtctttacctttgagatggtgataaagatgatcgacttgggactgctgcttcaccctggagcctatttccgggacttgtggaacattctggacttcattgtggtcagtggcgccctggtggcgtttgctttctcaggatccaaagggaaagacatcaataccatcaagtctctgagagtccttcgtgtcctgcggcccctcaagaccatcaaacggctgcccaagctcaaggctgtgtttgactgtgtggtgaactccctgaagaatgtcctcaacatcttgattgtctacatgctcttcatgttcatatttgccgtcattgcggtgcagctcttcaaagggaagtttttctactgcacagatgaatccaaggagctggagagggactgcaggggtcagtatttggattatgagaaggaggaagtggaagctcagcccaggcagtggaagaaatacgactttcactacgacaatgtgctctgggctctgctgacgctgttcacagtgtccacgggagaaggctggcccatggtgctgaaacactccgtggatgccacctatgaggagcagggtccaagccctgggtaccgcatggagctgtccatcttctacgtggtctactttgtggtctttcccttcttcttcgtcaacatctttgtggctttgatcatcatcaccttccaggagcagggggacaaggtgatgtctgaatgcagcctggagaagaacgagagggcttgcattgacttcgccatcagcgccaaacccctgacacggtacatgccccaaaaccggcagtcgttccagtataagacgtggacatttgtggtctccccgccctttgaatacttcatcatggccatgatagccctcaacactgtggtgctgatgatgaagttctatgatgcaccctatgagtacgagctgatgctgaaatgcctgaacatcgtgttcacatccatgttctccatggaatgcgtgctgaagatcatcgcctttggggtgctgaactatttcagagatgcctggaatgtctttgactttgtcactgtgttgggaagtattactgatattttagtaacagagattgcggaaacgaacaatttcatcaacctcagcttcctccgcctctttcgagctgcgcggctgatcaagctgctccgccagggctacaccatccgcatcctgctgtggacctttgtccagtccttcaaggccctgccctacgtgtgtctgctcattgccatgctgttcttcatctacgccatcatcggcatgcaggtgtttgggaatattgccctggatgatgacaccagcatcaaccgccacaacaacttccggacgtttttgcaagccctgatgctgctgttcaggagcgccacgggggaggcctggcacgagatcatgctgtcctgcctgagcaaccaggcctgtgatgagcaggccaatgccaccgagtgtggaagtgactttgcctacttctacttcgtctccttcatcttcctgtgctcctttctgatgttgaacctctttgtggctgtgatcatggacaattttgagtacctcacgcgggactcttccatcctaggtcctcaccacttggatgagttcatccgggtctgggctgaatacgacccggctgcgtgtgggcgcatcagttacaatgacatgtttgagatgctgaaacacatgtccccgcctctggggctggggaagaaatgccctgctcgagttgcttacaagcgcctggttcgcatgaacatgcccatctccaacgaggacatgactgttcacttcacgtccacgctgatggccctcatccggacggcactggagatcaagctggccccagctgggacaaagcagcatcagtgtgacgcggagttgaggaaggagatttccgttgtgtgggccaatctgccccagaagactttggacttgctggtaccaccccataagcctgatgagatgacagtggggaaggtttatgcagctctgatgatatttgacttctacaagcagaacaaaaccaccagagaccagatgcagcaggctcctggaggcctctcccagatgggtcctgtgtccctgttccaccctctgaaggccaccctggagcagacacagccggctgtgctccgaggagcccgggttttccttcgacagaagagttccacctccctcagcaatggcggggccatacaaaaccaagagagtggcatcaaagagtctgtctcctggggcactcaaaggacccaggatgcaccccatgaggccaggccacccctggagcgtggccactccacagagatccctgtggggcggtcaggagcactggctgtggacgttcagatgcagagcataacccggaggggccctgatggggagccccagcctgggctggagagccagggtcgagcggcctccatgccccgccttgcggccgagactcagcccgtcacagatgccagccccatgaagcgctccatctccacgctggcccagcggccccgtgggactcatctttgcagcaccaccccggaccgcccaccccctagccaggcgtcgtcgcaccaccaccaccaccgctgccaccgccgcagggacaggaagcagaggtccctggagaaggggcccagcctgtctgccgatatggatggcgcaccaagcagtgctgtggggccggggctgcccccgggagaggggcctacaggctgccggcgggaacgagagcgccggcaggagcggggccggtcccaggagcggaggcagccctcatcctcctcctcggagaagcagcgcttctactcctgcgaccgctttgggggccgtgagcccccgaagcccaagccctccctcagcagccacccaacgtcgccaacagctggccaggagccgggaccccacccacagggcagtggttccgtgaatgggagccccttgctgtcaacatctggtgctagcacccccggccgcggtgggcggaggcagctcccccagacgcccctgactccccgccccagcatcacctacaagacggccaactcctcacccatccacttcgccggggctcagaccagcctccctgccttctccccaggccggctcagccgtgggctttccgaacacaacgccctgctgcagagagaccccctcagccagcccctggcccctggctctcgaattggctctgacccttacctggggcagcgtctggacagtgaggcctctgtccacgccctgcctgaggacacgctcactttcgaggaggctgtggccaccaactcgggccgctcctccaggacttcctacgtgtcctccctgacctcccagtctcaccctctccgccgcgtgcccaacggttaccactgcaccctgggactcagctcgggtggccgagcacggcacagctaccaccaccctgaccaagaccactggtgctagctgcaccgtgaccgctcagacgcctgcatgcagcaggcgtgtgttccagtggatgagttttatcatccacacggggcagtcggccctcgggggaggccttgcccaccttggtgaggctcctgtggcccctccctccccctcctcccctcttttactctagacgacgaataaagccctgttgcttgagtgtacgtaccgc

SEQ ID NO: 2560 - DNA, 7177 bp, Homo sapiens
gcggcggcggctgcggcggtggggccgggcgaggtccgctgcggtcccggcggctccgtggctgctccgctctgagcgcctggcgcgccccgcgccctccctgccggggccgctgggccggggatgcacgcggggcccgggagccatggtccgcttcggggacgagctgggcggccgctatggaggccccggcggcggagagcgggcccggggcggcggggccggcggggcggggggcccgggtcccggggggctgcagcccggccagcgggtcctctacaagcaatcgatcgcgcagcgcgcgcggaccatggcgctgtacaaccccatcccggtcaagcagaactgcttcaccgtcaaccgctcgctcttcgtcttcagcgaggacaacgtcgtccgcaaatacgcgaagcgcatcaccgagtggcctccattcgagtatatgatcctggccaccatcatcgccaactgcatcgtgctggccctggagcagcacctccctgatggggacaaaacgcccatgtccgagcggctggacgacacggagccctatttcatcgggatcttttgcttcgaggcagggatcaaaatcatcgctctgggctttgtcttccacaagggctcttacctgcggaacggctggaacgtcatggacttcgtggtcgtcctcacagggatccttgccacggctggaactgacttcgacctgcgaacactgagggctgtgcgtgtgctgaggcccctgaagctggtgtctgggattccaagtttgcaggtggtgctcaagtccatcatgaaggccatggttccactcctgcagattgggctgcttctcttctttgccatcctcatgtttgccatcattggcctggagttctacatgggcaagttccacaaggcctgtttccccaacagcacagatgcggagcccgtgggtgacttcccctgtggcaaggaggccccagcccggctgtgcgagggcgacactgagtgccgggagtactggccaggacccaactttggcatcaccaactttgacaatatcctgtttgccatcttgacggtgttccagtgcatcaccatggagggctggactgacatcctctataatacaaacgatgcggccggcaacacctggaactggctctacttcatccctctcatcatcatcggctccttcttcatgctcaacctggtgctgggcgtgctctcgggggagtttgccaaggagcgagagagggtggagaaccgccgcgccttcctgaagctgcgccggcagcagcagatcgagcgagagctcaacgggtacctggagtggatcttcaaggcggaggaagtcatgctggccgaggaggacaggaatgcagaggagaagtcccctttggacgtgctgaagagagcggccaccaagaagagcagaaatgacctgatccacgcagaggagggagaggaccggtttgcagatctctgtgctgttggatcccccttcgcccgcgccagcctcaagagcgggaagacagagagctcgtcatacttccggaggaaggagaagatgttccggttttttatccggcgcatggtgaaggctcagagcttctactgggtggtgctgtgcgtggtggccctgaacacactgtgtgtggccatggtgcattacaaccagccgcggcggcttaccacgaccctgtattttgcagagtttgttttcctgggtctcttcctcacagagatgtccctgaagatgtatggcctggggcccagaagctacttccggtcctccttcaactgcttcgactttggggtcatcgtggggagcgtctttgaagtggtctgggcggccatcaagccgggaagctcctttgggatcagtgtgctgcgggccctccgcctgctgaggatcttcaaagtcacgaagtactggagctccctgcggaacctggtggtgtccctgctgaactccatgaagtccatcatcagcctgctcttcttgctcttcctgttcattgtggtcttcgccctgctggggatgcagctgtttgggggacagttcaacttccaggatgagactcccacaaccaacttcgacaccttccctgccgccatcctcactgtcttccagatcctgacgggagaggactggaatgcagtgatgtatcacgggatcgaatcgcaaggcggcgtcagcaaaggcatgttctcgtccttttacttcattgtcctgacactgttcggaaactacactctgctgaatgtctttctggccatcgctgtggacaacctggccaacgcccaagagctgaccaaggatgaagaggagatggaagaagcagccaatcagaagcttgctctgcaaaaggccaaagaagtggctgaagtcagccccatgtctgccgcgaacatctccatcgccgccaggcagcagaactcggccaaggcgcgctcggtgtgggagcagcgggccagccagctacggctgcagaacctgcgggccagctgcgaggcgctgtacagcgagatggaccccgaggagcggctgcgcttcgccactacgcgccacctgcggcccgacatgaagacgcacctggaccggccgctggtggtggagctgggccgcgacggcgcgcgggggcccgtgggaggcaaagcccgacctgaggctgcggaggcccccgagggcgtcgaccctccgcgcaggcaccaccggcaccgcgacaaggacaagacccccgcggcgggggaccaggaccgagcagaggccccgaaggcggagagcggggagcccggtgcccgggaggagcggccgcggccgcaccgcagccacagcaaggaggccgcggggcccccggaggcgcggagcgagcgcggccgaggcccaggccccgagggcggccggcggcaccaccggcgcggctccccggaggaggcggccgagcgggagccccgacgccaccgcgcgcaccggcaccaggatccgagcaaggagtgcgccggcgccaagggcgagcggcgcgcgcggcaccgcggcggcccccgagcggggccccgggaggcggagagcggggaggagccggcgcggcggcaccgggcccggcacaaggcgcagcctgctcacgaggctgtggagaaggagaccacggagaaggaggccacggagaaggaggctgagatagtggaagccgacaaggaaaaggagctccggaaccaccagccccgggagccacactgtgacctggagaccagtgggactgtgactgtgggtcccatgcacacactgcccagcacctgtctccagaaggtggaggaacagccagaggatgcagacaatcagcggaacgtcactcgcatgggcagtcagcccccagacccgaacactattgtacatatcccagtgatgctgacgggccctcttggggaagccacggtcgttcccagtggtaacgtggacctggaaagccaagcagaggggaagaaggaggtggaagcggatgacgtgatgaggagcggcccccggcctatcgtcccatacagctccatgttctgtttaagccccaccaacctgctccgccgcttctgccactacatcgtgaccatgaggtacttcgaggtggtcattctcgtggtcatcgccttgagcagcatcgccctggctgctgaggacccagtgcgcacagactcgcccaggaacaacgctctgaaatacctggattacattttcactggtgtctttacctttgagatggtgataaagatgatcgacttgggactgctgcttcaccctggagcctatttccgggacttgtggaacattctggacttcattgtggtcagtggcgccctggtggcgtttgctttctcaggatccaaagggaaagacatcaataccatcaagtctctgagagtccttcgtgtcctgcggcccctcaagaccatcaaacggctgcccaagctcaaggctgtgtttgactgtgtggtgaactccctgaagaatgtcctcaacatcttgattgtctacatgctcttcatgttcatatttgccgtcattgcggtgcagctcttcaaagggaagtttttctactgcacagatgaatccaaggagctggagagggactgcaggggtcagtatttggattatgagaaggaggaagtggaagctcagcccaggcagtggaagaaatacgactttcactacgacaatgtgctctgggctctgctgacgctgttcacagtgtccacgggagaaggctggcccatggtgctgaaacactccgtggatgccacctatgaggagcagggtccaagccctgggtaccgcatggagctgtccatcttctacgtggtctactttgtggtctttcccttcttcttcgtcaacatctttgtggctttgatcatcatcaccttccaggagcagggggacaaggtgatgtctgaatgcagcctggagaagaacgagagggcttgcattgacttcgccatcagcgccaaacccctgacacggtacatgccccaaaaccggcagtcgttccagtataagacgtggacatttgtggtctccccgccctttgaatacttcatcatggccatgatagccctcaacactgtggtgctgatgatgaagttctatgatgcaccctatgagtacgagctgatgctgaaatgcctgaacatcgtgttcacatccatgttctccatggaatgcgtgctgaagatcatcgcctttggggtgctgaactatttcagagatgcctggaatgtctttgactttgtcactgtgttgggaagtattactgatattttagtaacagagattgcggaaacgaacaatttcatcaacctcagcttcctccgcctctttcgagctgcgcggctgatcaagctgctccgccagggctacaccatccgcatcctgctgtggacctttgtccagtccttcaaggccctgccctacgtgtgtctgctcattgccatgctgttcttcatctacgccatcatcggcatgcaggtgtttgggaatattgccctggatgatgacaccagcatcaaccgccacaacaacttccggacgtttttgcaagccctgatgctgctgttcaggagcgccacgggggaggcctggcacgagatcatgctgtcctgcctgagcaaccaggcctgtgatgagcaggccaatgccaccgagtgtggaagtgactttgcctacttctacttcgtctccttcatcttcctgtgctcctttctgatgttgaacctctttgtggctgtgatcatggacaattttgagtacctcacgcgggactcttccatcctaggtcctcaccacttggatgagttcatccgggtctgggctgaatacgacccggctgcgtgtgggcgcatcagttacaatgacatgtttgagatgctgaaacacatgtccccgcctctggggctggggaagaaatgccctgctcgagttgcttacaagcgcctggttcgcatgaacatgcccatctccaacgaggacatgactgttcacttcacgtccacgctgatggccctcatccggacggcactggagatcaagctggccccagctgggacaaagcagcatcagtgtgacgcggagttgaggaaggagatttccgttgtgtgggccaatctgccccagaagactttggacttgctggtaccaccccataagcctgatgagatgacagtggggaaggtttatgcagctctgatgatatttgacttctacaagcagaacaaaaccaccagagaccagatgcagcaggctcctggaggcctctcccagatgggtcctgtgtccctgttccaccctctgaaggccaccctggagcagacacagccggctgtgctccgaggagcccgggttttccttcgacagaagagttccacctccctcagcaatggcggggccatacaaaaccaagagagtggcatcaaagagtctgtctcctggggcactcaaaggacccaggatgcaccccatgaggccaggccacccctggagcgtggccactccacagagatccctgtggggcggtcaggagcactggctgtggacgttcagatgcagagcataacccggaggggccctgatggggagccccagcctgggctggagagccagggtcgagcggcctccatgccccgccttgcggccgagactcagcccgtcacagatgccagccccatgaagcgctccatctccacgctggcccagcggccccgtgggactcatctttgcagcaccaccccggaccgcccaccccctagccaggcgtcgtcgcaccaccaccaccaccgctgccaccgccgcagggacaggaagcagaggtccctggagaaggggcccagcctgtctgccgatatggatggcgcaccaagcagtgctgtggggccggggctgcccccgggagaggggcctacaggctgccggcgggaacgagagcgccggcaggagcggggccggtcccaggagcggaggcagccctcatcctcctcctcggagaagcagcgcttctactcctgcgaccgctttgggggccgtgagcccccgaagcccaagccctccctcagcagccacccaacgtcgccaacagctggccaggagccgggaccccacccacaggccggctcagccgtgggctttccgaacacaacgccctgctgcagagagaccccctcagccagcccctggcccctggctctcgaattggctctgacccttacctggggcagcgtctggacagtgaggcctctgtccacgccctgcctgaggacacgctcactttcgaggaggctgtggccaccaactcgggccgctcctccaggacttcctacgtgtcctccctgacctcccagtctcaccctctccgccgcgtgcccaacggttaccactgcaccctgggactcagctcgggtggccgagcacggcacagctaccaccaccctgaccaagaccactggtgctagctgcaccgtgaccgctcagacgcctgcatgcagcaggcgtgtgttccagtggatgagttttatcatccacacggggcagtcggccctcgggggaggccttgcccaccttggtgaggctcctgtggcccctccctccccctcctcccctcttttactctagacgacgaataaagccctgttgcttgagtgtacgtaccgc

SEQ ID NO: 2561 - DNA, 3588 bp, Homo sapiens
gtgcgcacgtccgcacctcaccctgcggctgacatctcctgcccaggagatgggcgctgaagcttgagcgcctgagtccctggagccacacctgcgaacaccctttgcttctattgagctgtgcccagccgcccagtgacagaattccagaataaatgattcccactgatccacccacttttgccaccccaggatgcaattttctggagagaagattagtggacaaagagatcttcaaaaatcaaaaatgaggttcacatttacaagccggtgcttggcactgtttcttcttctaaatcacccaaccccaattcttcctgccttttcaaatcaaacctatccaacaatagagcccaagccatttctttacgtcgtaggacgaaagaagatgatggatgcacagtacaaatgctatgaccgaatgcagcagttacccgcataccaaggagaaggtccatattgcaatcgcacctgggatggatggctgtgctgggatgacacaccggctggagtattgtcctatcagttctgcccagattattttccggattttgatccatcagaaaaggttacaaaatactgtgatgaaaaaggtgtttggtttaaacatcctgaaaacaatcgaacctggtccaactatactatgtgcaatgctttcactcctgagaaactgaagaatgcatatgttctgtactatttggctattgtgggtcattctttgtcaattttcaccctagtgatttccctggggattttcgtgtttttcagaaaattgacaactatttttcctttgaattggaaatataggaaggcattgagccttggctgccaaagggtaaccctgcacaagaacatgtttcttacttacattctgaattctatgattatcatcatccacctggttgaagtagtacccaatggagagctcgtgcgaagggacccggtgagctgcaagattttgcattttttccaccagtacatgatggcctgcaactatttctggatgctctgtgaagggatctatcttcatacactcattgtcgtggctgtgtttactgagaagcaacgcttgcggtggtattatctcttgggctgggggttcccgctggtgccaaccactatccatgctattaccagggccgtgtacttcaatgacaactgctggctgagtgtggaaacccatttgctttacataatccatggacctgtcatggcggcacttgtggtcaatttcttctttttgctcaacattgtccgggtgcttgtgaccaaaatgagggaaacccatgaggcggaatcccacatgtacctgaaggctgtgaaggccaccatgatccttgtgcccctgctgggaatccagtttgtcgtctttccctggagaccttccaacaagatgcttgggaagatatatgattacgtgatgcactctctgattcatttccagggcttctttgttgcgaccatctactgcttctgcaacaatgaggtccaaaccaccgtgaagcgccaatgggcccaattcaaaattcagtggaaccagcgttgggggaggcgcccctccaaccgctctgctcgcgctgcagccgctgctgcggaggctggcgacatcccaatttacatctgccatcaggagccgaggaatgaaccagccaacaaccaaggcgaggagagtgctgagatcatccctttgaatatcatagagcaagagtcatctgcttgaatgtgaagcaaacacagtatcgtgatcactgagccatcatttcctgggagaaagaccatgcatttaaagtattctccatcctcccaggaaccgaacatatcatttgtgaagaattattcagtgaatttgtccattgtaaatctgaagaaagttattcttggtactgttgctttgggagacagtctaggaatggagtctcccactgcaacttgtgaactccatcattcatccaggactgagatgcaaatgtcacagtaatgcaagcaaagtatcaaagaaaaacaatgaaattgacctagttcagatacagggtgctccttgtcaatactgagccatttatacctttgaaatattaaaatcactgtcaatatttttatttttaactctggattttgaattagattatttctgtatttggctatggatctgatttttaatttttttaaatttcagtcaattctgatgttactgagatgttttaccatccttacaatgtaaaccacatgaactacgtgacctctgcaagacaaagcggctttctaatagagagattagtaaatatgtgaagaaaaagacctgcatttggcaggaagatgtatgctttgaatgcaaaagaaatttagagtcaatttgctgaaaacattacatgctcagcttggttttggacaagcctgtccattgggcaggacctagctgttgtaaagaattggtcttaatgttgaatgtattttggttgctgatgtttataaactgagaggtcacaaagaatctatcactaaaaatttttacaaaactgccaaaaatataattcttagtggaagacaatactccctttaaagaaagagagtttgccactcccctaaactccaggatttataaagcaaattactccaaggtttataaagcagattacctcttgcccttgggtgctatctagcagtaaaagataaatttgttgaatattggtaattaaaagactccacataagtccattaactgctttccacccagcttcaaagcttaaaaagagctcaggcttttccaggaagatccaggagggctaattagaaatcaacttgtggttgaccgcttgtttcttgttattaccaaaacaggaggggaaaaaattaactgctccaaatttaaccataaatcaattcatgtttaacgtttctcattaaaatccagtattatattatcatatctctctttacttcccagtataagatttttgaaaatcctgaataaaccagtatcgttactggcacctgaaattaatttgtgaatttgcaacagtaatcagagttaccattatttaatttgtatgctaaatgaggaggtacattgaaaccctccaaatctccagtctcatctatgtcatattttgccactgcctttcagaagtgatttagttgtggaaagataataaattgatttgttatggttacatattcagcgcacccagagaaaattaattatatttctacagagaaaatgaatttgggatactaaagtagtttaagtctcctttactgaatgtaagggggggatcgaaaagaaggtatttttccaatcacagtgttatgtagtattgttctatttttgtttacaaacatggaaaacagagtatttctggcagctgtggtacaaatgtgataatatattgctaaaatattttagatgttattatgctaatatagtaggggttgaagaaaacaaaatagcttattatagaattgcacatagttctgcccaaattatgtgaaatgcttatgcttgtgtatatgtataaattaatacagagtacgttaaaagcaaaaagatgtatatttgcatatttttctaaagaaatatattattcatctttt

SEQ ID NO: 2562 - DNA, 2924 bp, Homo sapiens
gacgccgacgatgaagacaccgtggaaggttcttctgggactgctgggtgctgctgcgcttgtcaccatcatcaccgtgcccgtggttctgctgaacaaaggcacagatgatgctacagctgacagtcgcaaaacttacactctaactgattacttaaaaaatacttatagactgaagttatactccttaagatggatttcagatcatgaatatctctacaaacaagaaaataatatcttggtattcaatgctgaatatggaaacagctcagttttcttggagaacagtacatttgatgagtttggacattctatcaatgattattcaatatctcctgatgggcagtttattctcttagaatacaactacgtgaagcaatggaggcattcctacacagcttcatatgacatttatgatttaaataaaaggcagctgattacagaagagaggattccaaacaacacacagtgggtcacatggtcaccagtgggtcataaattggcatatgtttggaacaatgacatttatgttaaaattgaaccaaatttaccaagttacagaatcacatggacggggaaagaagatataatatataatggaataactgactgggtttatgaagaggaagtcttcagtgcctactctgctctgtggtggtctccaaacggcacttttttagcatatgcccaatttaacgacacagaagtcccacttattgaatactccttctactctgatgagtcactgcagtacccaaagactgtacgggttccatatccaaaggcaggagctgtgaatccaactgtaaagttctttgttgtaaatacagactctctcagctcagtcaccaatgcaacttccatacaaatcactgctcctgcttctatgttgataggggatcactacttgtgtgatgtgacatgggcaacacaagaaagaatttctttgcagtggctcaggaggattcagaactattcggtcatggatatttgtgactatgatgaatccagtggaagatggaactgcttagtggcacggcaacacattgaaatgagtactactggctgggttggaagatttaggccttcagaacctcattttacccttgatggtaatagcttctacaagatcatcagcaatgaagaaggttacagacacatttgctatttccaaatagataaaaaagactgcacatttattacaaaaggcacctgggaagtcatcgggatagaagctctaaccagtgattatctatactacattagtaatgaatataaaggaatgccaggaggaaggaatctttataaaatccaacttagtgactatacaaaagtgacatgcctcagttgtgagctgaatccggaaaggtgtcagtactattctgtgtcattcagtaaagaggcgaagtattatcagctgagatgttccggtcctggtctgcccctctatactctacacagcagcgtgaatgataaagggctgagagtcctggaagacaattcagctttggataaaatgctgcagaatgtccagatgccctccaaaaaactggacttcattattttgaatgaaacaaaattttggtatcagatgatcttgcctcctcattttgataaatccaagaaatatcctctactattagatgtgtatgcaggcccatgtagtcaaaaagcagacactgtcttcagactgaactgggccacttaccttgcaagcacagaaaacattatagtagctagctttgatggcagaggaagtggttaccaaggagataagatcatgcatgcaatcaacagaagactgggaacatttgaagttgaagatcaaattgaagcagccagacaattttcaaaaatgggatttgtggacaacaaacgaattgcaatttggggctggtcatatggagggtacgtaacctcaatggtcctgggatcaggaagtggcgtgttcaagtgtggaatagccgtggcgcctgtatcccggtgggagtactatgactcagtgtacacagaacgttacatgggtctcccaactccagaagacaaccttgaccattacagaaattcaacagtcatgagcagagctgaaaattttaaacaagttgagtacctccttattcatggaacagcagatgataacgttcactttcagcagtcagctcagatctccaaagccctggtcgatgttggagtggatttccaggcaatgtggtatactgatgaagaccatggaatagctagcagcacagcacaccaacatatatatacccacatgagccacttcataaaacaatgtttctctttaccttagcacctcaaaataccatgccatttaaagcttattaaaactcatttttgttttcattatctcaaaactgcactgtcaagatgatgatgatctttaaaatacacactcaaatcaagaaacttaaggttacctttgttcccaaatttcatacctatcatcttaagtagggacttctgtcttcacaacagattattaccttacagaagtttgaattatccggtcgggttttattgtttaaaatcatttctgcatcagctgctgaaacaacaaataggaattgtttttatggaggctttgcatagattccctgagcaggattttaatctttttctaactggactggttcaaatgttgttctcttctttaaagggatggcaagatgtgggcagtgatgtcactagggcagggacaggataagagggattagggagagaagatagcagggcatggctgggaacccaagtccaagcataccaacacgaccaggctactgtcagctcccctcggagaaaactgtgcagtctgcgtgtgaacagctcttctcctttagagcacaatggatctcgagggatcttccatacctaccagttctgcgcctcgaggccgcgactctaga

SEQ ID NO: 2563 - DNA, 2615 bp, Homo sapiens
ccttttttggcctcgacggcggcaacccagcctccctcctaacgccctccgcctttgggaccaaccaggggagctcaagttagtagcagccaaggagaggcgctgccttgccaagactaaaaagggaggggagaagagaggaaaaaagcaagaatcccccacccctctcccgggcggagggggcgggaagagcgcgtcctggccaagccgagtagtgtcttccactcggtgcgtctctctaggagccgcgcgggaaggatgctggtccgcaggggcgcgcgcgagggcccaggatgccgcggggctggaccgcgctttgcttgctgagtttgctgccttctgggttcatgagtcttgacaacaacggtactgctaccccagagttacctacccagggaacattttcaaatgtttctacaaatgtatcctaccaagaaactacaacacctagtacccttggaagtaccagcctgcaccctgtgtctcaacatggcaatgaggccacaacaaacatcacagaaacgacagtcaaattcacatctacctctgtgataacctcagtttatggaaacacaaactcttctgtccagtcacagacctctgtaatcagcacagtgttcaccaccccagccaacgtttcaactccagagacaaccttgaagcctagcctgtcacctggaaatgtttcagacctttcaaccactagcactagccttgcaacatctcccactaaaccctatacatcatcttctcctatcctaagtgacatcaaggcagaaatcaaatgttcaggcatcagagaagtgaaattgactcagggcatctgcctggagcaaaataagacctccagctgtgcggagtttaagaaggacaggggagagggcctggcccgagtgctgtgtggggaggagcaggctgatgctgatgctggggcccaggtatgctccctgctccttgcccagtctgaggtgaggcctcagtgtctactgctggtcttggccaacagaacagaaatttccagcaaactccaacttatgaaaaagcaccaatctgacctgaaaaagctggggatcctagatttcactgagcaagatgttgcaagccaccagagctattcccaaaagaccctgattgcactggtcacctcgggagccctgctggctgtcttgggcatcactggctatttcctgatgaatcgccgcagctggagccccacaggagaaaggctgggcgaagacccttattacacggaaaacggtggaggccagggctatagctcaggacctgggacctcccctgaggctcagggaaaggccagtgtgaaccgaggggctcagaaaaacgggaccggccaggccacctccagaaacggccattcagcaagacaacacgtggtggctgataccgaattgtgactcggctaggtggggcaaggctgggcagtgtccgagagagcacccctctctgcatctgaccacgtgctacccccatgctggaggtgacatctcttacgcccaacccttccccactgcacacacctcagaggctgttcttggggccctacaccttgaggagggggcaggtaaactcctgtcctttacacattcggctccctggagccagactctggtcttctttgggtaaacgtgtgacgggggaaagccaaggtctggagaagctcccaggaacaatcgatggccttgcagcactcacacaggacccccttcccctaccccctcctctctgccgcaatacaggaacccccaggggaaagatgagcttttctaggctacaattttctcccaggaagctttgatttttaccgtttcttccctgtattttctttctctactttgaggaaaccaaagtaaccttttgcacctgctctcttgtaatgatatagccagaaaaacgtgttgccttgaaccacttccctcatctctcctccaagacactgtggacttggtcaccagctcctcccttgttctctaagttccactgagctccatgtgccccctctaccatttgcagagtcctgcacagttttctggctggagcctagaacaggcctcccaagttttaggacaaacagctcagttctagtctctctggggccacacagaaactctttttgggctcctttttctccctctggatcaaagtaggcaggaccatgggaccaggtcttggagctgagcctctcacctgtactcttccgaaaaatcctcttcctctgaggctggatcctagccttatcctctgatctccatggcttcctcctccctcctgccgactcctgggttgagctgttgcctcagtcccccaacagatgcttttctgtctctgcctccctcaccctgagccccttccttgctctgcacccccatatggtcatagcccagatcagctcctaacccttatcaccagctgcctcttctgtgggtgacccaggtccttgtttgctgttgatttctttccagaggggttgagcagggatcctggtttcaatgacggttggaaatagaaatttccagagaagagagtattgggtagatattttttctgaatacaaagtgatgtgtttaaatactgcaattaaagtgatactgaaacac

SEQ ID NO: 2564 - DNA, 1794 bp, Homo sapiens
cccgcgccctccgttcgctccggacaccatggacaagttttggtggcacgcagcctggggactctgcctcgtgccgctgagcctggcgcagatcgatttgaatataacctgccgctttgcaggtgtattccacgtggagaaaaatggtcgctacagcatctctcggacggaggccgctgacctctgcaaggctttcaatagcaccttgcccacaatggcccagatggagaaagctctgagcatcggatttgagacctgcaggtatgggttcatagaagggcatgtggtgattccccggatccaccccaactccatctgtgcagcaaacaacacaggggtgtacatcctcacatacaacacctcccagtatgacacatattgcttcaatgcttcagctccacctgaagaagattgtacatcagtcacagacctgcccaatgcctttgatggaccaattaccataactattgttaaccgtgatggcacccgctatgtccagaaaggagaatacagaacgaatcctgaagacatctaccccagcaaccctactgatgatgacgtgagcagcggctcctccagtgaaaggagcagcacttcaggaggttacatcttttacaccttttctactgtacaccccatcccagacgaagacagtccctggatcaccgacagcacagacagaatccctgctaccagagaccaagacacattccaccccagtggggggtcccataccactcatggatctgaatcagatggacactcacatgggagtcaagaaggtggagcaaacacaacctctggtcctataaggacaccccaaattccagaatggctgatcatcttggcatccctcttggccttggctttgattcttgcagtttgcattgcagtcaacagtcgaagaaggtgtgggcagaagaaaaagctagtgatcaacagtggcaatggagctgtggaggacagaaagccaagtggactcaacggagaggccagcaagtctcaggaaatggtgcatttggtgaacaaggagtcgtcagaaactccagaccagtttatgacagctgatgagacaaggaacctgcagaatgtggacatgaagattggggtgtaacacctacaccattatcttggaaagaaacaaccgttggaaacataaccattacagggagctgggacacttaacagatgcaatgtgctactgattgtttcattgcgaatcttttttagcataaaattttctactctttttgttttttgtgttttgttctttaaagtcaggtccaatttgtaaaaacagcattgctttgtaaattagggcccaattaataatcagcaagaatttgatcgttcagttccacttggaggccttcatcctcgggtgtgctatggatggcttctaacaaaaactacacatatgtattcctgatcgccaacctttcccccaccagctaaggacatttcccagggttaatagggcctggtccctgggaggaaatttgaatgggtccattttgcccttccatagcctaatccctgggcattgctttccactgaggttggggtgtactagttacacatcttcaacagaccccctctagaaatttttcagatgcttctgggagacaccaaagggtgaagctatttatctgtagtaaactatttatctgtgtttttgaaatattaaaccctggatcagtcctttgatcagtataattttttaaagttactttgtcagaggcacaaaagggtttaaactgattcataataaatatctgtacttcttcgatcttc

SEQ ID NO: 2565 - DNA, 561 bp, Homo sapiens
gacagaatccctgctaccacagcctcagctcataccagccatccaatgcaaggaaggacaacaccaagcccagaggacagttcctggactgatttcttcaacccaatctcacaccccatgggacgaggtcatcaagcaggaagaaggatggatatggactccagtcatagtacaacgcttcagcctactgcaaatccaaacacaggtttggtggaagatttggacaggacaggacctctttcaatgacaacgcagcagagtaattctcagagcttctctacatcacatgaaggcttggaagaagataaagaccatccaacaacttctactctgacatcaagcaataggaatgatgtcacaggtggaagaagagacccaaatcattctgaaggctcaactactttactggaaggttatacctctcattacccacacacgaaggaaagcaggaccttcatcccagtgacctcagctaagactgggtcctttggagttactgcagttactgttggagattccaactctaatgtcaatcgttccttatcaggagaccaagacaca

SEQ ID NO: 2566 - DNA, 1342 bp, Homo sapiens
ccagcctctgccaggttcggtccgccatcctcgtcccgtcctccgccggcccctgccccgcgcccagggatcctccagctcctttcgcccgcgccctccgttcgctccggacaccatggacaagttttggtggcacgcagcctggggactctgcctcgtgccgctgagcctggcgcagatcgatttgaatataacctgccgctttgcaggtgtattccacgtggagaaaaatggtcgctacagcatctctcggacggaggccgctgacctctgcaaggctttcaatagcaccttgcccacaatggcccagatggagaaagctctgagcatcggatttgagacctgcaggtatgggttcatagaagggcatgtggtgattccccggatccaccccaactccatctgtgcagcaaacaacacaggggtgtacatcctcacatacaacacctcccagtatgacacatattgcttcaatgcttcagctccacctgaagaagattgtacatcagtcacagacctgcccaatgcctttgatggaccaattaccataactattgttaaccgtgatggcacccgctatgtccagaaaggagaatacagaacgaatcctgaagacatctaccccagcaaccctactgatgatgacgtgagcagcggctcctccagtgaaaggagcagcacttcaggaggttacatcttttacaccttttctactgtacaccccatcccagacgaagacagtccctggatcaccgacagcacagacagaatccctgctaccagagaccaagacacattccaccccagtggggggtcccataccactcatgaatctgaatcagatggacactcacatgggagtcaagaaggtggagcaaacacaacctctggtcctataaggacaccccaaattccagaatggctgatcatcttggcatccctcttggccttggctttgattcttgcagtttgcattgcagtcaacagtcgaagaaggtgtgggcagaagaaaaagctagtgatcaacagtggcaatggagctgtggaggacagaaagccaagtggactcaacggagaggccagcaagtctcaggaaatggtgcatttggtgaacaaggagtcgtcagaaactccagaccagtttatgacagctgatgagacaaggaacctgcagaatgtggacatgaagattggggtgtaacacctacaccattatcttggaaagaaacaaccgttgtaaacataaccattacagggagctgggacacttaacagatgcaatgtgctactgattgtttcattgcgaatcttttttagcataaaattttctactctttttgtt

SEQ ID NO: 2567 - DNA, 1414 bp, Homo sapiens
ctgctcggggaaagtctgttcatccgcagggagcaggccaacaacatcctggcgagggtcacgagggccaattcctttcttgaagagatgaagaaaggacacctcgaaagagagtgcatggaagagacctgctcatacgaagaggcccgcgaggtctttgaggacagcgacaagacgaatgaattctggaataaatacaaagatggcgaccagtgtgagaccagtccttgccagaaccagggcaaatgtaaagacggcctcggggaatacacctgcacctgtttagaaggattcgaaggcaaaaactgtgaattattcacacggaagctctgcagcctggacaacggggactgtgaccagttctgccacgaggaacagaactctgtggtgtgctcctgcgcccgcgggtacaccctggctgacaacggcaaggcctgcattcccacagggccctacccctgtgggaaacagaccctggaacgcaggaagaggtcagtggcccaggccaccagcagcagcggggaggcccctgacagcatcacatggaagccatatgatgcagccgacctggaccccaccgagaaccccttcgacctgcttgacttcaaccagacgcagcctgagaggggcgacaacaacctcaccaggatcgtgggaggccaggaatgcaaggacggggagtgtccctggcaggccctgctcatcaatgaggaaaacgagggtttctgtggtggaaccattctgagcgagttctacatcctaacggcagcccactgtctctaccaagccaagagattcgaaggggaccggaacacggagcaggaggagggcggtgaggcggtgcacgaggtggaggtggtcatcaagcacaaccggttcacaaaggagacctatgacttcgacatcgccgtgctccggctcaagacccccatcaccttccgcatgaacgtggcgcctgcctgcctccccgagcgtgactgggccgagtccacgctgatgacgcagaagacggggattgtgagcggcttcgggcgcacccacgagaagggccggcagtccaccaggctcaagatgctggaggtgccctacgtggaccgcaacagctgcaagctgtccagcagcttcatcatcacccagaacatgttctgtgccggctacgacaccaagcaggaggatgcctgccagggggacagcgggggcccgcacgtcacccgcttcaaggacacctacttcgtgacaggcatcgtcagctggggagagggctgtgcccgtaaggggaagtacgggatctacaccaaggtcaccgccttcctcaagtggatcgacaggtccatgaaaaccaggggcttgcccaaggccaagagccatgccccggaggtcataacgtcctctccattaaagtgagatcccactc

SEQ ID NO: 2568 - DNA, 1566 bp, Homo sapiens
gcggcggcagcggaggcggcggctccagccggcgcggcgcgaggctcggcggtgggatccggcgggcggtgctagctccgcgctccctgcctcgctcgctgccgggggcggtcggaaggcgcggcgcgaagcccgggtggcccgagggcgcgactctagccttgtcacctcatcttgcccccttggttttggaagtcctgaagagttggtctggaggaggaggaggacattgatgtgcttggtgtgtggccagtggtgaagagatggctgctcctgtcccgtgggcctgctgtgctgtgcttgccgccgccgccgcagttgtctacgcccagagacacagtccacaggaggcaccccatgtgcagtacgagcgcctgggctctgacgtgacactgccatgtgggacagcaaactgggatgctgcggtgacgtggcgggtaaatgggacagacctggcccctgacctgctcaacggctctcagctggtgctccatggcctggaactgggccacagtggcctctacgcctgcttccaccgtgactcctggcacctgcgccaccaagtcctgctgcatgtgggcttgccgccgcgggagcctgtgctcagctgccgctccaacacttaccccaagggcttctactgcagctggcatctgcccacccccacctacattcccaacaccttcaatgtgactgtgctgcatggctccaaaattatggtctgtgagaaggacccagccctcaagaaccgctgccacattcgctacatgcacctgttctccaccatcaagtacaaggtctccataagtgtcagcaatgccctgggccacaatgccacagctatcacctttgacgagttcaccattgtgaagcctgatcctccagaaaatgtggtagcccggccagtgcccagcaaccctcgccggctggaggtgacgtggcagaccccctcgacctggcctgaccctgagtcttttcctctcaagttctttctgcgctaccgacccctcatcctggaccagtggcagcatgtggagctgtccgacggcacagcacacaccatcacagatgcctacgccgggaaggagtacattatccaggtggcagccaaggacaatgagattgggacatggagtgactggagcgtagccgcccacgctacgccctggactgaggaaccgcgacacctcaccacggaggcccaggctgcggagaccacgaccagcaccaccagctccctggcacccccacctaccacgaagatctgtgaccctggggagctgggcagcggcgggggaccctcggcacccttcttggtcagcgtccccatcactctggccctggctgccgctgccgccactgccagcagtctcttgatctgagcccggcaccccatgaggacatgcagagcacctgcagaggagcaggaggccggagctgagcctgcagaccccggtttctattttgcacacgggcaggaggaccttttgcattctcttcagacacaatttgtggagaccccggcgggcccgggcctgccgccccccagccctgccgcaccaagct

SEQ ID NO: 2569 - DNA, 3045 bp, Homo sapiens
cagaccatggaactcagcgtcctcctcttccttgcactcctcacaggactcttgctactcctggttcagcgccaccctaacacccatgaccgcctcccaccagggccccgccctctgccccttttgggaaaccttctgcagatggatagaagaggcctactcaaatcctttctgaggttccgagagaaatatggggacgtcttcacggtacacctgggaccgaggcccgtggtcatgctgtgtggagtagaggccatacgggaggcccttgtggacaaggctgaggccttctctggccggggaaaaatcgccatggtcgacccattcttccggggatatggtgtgatctttgccaatggaaaccgctggaaggtgcttcggcgattctctgtgaccactatgagggacttcgggatgggaaagcggagtgtggaggagcggattcaggaggaggctcagtgtctgatagaggagcttcggaaatccaagggggccctcatggaccccaccttcctcttccagtccattaccgccaacatcatctgctccatcgtctttggaaaacgattccactaccaagatcaagagttcctgaagatgctgaacttgttctaccagactttttcactcatcagctctgtattcggccagctgtttgagctcttctctggcttcttgaaatactttcctggggcacacaggcaagtttacaaaaacctgcaggaaatcaatgcttacattggccacagtgtggagaagcaccgtgaaaccctggaccccagcgcccccaaggacctcatcgacacctacctgctccacatggaaaaagagaaatccaacgcacacagtgaattcagccaccagaacctcaacctcaacacgctctcgctcttctttgctggcactgagaccaccagcaccactctccgctacggcttcctgctcatgctcaaataccctcatgttgcagagagagtctacagggagattgaacaggtgattggcccacatcgccctccagagcttcatgaccgagccaaaatgccatacacagaggcagtcatctatgagattcagagattttccgaccttctccccatgggtgtgccccacattgtcacccaacacaccagcttccgagggtacatcatccccaaggacacagaagtatttctcatcctgagcactgctctccatgacccacactactttgaaaaaccagacgccttcaatcctgaccactttctggatgccaatggggcactgaaaaagactgaagcttttatccccttctccttagggaagcggatttgtcttggtgaaggcatcgcccgtgcggaattgttcctcttcttcaccaccatcctccagaacttctccatggccagccccgtggccccagaagacatcgatctgacaccccaggagtgtggtgtgggcaaaatacccccaacataccagatccgcttcctgccccgctgaaggggctgagggaagggggtcaaaggattccagggtcattcagtgtccccgcctctgtagacaatggctctgactccccgcaacttcctgcctctgagagacctgctacaagccagcttccttcccctccatggcaccagttgtctgaggtcacattgcaagtgagtgcaggagtgagattatcgaaaattataatatacaaaatcatatatatatatatgttcttgttttttgagacagagtctcacactgttgcccaggctggagtgcagtggcgtgatcttggctcactgcaacctccacccccggggatcaagcaactctcctgcctcagcctccctagaggctgggattacaggcatgcactaccacgcttggctaatttttgtatttttagtagagatggggtttcactgtgtaggccaggctggtctcgaactcctgaactcaagtgattcacccaccttagcctcccaaagtgctgggattacaggcgtgagtcaccgtgcccagccatgtatatatataattttaaaaattaagctgaaattcacataacataaaattagccgttttaaagtgtaaaatttagtggcgtgtggttcattcacaaagctgtacaaccaccaccatctagttccaaacattttctttttttctgagatggagtctcactctgtcacccaggttcgagttcagtggtgccatctctgtccactgcaacctccacatcctgggttcaagtgattctcctgcctcagcctctggaggagctggtatcacaggcgtcccccaccacgcctggctaaattttgtatttttaggtggtcttgaactcctgatgtcaggtgattctcctagctccaaatgttttcattatctctcccccaacaaaacccatacctatcaagctgtcactccccataccccattctctttttcatctcggcccctgtcaatctggtttttgtcactatggacttaccaattctgaatatttcccataaacagaatcatacaatatttgatttttttttttttttgaaactaagccttgctctgtctcccaggctggagtgctatggtgcaatttttgttcactgcaacctctgccttccaagatcaagagattctccagtctcagctcccaagtagctgggattacaggcatgtactaccatgcctggctaattttcttgtagttttagtagggacatgttggccaggctggtggtgagctcctggcctcaggtgatccacccacctcagtgttcctaagtgctgatattacaggcataatatgtgatcttttgtgtctggttgctttcatgttgaatgctatttttgaggttcgtgcctgttgtagaccacagtcacacactgctgtagtcttcccgagtcctcattcccagctgcctcttcctactgcttccgtctatcaaaaagcccccttggcccaggttccctgagctgtgggattctgcactggtgctttggattccctgatatgttccttcaaatctgctgagaattaaataaacatctctaaagcctgacctcccc

SEQ ID NO: 2570 - DNA, 2375 bp, Homo sapiens
atgaagacaccgtggagggttctcctgggactgctgggtgctgctgcgcttgtcaccatcatcaccgtgcccgtggttctgctgaacaaaggcacagatgatgctacagctgacagtcgcaaaacttacactctaactgattacttaaaaaatacttatagactgaagttatactccttaagatggatttcagatcatgaatatctctacaaacaagaaaataatatcttggtattcaatgctgaatatggaaacagctcagttttcttggagaacagtacatttgatgagtttggacattctatcaatgattattcaatatctcctgatgggcagtttattctcttagaatacaactacgtgaagcaatggaggcattcctacacagcttcatatgacatttatgatttaaataaaaggcagctgattacagaagagaggattccaaacaacacacagtgggtcacatggtcaccagtgggtcataaattggcatatgtttggaacaatgacatttatgttaaaattgaaccaaatttaccaagttacagaatcacatggacggggaaagaagatataatatataatggaataactgactgggtttatgaagaggaagtcttcagtgcctactctgctctgtggtggtctccaaacggcacttttttagcatatgcccaatttaacgacacagaagtcccacttattgaatactccttctactctgatgagtcactgcagtacccaaagactgtacgggttccatatccaaaggcaggagctgtgaatccaactgtaaagttctttgttgtaaatacagactctctcagctcagtcaccaatgcaacttccatacaaatcactgctcctgcttctatgttgataggggatcactacttgtgtgatgtgacatgggcaacacaagaaagaatttctttgcagtggctcaggaggattcagaactattcggtcatggatatttgtgactatgatgaatccagtggaagatggaactgcttagtggcacggcaacacattgaaatgagtactactggctgggttggaagatttaggccttcagaacctcattttacccttgatggtaatagcttctacaagatcatcagcaatgaagaaggttacagacacatttgctatttccaaatagataaaaaagactgcacatttattacaaaaggcacctgggaagtcatcgggatagaagctctaaccagtgattatctatactacattagtaatgaatataaaggaatgccaggaggaaggaatctttataaaatccaacttagtgactatacaaaagtgacatgcctcagttgtgagctgaatccggaaaggtgtcagtactattctgtgtcattcagtaaagaggcgaagtattatcagctgagatgttccggtcctggtctgcccctctatactctacacagcagcgtgaatgataaagggctgagagtcctggaagacaattcagctttggataaaatgctgcagaatgtccagatgccctccaaaaaattggacttcattattttgaatgaaacaaaattttggtatcagatgatcttgcctcctcattttgataaatccaagaaatatcctctactattagatgtgtatgcaggcccatgtagtcaaaaagcagacattgtcttcagactgaactgggccacttaccttgcaagcacagaaaacattatagtagctagctttgatggcagaggaagtggttaccaaggagataagatcatgcatgcaatcaacagaagactgggaacatttgaagttgaagatcaaattgaagcagccagacaattttcaaaaatgggatttgtggacaacaaacgaattgcaatttggggctggtcatatggagggtacgtaacctcaatggtcctgggatcgggaagtggcgtgttcaagtgtggaatagccgtggcgcctgtatcccggtgggagtactatgagtcagtgtacacagaacgttacatgggtctcccaactccagaagacaaccttgaccattacagaaattcaacagtcatgagcagagctgaaaattttaaacaagttgagtacctccttattcatggaacagcagatgataacgttcactttcagcagtcagctcagatctccaaagccctggtcgatgttggagtggatttccaggcaatgtggtatactgatgaagaccatggaatagctagcagcacagcacaccaacatatatatacccacatgagccacttcataaaacaatgtttctctttaccttagcacctcaaaatactatgccatttaaagcttattaaaactcatttttgttttcattatctcaaaaaaaaaaaaaa

SEQ ID NO: 2571 - DNA, 3110 bp, Homo sapiens
gccgccgccgccatccgccgccgcagccagcttccgccgccgcaggaccggcccctgccccagcctccgcagccgcggcgcgtccacgcccgcccgcgcccagggcgagtcggggtcgccgcctgcacgcttctcagtgttccccgcgccccgcatgtaacccggccaggcccccgcaactgtgtcccctgcagctccagccccgggctgcacccccccgccccgacaccagctctccagcctgctcgtccaggatggccgcggccaaggccgagatgcagctgatgtccccgctgcagatctctgacccgttcggatcctttcctcactcgcccaccatggacaactaccctaagctggaggagatgatgctgctgagcaacggggctccccagttcctcggcgccgccggggccccagagggcagcggcagcaacagcagcagcagcagcagcgggggcggtggaggcggcgggggcggcagcaacagcagcagcagcagcagcaccttcaaccctcaggcggacacgggcgagcagccctacgagcacctgaccgcagagtcttttcctgacatctctctgaacaacgagaaggtgctggtggagaccagttaccccagccaaaccactcgactgccccccatcacctatactggccgcttttccctggagcctgcacccaacagtggcaacaccttgtggcccgagcccctcttcagcttggtcagtggcctagtgagcatgaccaacccaccggcctcctcgtcctcagcaccatctccagcggcctcctccgcctccgcctcccagagcccacccctgagctgcgcagtgccatccaacgacagcagtcccatttactcagcggcacccaccttccccacgccgaacactgacattttccctgagccacaaagccaggccttcccgggctcggcagggacagcgctccagtacccgcctcctgcctaccctgccgccaagggtggcttccaggttcccatgatccccgactacctgtttccacagcagcagggggatctgggcctgggcaccccagaccagaagcccttccagggcctggagagccgcacccagcagccttcgctaacccctctgtctactattaaggcctttgccactcagtcgggctcccaggacctgaaggccctcaataccagctaccagtcccagctcatcaaacccagccgcatgcgcaagtaccccaaccggcccagcaagacgcccccccacgaacgcccttacgcttgcccagtggagtcctgtgatcgccgcttctcccgctccgacgagctcacccgccacatccgcatccacacaggccagaagcccttccagtgccgcatctgcatgcgcaacttcagccgcagcgaccacctcaccacccacatccgcacccacacaggcgaaaagcccttcgcctgcgacatctgtggaagaaagtttgccaggagcgatgaacgcaagaggcataccaagatccacttgcggcagaaggacaagaaagcagacaaaagtgttgtggcctcttcggccacctcctctctctcttcctacccgtccccggttgctacctcttacccgtccccggttactacctcttatccatccccggccaccacctcatacccatcccctgtgcccacctccttctcctctcccggctcctcgacctacccatcccctgtgcacagtggcttcccctccccgtcggtggccaccacgtactcctctgttccccctgctttcccggcccaggtcagcagcttcccttcctcagctgtcaccaactccttcagcgcctccacagggctttcggacatgacagcaaccttttctcccaggacaattgaaatttgctaaagggaaaggggaaagaaagggaaaagggagaaaaagaaacacaagagacttaaaggacaggaggaggagatggccataggagaggagggttcctcttaggtcagatggaggttctcagagccaagtcctccctctctactggagtggaaggtctattggccaacaatcctttctgcccacttccccttccccaattactattccctttgacttcagctgcctgaaacagccatgtccaagttcttcacctctatccaaagaacttgatttgcatggattttggataaatcatttcagtatcatctccatcatatgcctgaccccttgctcccttcaatgctagaaaatcgagttggcaaaatggggtttgggcccctcagagccctgccctgcacccttgtacagtgtctgtgccatggatttcgtttttcttggggtactcttgatgtgaagataatttgcatattctattgtattatttggagttaggtcctcacttgggggaaaaaaaaaaaaaagaaaagccaagcaaaccaatggtgatcctctattttgtgatgatgctgtgacaataagtttgaacccttttttttgaaacagcagtcccagtattctcagagcatgtgtcagagtgttgttccgttaacctttttgtaaatactgcttgaccgtactctcacatgtggcaaaatatggtttggtttttctttttttttttttttgaaagtgttttttcttcgtccttttggtttaaaaagtttcacgtcttggtgccttttgtgtgatgcgccttgctgatggcttgacatgtgcaattgtgagggacatgctcacctctagccttaaggggggcagggagtgatgatttgggggaggctttgggagcaaaataaggaagagggctgagctgagcttcggttctccagaatgtaagaaaacaaaatctaaaacaaaatctgaactctcaaaagtctatttttttaactgaaaatgtaaatttataaatatattcaggagttggaatgttgtagttacctactgagtaggcggcgatttttgtatgttatgaacatgcagttcattattttgtggttctattttactttgtacttgtgtttgcttaaacaaagtgactgtttggcttataaacacattgaatgcgctttattgcccatgggatatgtggtgtatatccttccaaaaaattaaaacgaaaataaagta

SEQ ID NO: 2572 - DNA, 3188 bp, Homo sapiens
cgggcagtgacagccggcgcggatcgcgcgtccacggaggagaatcagcttagagaactatcaacacaggacaatgcaagcccatgagctgttccggtattttcgaatgccagagctggttgacttccgacagtgcgtgactcttccgaccaacacgcttatgggcttcggagctttttccagacgactcaccaccttctggcggccacgccacccaaaacccctgaagccgccatggcacctctccatgcagtcagtggaagtggcgggtagtggtggtgcacgaagatccgcactacttgacagcgacgagcccttggtgtatttctatgatgatgttacaacattatacgaaggtttccagagagggatacaggtgtcaaataatggcccttgtttaggctctcggaaaccagaccaaccctatgaatggctttcatataaacaggttgcagaattgtcggagtgcataggctcagcactgatccagaagggcttcaagactgccccagatcagttcattggcatctttgctcaaaatagacctgagtgggtgattattgaacaaggatgctttgcttattcgatggtgatcgttccactttatgatacccttggaaatgaagccatcacgtacatagtcaacaaagctgaactctctctggtttttgttgacaagccagagaaggccaaactcttattagagggtgtagaaaataagttaataccaggccttaaaatcatagttgtcatggactcgtacggcagtgaactggtggaacgaggccagaggtgtggggtggaagtcaccagcatgaaggcgatggaggacctgggaagagccaacagacggaagcccaagcctccagcacctgaagatcttgcagtaatttgtttcacaagtggaactacaggcaaccccaaaggagcaatggtcactcaccgaaacatagtgagcgattgttcagcttttgtgaaagcaacagagaatacagtcaatccttgcccagatgatactttgatatctttcttgcctctcgcccatatgtttgagagagttgtagagtgtgtaatgctgtgtcatggagctaaaatcggatttttccaaggagatatcaggctgctcatggatgacctcaaggtgcttcaacccactgtcttccccgtggttccaagactgctgaaccggatgtttgaccgaattttcggacaagcaaacaccaccgtgaagcgatggctcttggactttgcctccaagaggaaagaagcagacgttcgcagcggcatcatcagaaacaacagcctgtgggaccggctgatcttccacaaagtacagtcgagcctgggcggaagagtccggctgatggtgacaggagccgccccggtgtctgccactgtgctgacgttcctcagagcagccctgggctgtcagttttatgaaggatacggacagacagagtgcactgccgggtgctgcctaaccatgcctggagactggaccacaggccatgttggggccccgatgccgtgcaatttgataaaacttggttggcagttggaagaaatgaattacatggcgtccgagggcgagggcgaggtgtgtgtgaaagggccaaatgtatttcagggctacttgaaggacccagcgaaaacagcagaagctttggacaaagacggctggttacacacaggggacatcggaaaatggttaccaaatggcaccttgaaaattatcgaccggaaaaagcacatatttaagctggcacaaggagaatacatagcccctgaaaagattgaaaatatctacatgcgaagtgagcctgttgctcaggtgtttgtccacggagaaagcctgcaggcatttctcattgcaattgtggtaccagatgttgagacattatgttcctgggcccaaaagagaggatttgaagggtcgtttgaggaactgtgcagaaataaggatgtcaaaaaagctatcctcgaagatatggtgagacttgggaaggattctggtctgaaaccatttgaacaggtcaaaggcatcacattgcaccctgaattattttctatcgacaatggccttctgactccaacaatgaaggcgaaaaggccagagctgcggaactatttcaggtcgcagatagatgacctctattccatcatcaaggtttagtgtgaagaagaaagctcagaggaaatggcacagttccacaatctcttctcctgctgatggccttcatgttgttaattttgaatacagcaagtgtagggaaggaagcgttctgtgtttgacttgtccattcggggttcttctcataggaatgctagaggaaacagaacactgccttacagtcacctcagtgttcagaccatgtttatggtaatacacacttccaaaagtagccttaaaaattgtaaagggatactataaatgtgctaattatttgagacttcctcagtttaaaaagtgggttttaaatcttctgtctccctgtttttctaatcaaggggttaggactttgctatctctgagatgtctgctacttcgtcgaaattctgcagctgtctgctgctctaaagagtacagtgctctagagggaagtgttccctttaaaaataagaacaactgtcctggctggagatctcacaagcggaccagagatctttttaaatccctgctactgtcccttctcacaggcattcacagaacccttctgattcgaagggttacgaaactcatgttcttctccagtcccctgtggtttctgttggagcataaggtttccagtaagcgggagggcagatccaactcagaaccatgcagataaggagcctctggcaaatgggtgctgcatcagaacgcgtggattctctttcatggcagatgctcttggactcggttctccaggcctgattccccgactccatcctttttcagggttatttaaaaatctgccttagattctatagtgaagacaagcatttcaagaaagagttacctggatcagccatgctcagctgtgacgcctgataactgtctactttatcttcactgaaccactcactctgtgtaaaggccaacggatttttaatgtggttttcatatcaaaagatcatgttgggattaacttgcctttttccccaaaaaataaactctcaggcaaggcatttcttttaaagctattccg

SEQ ID NO: 2573 - DNA, 1507 bp, Homo sapiens
atggggcgcccactgcacctcgtcctgctcagtgcctccctggctggcctcctgctgctcggggaaagtctgttcatccgcagggagcaggccaacaacatcctggcgagggtcacgagggccaattcctttcttgaagagatgaagaaaggacacctcgaaagagagtgcatggaagagacctgctcatacgaagaggcccgcgaggtctttgaggacagcgacaagacgaatgaattctggaataaatacaaagatggcgaccagtgtgagaccagtccttgccagaaccagggcaaatgtaaagacggcctcggggaatacacctgcacctgtttagaaggattcgaaggcaaaaactgtgaattattcacacggaagctctgcagcctggacaacggggactgtgaccagttctgccacgaggaacagaactctgtggtgtgctcctgcgcccgcgggtacaccctggctgacaacggcaaggcctgcattcccacagggccctacccctgtgggaaacagaccctggaacgcaggaagaggtcagtggcccaggccaccagcagcagcggggaggcccctgacagcatcacatggaagccatatgatgcagccgacctggaccccaccgagaaccccttcgacctgcttgacttcaaccagacgcagcctgagaggggcgacaacaacctcaccaggatcgtgggaggccaggaatgcaaggacggggagtgtccctggcaggccctgctcatcaatgaggaaaacgagggtttctgtggtggaactattctgagcgagttctacatcctaacggcagcccactgtctctaccaagccaagagattcaaggtgagggtaggggaccggaacacggagcaggaggagggcggtgaggcggtgcacgaggtggaggtggtcatcaagcacaaccggttcacaaaggagacctatgacttcgacatcgccgtgctccggctcaagacccccatcaccttccgcatgaacgtggcgcctgcctgcctccccgagcgtgactgggccgagtccacgctgatgacgcagaagacggggattgtgagcggcttcgggcgcacccacgagaagggccggcagtccaccaggctcaagatgctggaggtgccctacgtggaccgcaacagctgcaagctgtccagcagcttcatcatcacccagaacatgttctgtgccggctacgacaccaagcaggaggatgcctgccagggggacagcgggggcccgcacgtcacccgcttcaaggacacctacttcgtgacaggcatcgtcagctggggagagggctgtgcccgtaaggggaagtacgggatctacaccaaggtcaccgccttcctcaagtggatcgacaggtccatgaaaaccaggggcttgcccaaggccaagagccatgccccggaggtcataacgtcctctccattaaagtgagatcccactcaaaaaaaaaaaaaaaaaaaaaaaaaaaaaa

SEQ ID NO: 2574 - DNA, 4330 bp, Homo sapiens
tctaggagccagccccacccttagaaaagatgttttccatgaggatcgtctgcctggtcctaagtgtggtgggcacagcatggactgcagatagtggtgaaggtgactttctagctgaaggaggaggcgtgcgtggcccaagggttgtggaaagacatcaatctgcctgcaaagattcagactggcccttctgctctgatgaagactggaactacaaatgcccttctggctgcaggatgaaagggttgattgatgaagtcaatcaagattttacaaacagaataaataagctcaaaaattcactatttgaatatcagaagaacaataaggattctcattcgttgaccactaatataatggaaattttgagaggcgatttttcctcagccaataaccgtgataatacctacaaccgagtgtcagaggatctgagaagcagaattgaagtcctgaagcgcaaagtcatagaaaaagtacagcatatccagcttctgcagaaaaatgttagagctcagttggttgatatgaaacgactggaggtggacattgatattaagatccgatcttgtcgagggtcatgcagtagggctttagctcgtgaagtagatctgaaggactatgaagatcagcagaagcaacttgaacaggtcattgccaaagacttacttccctctagagataggcaacacttaccactgataaaaatgaaaccagttccagacttggttcccggaaattttaagagccagcttcagaaggtacccccagagtggaaggcattaacagacatgccgcagatgagaatggagttagagagacctggtggaaatgagattactcgaggaggctccacctcttatggaaccggatcagagacggaaagccccaggaaccctagcagtgctggaagctggaactctgggagctctggacctggaagtactggaaaccgaaaccctgggagctctgggactggagggactgcaacctggaaacctgggagctctggacctggaagtactggaagctggaactctgggagctctggaactggaagtactggaaaccaaaaccctgggagccctagacctggtagtaccggaacctggaatcctggcagctctgaacgcggaagtgctgggcactggacctctgagagctctgtatctggtagtactggacaatggcactctgaatctggaagttttaggccagatagcccaggctctgggaacgcgaggcctaacaacccagactggggcacatttgaagaggtgtcaggaaatgtaagtccagggacaaggagagagtaccacacagaaaaactggtcacttctaaaggagataaagagctcaggactggtaaagagaaggtcacctctggtagcacaaccaccacgcgtcgttcatgctctaaaaccgttactaagactgttattggtcctgatggtcacaaagaagttaccaaagaagtggtgacctccgaagatggttctgactgtcccgaggcaatggatttaggcacattgtctggcataggtactctggatgggttccgccataggcaccctgatgaagctgccttcttcgacactgcctcaactggaaaaacattcccaggtttcttctcacctatgttaggagagtttgtcagtgagactgagtctaggggctcagaatctggcatcttcacaaatacaaaggaatccagttctcatcaccctgggatagctgaattcccttcccgtggtaaatcttcaagttacagcaaacaatttactagtagcacgagttacaacagaggagactccacatttgaaagcaagagctataaaatggcagatgaggccggaagtgaagccgatcatgaaggaacacatagcaccaagagaggccatgctaaatctcgccctgtcagaggtatccacacttctcctttggggaagccttccctgtccccctagactaagttaaatatttctgcacagtgttcccatggccccttgcatttccttcttaactctctgttacacgtcattgaaactacacttttttggtctgtttttgtgctagactgtaagttccttgggggcagggcctttgtctgtctcatctctgtattcccaaatgcctaacagtacagagccatgactcaataaatacatgttaaatggatgaatgaattcctctgaaactctatttgagcttatttagtcaaattctttcactattcaaagtgtgtgctattagaattgtcacccaactgattaatcacatttttagtatgtgtctcagttgacatttaggtcaggctaaatacaagttgtgttagtattaagtgatgcttagctacctgtactggttacttgctattagtttgtgcaagtaaaattccaaatacatttgaggaaaatcccctttgcaatttgtaggtataaataaccgcttatttgcataagttctatcccactgtaagtgcatcctttccctatggagggaaggaaaggaggaagaaagaaaggaagggaaagaaacagtatttgccttatttaatctgagccgtgcctatctttgtaaagttaaatgagaataacttcttccaaccagcttaattttttttttagactgtgatgatgtcctccaaacacatccttcaggtacccaaagtggcattttcaatatcaagctaccgggatccagtaagattttttctgtttattgcgatcaagagaccagtttgggaggatggcttttgatccagcaaagaatggatggatcactgaattttaaccggacctggcaagactacaagagaggtttcggcagcctgaatgacgagggggaaggagaattctggctaggcaatgactacctccacttactaacccaaaggggctctgttcttagggttgaattagaggactgggctgggaatgaagcttatgcagaatatcacttccgggtaggctctgaggctgaaggctatgccctccaagtctcctcctatgaaggcactgcgggtgatgctctgattgagggttccgtagaggaaggggcagagtacacctctcacaacaacatgcagttcagcacctttgacagggatgcagaccagtgggaagagaactgtgcagaagtctatgggggaggctggtggtataataactgccaagcagccaatctcaatggaatctactaccctgggggctcctatgacccaaggaataacagtccttatgagattgagaatggagtggtctgggtttcctttagaggggcagattattccctcagggctgttcgcatgaaaattaggccccttgtgacccaataggctgaagaagtgggaatgggagcactctgtcttctttgctagagaagtggagagaaaatacaaaaggtaaagcagttgagattctctacaacctaaaaaattcctaggtgctattttcttatcctttgtactgtagctaaatgtacctgagacatattagtctttgaaaaataaagttatgtaaggttttttttatctttaaatagctctgtgggttttaacatttttgtaaagatataccaagggccattcagtacatcaggaaagtggcagacagaagcttctctctgcaaccttgaagactattggtttgagaacttctcttcccataccacccaaaatcataatgccattggaaagcaaaaagttgttttatccatttgatttgaattgttttaagccaatattttaaggtaaaactcactgaatctaaccatagctgacctttgtagtagaatttacaacttataattacaatgcacaatttataattacaatatgtatttatgtcttttgctatggagcaaatccaggaaggcaagagaaacattctttcctaaatataaatgaaaatctatcctttaaactcttccactagacgttgtaatgcacacttatttttttcccaaggagtaaccaatttctttctaaaacacatttaaaattttaaaactatttatgaatattaaaaaaagacataattcacacattaataaacaatctcccaagtattgatttaacttcatttttctaataatcataaactatattctgtgacatgctaattattattaaatgtaagtcgttagttcgaaagcctctcactaagtatgatctatgctatattcaaaattcaacccatttactttggtcaatatttgatctaagttgcatctttaatcctggtggtcttgccttctgatttttaatttgtatccttttctattaagatatatttgtcattttctcttgaatatgtattaaaatatcccaagc

SEQ ID NO: 2575 - DNA, 1231 bp, Homo sapiens
gaattccagaaaagaggtggagagggggggaataagaaagagagagaaggaaaggagagaaggcaggaagaaggcaagggacgagacaaccatgctgtgctgtatgagaagaaccaaacaggttgaaaaaaatgatgacgaccaaaagattgaacaagatggtatcaaaccagaagataaagctcataaggccgcaaccaaaattcaggctagcttccgtggacacataacaaggaaaaagctcaaaggagagaagaaggatgatgtccaagctgctgaggctgaagctaataagaaggatgaagcccctgttgccgatggggtggagaagaagggagaaggcaccactactgccgaagcagccccagccactggctccaagcctgatgagcccggcaaagcaggagaaactccttccgaggagaagaagggggagggtgatgctgccacagagcaggcagccccccaggctcctgcatcctcagaggagaaggccggctcagctgagacagaaagtgccactaaagcttccactgataactcgccgtcctccaaggctgaagatgccccagccaaggaggagcctaaacaagccgatgtgcctgctgctgtcactgctgctgctgccaccacccctgccgcagaggatgctgctgccaaggcaacagcccagcctccaacggagactggggagagcagccaagctgaagagaacatagaagctgtagatgaaaccaaacctaaggaaagtgcccggcaggacgagggtaaagaagaggaacctgaggctgaccaagaacatgcctgaactctaagaaatggctttccacatccccaccctcccctctcctgagcctgtctctccctaccctcttctcagctccactctgaagtcccttcctgtcctgctcacgtctgtgagtctgtcctttcccacccactagccctctttctctctgtgtggcaaacatttaaaaaaaaaaaaaaaaagcaggaaagatcccaagtcaaacagtgtggcttaaacattttttgtttcttggtgttgttatggcaagtttttggtaatgatgattcaatcattttgggaaattcttgcactgtatccaagttatttgatctggtgcgtgtggccctgtgggagtccactttcctctctctctctctctctgttccaagtgtgtgtgcaatgttccgttcatctgaggagtccaaaatattgagtgaattc

SEQ ID NO: 2576 - DNA, 6757 bp, Homo sapiens
cggccccagaaaacccgagcgagtagggggcggcgcgcaggagggaggagaactgggggcgcgggaggctggtgggtgtcgggggtggagatgtagaagatgtgacgccgcggcccggcgggtgccagattagcggacggctgcccgcggttgcaacgggatcccgggcgctgcagcttgggaggcggctctccccaggcggcgtccgcggagacacccatccgtgaaccccaggtcccgggccgccggctcgccgcgcaccaggggccggcggacagaagagcggccgagcggctcgaggctgggggaccgcgggcgcggccgcgcgctgccgggcgggaggctggggggccggggccggggccgtgccccggagcgggtcggaggccggggccggggccgggggacggcggctccccgcgcggctccagcggctcggggatcccggccgggccccgcagggaccatggcagccgggagcatcaccacgctgcccgccttgcccgaggatggcggcagcggcgccttcccgcccggccacttcaaggaccccaagcggctgtactgcaaaaacgggggcttcttcctgcgcatccaccccgacggccgagttgacggggtccgggagaagagcgaccctcacatcaagctacaacttcaagcagaagagagaggagttgtgtctatcaaaggagtgtgtgctaaccgttacctggctatgaaggaagatggaagattactggcttctaaatgtgttacggatgagtgtttcttttttgaacgattggaatctaataactacaatacttaccggtcaaggaaatacaccagttggtatgtggcactgaaacgaactgggcagtataaacttggatccaaaacaggacctgggcagaaagctatactttttcttccaatgtctgctaagagctgattttaatggccacatctaatctcatttcacatgaaagaagaagtatattttagaaatttgttaatgagagtaaaagaaaataaatgtgtatagctcagtttggataattggtcaaacaattttttatccagtagtaaaatatgtaaccattgtcccagtaaagaaaaataacaaaagttgtaaaatgtatattctcccttttatattgcatctgctgttacccagtgaagcttacctagagcaatgatctttttcacgcatttgctttattcgaaaagaggcttttaaaatgtgcatgtttagaaacaaaatttcttcatggaaatcatatacattagaaaatcacagtcagatgtttaatcaatccaaaatgtccactatttcttatgtcattcgttagtctacatgtttctaaacatataaatgtgaatttaatcaattcctttcatagttttataattctctggcagttccttatgatagagtttataaaacagtcctgtgtaaactgctggaagttcttccacagtcaggtcaattttgtcaaacccttctctgtacccatacagcagcagcctagcaactctgctggtgatgggagttgtattttcagtcttcgccaggtcattgagatccatccactcacatcttaagcattcttcctggcaaaaatttatggtgaatgaatatggctttaggcggcagatgatatacatatctgacttcccaaaagctccaggatttgtgtgctgttgccgaatactcaggacggacctgaattctgattttataccagtctcttcaaaaacttctcgaaccgctgtgtctcctacgtaaaaaaagagatgtacaaatcaataataattacacttttagaaactgtatcatcaaagattttcagttaaagtagcattatgtaaaggctcaaaacattaccctaacaaagtaaagttttcaatacaaattctttgccttgtggatatcaagaaatcccaaaatattttcttaccactgtaaattcaagaagcttttgaaatgctgaatatttctttggctgctacttggaggcttatctacctgtacatttttggggtcagctctttttaacttcttgctgctctttttcccaaaaggtaaaaatatagattgaaaagttaaaacattttgcatggctgcagttcctttgtttcttgagataagattccaaagaacttagattcatttcttcaacaccgaaatgctggaggtgtttgatcagttttcaagaaacttggaatataaataattttataattcaacaaaggttttcacattttataaggttgatttttcaattaaatgcaaatttgtgtggcaggatttttattgccattaacatatttttgtggctgctttttctacacatccagatggtccctctaactgggctttctctaattttgtgatgttctgtcattgtctcccaaagtatttaggagaagccctttaaaaagctgccttcctctaccactttgctggaaagcttcacaattgtcacagacaaagatttttgttccaatactcgttttgcctctatttttcttgtttgtcaaatagtaaatgatatttgcccttgcagtaattctactggtgaaaaacatgcaaagaagaggaagtcacagaaacatgtctcaattcccatgtgctgtgactgtagactgtcttaccatagactgtcttacccatcccctggatatgctcttgttttttccctctaatagctatggaaagatgcatagaaagagtataatgttttaaaacataaggcattcatctgccatttttcaattacatgctgacttcccttacaattgagatttgcccataggttaaacatggttagaaacaactgaaagcataaaagaaaaatctaggccgggtgcagtggctcatgcctatattccctgcactttgggaggccaaagcaggaggatcgcttgagcccaggagttcaagaccaacctggtgaaaccccgtctctacaaaaaaacacaaaaaatagccaggcatggtggcgtgtacatgtggtctcagatacttgggaggctgaggtgggagggttgatcacttgaggctgagaggtcaaggttgcagtgagccataatcgtgccactgcagtccagcctaggcaacagagtgagactttgtctcaaaaaaagagaaattttccttaataagaaaagtaatttttactctgatgtgcaatacatttgttattaaatttattatttaagatggtagcactagtcttaaattgtataaaatatcccctaacatgtttaaatgtccatttttattcattatgctttgaaaaataattatggggaaatacatgtttgttattaaatttattattaaagatagtagcactagtcttaaatttgatataacatctcctaacttgtttaaatgtccatttttattctttatgcttgaaaataaattatggggatcctatttagctcttagtaccactaatcaaaagttcggcatgtagctcatgatctatgctgtttctatgtcgtggaagcaccggatgggggtagtgagcaaatctgccctgctcagcagtcaccatagcagctgactgaaaatcagcactgcctgagtagttttgatcagtttaacttgaatcactaactgactgaaaattgaatgggcaaataagtgcttttgtctccagagtatgcgggagacccttccacctcaagatggatatttcttccccaaggatttcaagatgaattgaaatttttaatcaagatagtgtgctttattctgttgtattttttattattttaatatactgtaagccaaactgaaataacatttgctgttttataggtttgaagaacataggaaaaactaagaggttttgtttttatttttgctgatgaagagatatgtttaaatatgttgtattgttttgtttagttacaggacaataatgaaatggagtttatatttgttatttctattttgttatatttaataatagaattagattgaaataaaatataatgggaaataatctgcagaatgtgggtttcctggtgtttcctctgactctagtgcactgatgatctctgataaggctcagctgctttatagttctctggctaatgcagcagatactcttcctgccagtggtaatacgattttttaagaaggcagtttgtcaattttaatcttgtggatacctttatactcttagggtattattttatacaaaagccttgaggattgcattctattttctatatgaccctcttgatatttaaaaaacactatggataacaattcttcatttacctagtattatgaaagaatgaaggagttcaaacaaatgtgtttcccagttaactagggtttactgtttgagccaatataaatgtttaactgtttgtgatggcagtattcctaaagtacattgcatgttttcctaaatacagagtttaaataatttcagtaattcttagatgattcagcttcatcattaagaatatcttttgttttatgttgagttagaaatgccttcatatagacatagtctttcagacctctactgtcagttttcatttctagctgctttcagggttttatgaattttcaggcaaagctttaatttatactaagcttaggaagtatggctaatgccaacggcagtttttttcttcttaattccacatgactgaggcatatatgatctctgggtaggtgagttgttgtgacaaccacaagcactttttttttttttaaagaaaaaaaggtagtgaatttttaatcatctggactttaagaaggattctggagtatacttaggcctgaaattatatatatttggcttggaaatgtgtttttcttcaattacatctacaagtaagtacagctgaaattcagaggacccataagagttcacatgaaaaaaatcaattcatttgaaaaggcaagatgcaggagagaggaagccttgcaaacctgcagactgctttttgcccaatatagattgggtaaggctgcaaaacataagcttaattagctcacatgctctgctctcacgtggcaccagtggatagtgtgagagaattaggctgtagaacaaatggccttctctttcagcattcacaccactacaaaatcatcttttatatcaacagaagaataagcataaactaagcaaaaggtcaataagtacctgaaaccaagattggctagagatatatcttaatgcaatccattttctgatggattgttacgagttggctatataatgtatgtatggtattttgatttgtgtaaaagttttaaaaatcaagctttaagtacatggacatttttaaataaaatatttaaagacaatttagaaaattgccttaatatcattgttggctaaatagaataggggacatgcatattaaggaaaaggtcatggagaaataatattggtatcaaacaaatacattgatttgtcatgatacacattgaatttgatccaatagtttaaggaataggtaggaaaatttggtttctatttttcgatttcctgtaaatcagtgacataaataattcttagcttattttatatttccttgtcttaaatactgagctcagtaagttgtgttaggggattatttctcagttgagactttcttatatgacattttactatgttttgacttcctgactattaaaaataaatagtagaaacaattttcataaagtgaagaattatataatcactgctttataactgactttattatatttatttcaaagttcatttaaaggctactattcatcctctgtgatggaatggtcaggaatttgttttctcatagtttaattccaacaacaatattagtcgtatccaaaataacctttaatgctaaactttactgatgtatatccaaagcttctccttttcagacagattaatccagaagcagtcataaacagaagaataggtggtatgttcctaatgatattatttctactaatggaataaactgtaatattagaaattatgctgctaattatatcagctctgaggtaatttctgaaatgttcagactcagtcggaacaaattggaaaatttaaatttttattcttagctataaagcaagaaagtaaacacattaatttcctcaacatttttaagccaattaaaaatataaaagatacacaccaatatcttcttcaggctctgacaggcctcctggaaacttccacatatttttcaactgcagtataaagtcagaaaataaagttaacataactttcactaacacacacatatgtagatttcacaaaatccacctataattggtcaaagtggttgagaatatattttttagtaattgcatgcaaaatttttctagcttccatcctttctccctcgtttcttctttttttgggggagctggtaactgatgaaatcttttcccaccttttctcttcaggaaatataagtggttttgtttggttaacgtgatacattctgtatgaatgaaacattggagggaaacatctactgaatttctgtaatttaaaatattttgctgctagttaactatgaacagatagaagaatcttacagatgctgctataaataagtagaaaatataaatttcatcactaaaatatgctattttaaaatctatttcctatattgtatttctaatcagatgtattactcttattatttctattgtatgtgttaatgattttatgtaaaaatgtaattgcttttcatgagtagtatgaataaaattgattagtttgtg

SEQ ID NO: 2577 - DNA, 5055 bp, Homo sapiens
cgatactacgtgggcatttttggtcgaagagagctgaagtaatgagaagacatcatggaggcccagtcccacagctccacgaccactgaaaagaaaaaagttgagaattccatagtgaagtgctccactcgaacagatgtgagcgagaaagccgttgcctccagcaccacttctaatgaggatgaaagtcctggacagacttatcacagagagagaagaaacgcaatcactatgcagccacagaatgtccaggggctcagcaaagtcagtgaggaaccttcaacatcgagtgacgagagggcctcattgatcaagaaagagatccatgggtccctgccacacgtggcggagccctctgtgccgtaccgcgggacggtgtttgccatggaccccaggaatggttacatggagccccactaccaccctcctcatcttttccctgccttccatcctcctgtaccaattgatgccagacatcatgagggccgttaccattacgatccatctccgattcctccattgcatatgacttccgccttatctagtagccctacgtatccggacctgcccttcattaggatctccccacaccggaaccccgctgctgcttccgagtctcccttcagccctccacatccctacattaatccctacatggactatatccgctccttgcacagcagcccatcgctctccatgatctcagcaacccgtgggctgagccctacagatgcgccccatgcaggagtcagcccagcagaatactatcatcagatggccctgctaactggccagcgcagcccctatgcagacattattccctcagctgccaccgccggcacgggggccatccacatggaatatcttcatgctatggatagcaccagattctccagccccaggctgtcagccaggccgagccgaaaacgtacactgtccatatcaccactctccgatcatagctttgaccttcagaccatgataaggacgtctcccaactccttggtcacgattctcaataattcccgtagcagctcttcagcaagtggctcctatggtcacttatctgcaagtgcaatcagccctgccttgagcttcacctactcttccgcgcccgtctctctccacatgcatcagcagatcctaagccgacaacagagcttaggttcagcctttggacacagccctccactcatccaccctgccccaacttttccaacacagaggcctattccagggatccctacggttctgaaccccgtccaggtcagctccggcccttctgagtcctcacagaacaagcccacgagtgagtctgcagtgagcagcactggtgacccgatgcacaacaagaggtccaagatcaaacccgatgaagacctccccagcccaggggctcgggggcagcaggaacagcccgaaggaacaacccttgtcaaggaggaaggggacaaagatgaaagcaaacaggagcctgaagtcatctatgagacaaactgccactgggaaggctgcgcgagggagttcgacacccaagagcagcttgtgcaccatataaataacgaccatattcatggagagaagaaggagttcgtgtgcaggtggctggactgctcaagagagcagaaacccttcaaagcccagtatatgttggtagtgcatatgagaagacacacgggcgagaagcctcacaaatgcacttttgaaggttgcacaaaggcctactcgagactagaaaacttgaaaacacacttgagatctcacactggagagaaaccatacgtctgtgagcacgaaggttgcaacaaggctttctcaaatgcctctgatcgcgccaaacaccaaaacagaacgcattccaatgagaaaccatatgtgtgcaaaatcccaggctgcactaagcgttacacagacccaagctccctccggaaacatgtgaagacagtgcatggcccagaggctcatgtcaccaagaagcagcgaggggacatccatcctcggccgccacccccgagagattccggcagccattcacagtccaggtcgcctggccgaccgactcagggagcccttggtgagcagcaggacctcagcaacactacctcaaagcgggaagaatgcctccaggtgaaaaccgtcaaggcagagaagccaatgacatctcagccaagccctggtggtcagtcttcatgcagcagccaacagtcccccatcagcaactattccaacagtgggctcgagcttcctctgaccgatggaggtagtataggagacctcagtgccatcgatgaaaccccaatcatggactcaaccatttccactgcaaccacagcccttgctttgcaagccaggagaaacccggcagggaccaaatggatggagcacgtaaaactagaaaggctaaaacaagtgaatggaatgtttccgcgactgaaccccattctaccccctaaagcccctgcggtctctcctctcataggaaatggcacacagtccaacaacacctgcagcttgggtgggcccatgacgcttctcccgggcagaagcgacctctctggggtggacgtcactatgctgaacatgctcaacagaagggacagcagcgccagcaccatcagctcggcctacctgagcagccgccgctcctcagggatctcgccctgcttctccagccgccgctccagcgaggcgtcacaggccgagggccggccgcagaacgtgagcgtggccgactcctacgaccccatctccaccgacgcctcgcgccgctccagcgaagccagccagagcgacggcctgcccagcctgctcagcctcacgcccgcccagcagtaccgcctcaaggccaagtacgcggctgccacaggagggccgccgccgacgcccctgcccaacatggagaggatgagcctgaagacgcgcctggcgctgctcggggatgccctcgagcctggcgtggccctgcctccagttcatgccccgaggaggtgcagcgacgggggagcccacggctacgggcggcgccacctgcagccgcacgatgcgctgggccacggcgtgaggagggccagcgacccggtgcggacaggctccgagggcctggccctgcctcgtgtgccgcgcttcagcagcctcagcagctgcaaccccccggcgatggccacgtccgcggagaagcgcagtctcgtgcttcagaattacacgcggcccgagggcggccagtcccgaaacttccactcgtccccctgtcctcccagcatcaccgagaacgtcaccctggagtccctgaccatggacgctgatgccaacctgaacgatgaggatttcctgccggacgacgtggtgcagtatttaaattcccagaaccaagcagggtacgagcagcacttccccagcgccctcccggacgacagcaaagtgccccacgggcccggtgactttgacgcgcccgggctgccagacagccacgctggccagcagttccatgccctcgagcagccctgccccgagggcagcaaaaccgacctgcccattcagtggaacgaagtcagctccggaagcgccgacctgtcctcctccaagctcaagtgtgggccgcggcccgctgtgccgcagactcgcgcctttgggttctgcaacggcatggtcgtccacccgcagaaccccttgaggagcgggcctgctgggggctatcagaccctcggggagaacagcaacccctacggtggcccagagcacttgatgctccacaacagccccggaagtggcaccagtggaaacgccttccatgaacagccctgtaaggccccgcagtatgggaactgtctcaacaggcagccagtggcccctggtgcactcgacggtgcctgtggtgccgggattcaagcctcaaagctgaagagcacccccatgcaagggagcgggggccagctgaatttcggcctgccggtagcgccaaatgagtcagctggcagcatggtgaatggcatgcagaaccaggacccagtgggacaggggtacctggctcaccagctcctcggcgacagcatgcagcacccgggggcaggccgccccggtcagcagatgcttgggcagattagtgctacctcacacatcaacatctaccaagggccagagagctgcctgccaggggctcacggcatgggcagccagccgtcaagcttggcagttgtcaggggctaccagccatgtgccagctttgggggcagcaggcgccaggctatgccgagggacagccttgctctgcagtcaggacagctcagtgacacaagtcagacctgcagggtgaatggtatcaagatggagatgaaagggcagccccatccgctgtgctctaatctgcagaattactctggtcagttctatgaccaaaccgtgggcttcagtcagcaagacacgaaagctggttcattctctatttcagacgccagctgcctgctacaggggaccagcgccaaaaactctgagttactttccccaggtgctaatcaggtgacaagcacagtggacagcctcgacagccatgacctggaaggggtacagattgacttcgatgccatcatagacgatggggaccactccagcctgatgtcgggggccctgagcccaagtatcattcagaacctttcccatagctcctcccgcctcaccacgcctcgggcgtccctcccattcccagtcgctgtccatgagcaccaccaacatggctatcggggacatgagttctttgctgacctccctagcggaagaaagcaaattccttgcagttatgcaataggctttaggaaaaaaagactgcaaccaacggaaatcaataggagttgaagagattaaactgactttgttttggctgtttttttagttctgtatgtattttagcaatctcatctcacctaactgagatgtgtttcaattatattccttttatggaaaaggactctgaaaaaccctaaagtattctagggagaaactgtcttccatttcagttttgaatcagtattgttacactcaaaccaccctctttttaaaaaaaaa

SEQ ID NO: 2578 - DNA, 2110 bp, Homo sapiens
gtgaagtgctcagaatggggcaggatgtcacctggaatcagcactaagtgattcagactttccttacttttaaatgtgctgctcttcatttcaagatgccgttgcagctctgataaatgcaaactgacaaccttcaaggccacgacggagggaaaatcattggtgcttggagcatagaagactgcccttcacaaaggaaatccctgattattgtttgaaatgctgaggacgttgctgcgaaggagacttttttcttatcccaccaaatactactttatggttcttgttttatccctaatcaccttctccgttttaaggattcatcaaaagcctgaatttgtaagtgtcagacacttggagcttgctggggagaatcctagtagtgatattaattgcaccaaagttttacagggtgatgtaaatgaaatccaaaaggtaaagcttgagatcctaacagtgaaatttaaaaagcgccctcggtggacacctgacgactatataaacatgaccagtgactgttcttctttcatcaagagacgcaaatatattgtagaaccccttagtaaagaagaggcggagtttccaatagcatattctatagtggttcatcacaagattgaaatgcttgacaggctgctgagggccatctatatgcctcagaatttctattgcgttcatgtggacacaaaatccgaggattcctatttagctgcagtgatgggcatcgcttcctgttttagtaatgtctttgtggccagccgattggagagtgtggtttatgcatcgtggagccgggttcaggctgacctcaactgcatgaaggatctctatgcaatgagtgcaaactggaagtacttgataaatctttgtggtatggattttcccattaaaaccaacctagaaattgtcaggaagctcaagttgttaatgggagaaaacaacctggaaacggagaggatgccatcccataaagaagaaaggtggaagaagcggtatgaggtcgttaatggaaagctgacaaacacagggactgtcaaaatgcttcctccactcgaaacacctctcttttctggcagtgcctacttcgtggtcagtagggagtatgtggggtatgtactacagaatgaaaaaatccaaaagttgatggagtgggcacaagacacatacagccctgatgagtatctctgggccaccatccaaaggattcctgaagtcccgggctcactccctgccagccataagtatgatctatctgacatgcaagcagttgccaggtttgtcaagtggcagtactttgagggtgatgtttccaagggtgctccctacccgccctgcgatggagtccatgtgcgctcagtgtgcattttcggagctggtgacttgaactggatgctgcgcaaacaccacttgtttgccaataagtttgacgtggatgttgacctctttgccatccagtgtttggatgagcatttgagacacaaagctttggagacattaaaacactgaccattacgggcaattttatgaacaagaagaaggatacacaaaacgtaccttatctgtttccccttccttgtcagcgtcgggaagatggtatgaagtcctctttggggcagggactctagtagatcttcttgtcagagaagctgcatggtttctgcagagcacagttagctagaaaggtgatagcattaaatgttcatctagagttaatagtgggaggagtaaaggtagccttgaggccagagcaggtagcaaggcattgtggaaagaggggaccagggtggctggggaagaggccgatgcataaagtcagcctgttccaagtgctcagggacttagcaaaatgagaagatgtgacctgtgccaaaactattttgagaattttaaatgtgaccatttttctggtatgccaataaaddcttacagcaacaaataatcaaagatacaattaatctgatattatatttgttgaaatagaaatttgattgtactataaatgatttttgtaaataatttatattctgctctaatactgtactgtgtagtgtgtctccgtatgtcatctcagggagcttaaaatgggcttgatttaacattgaaaaaaaat

SEQ ID NO: 2579 - DNA, 1726 bp, Homo sapiens
ccagattctaaatatcaggaaagacgctgtgggaaaatagcaggccaaaagttcttagtaaactgcagccagggagactcagactagaatggaggtagaaagaactgatgcagagtgggtttaattctaagcctttttgtggctaagttttgttgttgttaacttattgaatttagagttgtattgcactggtcatgtgaaagccagagcagcaccagtgtcaaaatagtgacagagagttttgaataccatagttagtatatatgtactcagagtatttttattaaagaaggcaaagagcccggcatagatcttatcttcatcttcactcggttgcaaaatcaatagttaagaaatagcatctaagggaacttttaggtgggaaaaaaaatctagagatggctctaaatgactgtttccttctgaacttggaggtggaccatttcatgcactgcaacatctccagtcacagtgcggatctccccgtgaacgatgactggtcccacccggggatcctctatgtcatccctgcagtttatggggttatcattctgataggcctcattggcaacatcactttgatcaagatcttctgtacagtcaagtccatgcgaaacgttccaaacctgttcatttccagtctggctttgggagacctgctcctcctaataacgtgtgctccagtggatgccagcaggtacctggctgacagatggctatttggcaggattggctgcaaactgatcccctttatacagcttacctctgttggggtgtctgtcttcacactcacggcgctctcggcagacagatacaaagccattgtccggccaatggatatccaggcctcccatgccctgatgaagatctgcctcaaagccgcctttatctggatcatctccatgctgctggccattccagaggccgtgttttctgacctccatcccttccatgaggaaagcaccaaccagaccttcattagctgtgccccatacccacactctaatgagcttcaccccaaaatccattctatggcttcctttctggtcttctacgtcatcccactgtcgatcatctctgtttactactacttcattgctaaaaatctgatccagagtgcttacaatcttcccgtggaagggaatatacatgtcaagaagcagattgaatcccggaagcgacttgccaagacagtgctggtgtttgtgggcctgttcgccttctgctggctccccaatcatgtcatctacctgtaccgctcctaccactactctgaggtggacacctccatgctccactttgtcaccagcatctgtgcccgcctcctggccttcaccaactcctgcgtgaacccctttgccctctacctgctgagcaagagtttcaggaaacagttcaacactcagctgctctgttgccagcctggcctgatcatccggtctcacagcactggaaggagtacaacctgcatgacctccctcaagagtaccaacccctccgtggccacctttagcctcatcaatggaaacatctgtcacgagcggtatgtctagattgacccttgattttgccccctgagggacggttttgctttatggctagacaggaacccttgcatccattgttgtgtctgtgccctccaaagagccttcagaatgctcctgagtggtgtaggtgggggtggggaggcccaaatgatggatcaccattatattttgaaagaagc

SEQ ID NO: 2580 - DNA, 1397 bp, Homo sapiens
agaccaaccaagatgagtgccctgggagctgtcattgccctcctgctctggggacagctttttgcagtggactcaggcaatgatgtcacggatatcgcagatgacggctgcccgaagccccccgagattgcacatggctatgtggagcactcggttcgctaccagtgtaagaactactacaaactgcgcacagaaggagatggagtatacaccttaaataataagaagcagtggataaataaggctgttggagataaacttcctgaatgtgaagcagatgacggctgcccgaagccccccgagattgcacatggctatgtggagcactcggtccgctaccagtgtaagaactactacaaactgcgcacagaaggagatggagtgtacaccttaaacaatgagaagcagtggataaataaggctgttggagataaacttcctgaatgtgaagcagtatgtgggaagcccaagaatccggcaaacccagtgcagcggatcctaggtggacaccttgatgccaaaggcagctttccctggcaggctaagatggtttcccaccataatctcaccacaggtgccacgctgatcaatgaacaatggctgctgaccacggctaaaaatctcttcctgaaccattcagaaaatgcaacagcgaaagacattgcccctactttaacactctatgtggggaaaaagcagcttgtagagattgagaaggttgttctacaccctaactactcccaggtagatattgggctcatcaaactcaaacagaaggtgtctgttaatgagagagtgatgcccatctgcctaccttcaaaggattatgcagaagtagggcgtgtgggttatgtttctggctgggggcgaaatgccaattttaaatttactgaccatctgaagtatgtcatgctgcctgtggctgaccaagaccaatgcataaggcattatgaaggcagcacagtccccgaaaagaagacaccgaagagccctgtaggggtgcagcccatactgaatgaacacaccttctgtgctggcatgtctaagtaccaagaagacacctgctatggcgatgcgggcagtgcctttgccgttcacgacctggaggaggacacctggtatgcgactgggatcttaagctttgataagagctgtgctgtggctgagtatggtgtgtatgtgaaggtgacttccatccaggactgggttcagaagaccatagctgagaactaatgcaaggctggccggaagcccttgcctgaaagcaagatttcagcctggaagagggcaaagtggacgggagtggacaggagtggatgcgataagatgtggtttgaagctgatgggtgccagccctgcattgctgagtcaatcaataaagagctttcttttgaccc

SEQ ID NO: 2581 - DNA, 7390 bp, Homo sapiens
gaattccgctttcaagaagatcagggacaactgatttgaagtctactctgtgcttctaaatccccaattctgctgaaagtgagataccctagagccctagagccccagcagcacccagccaaacccacctccaccatgggggccatgactcagctgttggcaggtgtctttcttgctttccttgccctcgctaccgaaggtggggtcctcaagaaagtcatccggcacaagcgacagagtggggtgaacgccaccctgccagaagagaaccagccagtggtgtttaaccacgtttacaacatcaagctgccagtgggatcccagtgttcggtggatctggagtcagccagtggggagaaagacctggcaccgccttcagagcccagcgaaagctttcaggagcacacagtagatggggaaaaccagattgtcttcacacatcgcatcaacatcccccgccgggcctgtggctgtgccgcagcccctgatgttaaggagctgctgagcagactggaggagctggagaacctggtgtcttccctgagggagcaatgtactgcaggagcaggctgctgtctccagcctgccacaggccgcttggacaccaggcccttctgtagcggtcggggcaacttcagcactgaaggatgtggctgtgtctgcgaacctggctggaaaggccccaactgctctgagcccgaatgtccaggcaactgtcaccttcgaggccggtgcattgatgggcagtgcatctgtgacgacggcttcacgggcgaggactgcagccagctggcttgccccagcgactgcaatgaccagggcaagtgcgtgaatggagtctgcatctgtttcgaaggctacgccggggctgactgcagccgtgaaatctgcccagtgccctgcagtgaggagcacggcacatgtgtagatggcttgtgtgtgtgccacgatggctttgcaggcgatgactgcaacaagcctctgtgtctcaacaattgctacaaccgtggacgatgcgtggagaatgagtgcgtgtgtgatgagggtttcacgggcgaagactgcagtgagctcatctgccccaatgactgcttcgaccggggccgctgcatcaatggcacctgctactgcgaagaaggcttcacaggtgaagactgcgggaaacccacctgcccacatgcctgccacacccagggccggtgtgaggaggggcagtgtgtatgtgatgagggctttgccggtttggactgcagcgagaagaggtgtcctgctgactgtcacaatcgtggccgctgtgtagacgggcggtgtgagtgtgatgatggtttcactggagctgactgcggggagctcaagtgtcccaatggctgcagtggccatggccgctgtgtcaatgggcagtgtgtgtgtgatgagggctatactggggaggactgcagccagctacggtgccccaatgactgtcacagtcggggccgctgtgtcgagggcaaatgtgtatgtgagcaaggcttcaagggctatgactgcagtgacatgagctgccctaatgactgtcaccagcacggccgctgtgtgaatggcatgtgtgtttgtgatgacggctacacaggggaagactgccgggatcgccaatgccccagggactgcagcaacaggggcctctgtgtggacggacagtgcgtctgtgaggacggcttcaccggccctgactgtgcagaactctcctgtccaaatgactgccatggccggggtcgctgtgtgaatgggcagtgcgtgtgccatgaaggatttatgggcaaagactgcaaggagcaaagatgtcccagtgactgtcatggccagggccgctgcgtggacggccagtgcatctgccacgagggcttcacaggcctggactgtggccagcactcctgccccagtgactgcaacaacttaggacaatgcgtctcgggccgctgcatctgcaacgagggctacagcggagaagactgctcagaggtgtctcctcccaaagacctcgttgtgacagaagtgacggaagagacggtcaacctggcctgggacaatgagatgcgggtcacagagtaccttgtcgtgtacacgcccacccacgagggtggtctggaaatgcagttccgtgtgcctggggaccagacgtccaccatcatccaggagctggaacctggtgtggagtactttatccgtgtatttgccatcctggagaacaagaagagcattcctgtcagcgccagggtggccacgtacttacctgcacctgaaggcctgaaattcaagtccatcaaggagacatctgtggaagtggagtgggatcctctagacattgcttttgaaacctgggagatcatcttccggaatatgaataaagaagatgagggagagatcaccaaaagcctgaggaggccagagacctcttaccggcaaactggtctagctcctgggcaagagtatgagatatctctgcacatagtgaaaaacaatacccggggccctggcctgaagagggtgaccaccacacgcttggatgcccccagccagatcgaggtgaaagatgtcacagacaccactgccttgatcacctggttcaagcccctggctgagatcgatggcattgagctgacctacggcatcaaagacgtgccaggagaccgtaccaccatcgatctcacagaggacgagaaccagtactccatcgggaacctgaagcctgacactgagtacgaggtgtccctcatctcccgcagaggtgacatgtcaagcaacccagccaaagagaccttcacaacaggcctcgatgctcccaggaatcttcgacgtgtttcccagacagataacagcatcaccctggaatggaggaatggcaaggcagctattgacagttacagaattaagtatgcccccatctctggaggggaccacgctgaggttgatgttccaaagagccaacaagccacaaccaaaaccacactcacaggtctgaggccgggaactgaatatgggattggagtttctgctgtgaaggaagacaaggagagcaatccagcgaccatcaacgcagccacagagttggacacgcccaaggaccttcaggtttctgaaactgcagagaccagcctgaccctgctctggaagacaccgttggccaaatttgaccgctaccgcctcaattacagtctccccacaggccagtgggtgggagtgcagcttccaagaaacaccacttcctatgtcctgagaggcctggaaccaggacaggagtacaatgtcctcctgacagccgagaaaggcagacacaagagcaagcccgcacatgtgaaggcatccactgaacaagcccctgagctggaaaacctcaccgtgactgaggttggctgggatggcctcagactcaactggaccgcagctgaccaggcctatgagcactttatcattcaggtgcaggaggccaacaaggtggaggcagctcggaacctcaccgtgcctggcagccttcgggctgtggacataccgggcctcaaggctgctacgccttatacagtctccatctatggggtgatccagggctatagaacaccagtgctctctgctgaggcctccacaggggaaactcccaatttgggagaggtcgtggtggccgaggtgggctgggatgccctcaaactcaactggactgctccagaaggggcctatgagtactttttcattcaggtgcaggaggctgacacagtagaggcagcccagaacctcaccgtcccaggaggactgaggtccacagacctgcctgggctcaaagcagccactcattataccatcaccatccgcggggtcactcaggacttcagcacaacccctctctctgttgaagtcttgacagaggaggttccagatatgggaaacctcacagtgaccgaggttagctgggatgctctcagactgaactggaccacgccagatggaacctatgaccagtttactattcaggtccaggaggctgaccaggtggaagaggctcacaatctcacggttcctggcagcctgcgttccatggaaatcccaggcctcagggctggcactccttacacagtcaccctgcacggcgaggtcaggggccacagcactcgaccccttgctgtagaggtcgtcacagaggatctcccacagctgggagatttagccgtgtctgaggttggctgggatggcctcagactcaactggaccgcagctgacaatgcctatgagcactttgtcattcaggtgcaggaggtcaacaaagtggaggcagcccagaacctcacgttgcctggcagcctcagggctgtggacatcccgggcctcgaggctgccacgccttatagagtctccatctatggggtgatccggggctatagaacaccagtactctctgctgaggcctccacagccaaagaacctgaaattggaaacttaaatgtttctgacataactcccgagagcttcaatctctcctggatggctaccgatgggatcttcgagacctttaccattgaaattattgattccaataggttgctggagactgtggaatataatatctctggtgctgaacgaactgcccatatctcagggctaccccctagtactgattttattgtctacctctctggacttgctcccagcatccggaccaaaaccatcagtgccacagccacgacagaggccctgccccttctggaaaacctaaccatttccgacattaatccctacgggttcacagtttcctggatggcatcggagaatgcctttgacagctttctagtaacggtggtggattctgggaagctgctggacccccaggaattcacactttcaggaacccagaggaagctggagcttagaggcctcataactggcattggctatgaggttatggtcctctggcttcacccaagggcatcaaacaagcccttgagggctgagattgttacagaagccgaaccggaagttgacaaccttctggtttcagatgccaccccagacggtttccgtctgtcctggacagctgatgaaggggtcttcgacaattttgttctcaaaatcagagataccaaaaagcagtctgagccactggaaataaccctacttgcccccgaacgtaccagggacttaacaggtctcagagaggctactgaatacgaaattgaactctatggaataagcaaaggaaggcgatcccagacagtcagtgctatagcaacaacagccatgggctccccaaaggaagtcattttctcagacatcactgaaaattcggctactgtcagctggagggcacccacagcccaagtggagagcttccggattacctatgtgcccattacaggaggtacaccctccatggtaactgtggacggaaccaagactcagaccaggctggtgaaactcatacctggcgtggagtaccttgtcagcatcatcgccatgaagggctttgaggaaagtgaacctgtctcagggtcattcaccacagctctggatggcccatctggcctggtgacagccaacatcactgactcagaagccttggccaggtggcagccagccattgccactgtggacagttatgtcatctcctacacaggcgagaaagtgccagaaattacacgcacggtgtccgggaacacagtggagtatgctctgaccgacctcgagcctgccacggaatacacactgagaatctttgcagagaaagggccccagaagagctcaaccatcactgccaagttcacaacagacctcgattctccaagagacttgactgctactgaggttcagtcggaaactgccctccttacctggcgacccccccgggcatcagtcaccggttacctgctggtctatgaatcagtggatggcacagtcaaggaagtcattgtgggtccagataccacctcctacagcctggcagacctgagcccatccacccactacacagccaagatccaggcactcaatgggcccctgaggagcaatatgatccagaccatcttcaccacaattggactcctgtaccccttccccaaggactgctcccaagcaatgctgaatggagacacgacctctggcctctacaccatttatctgaatggtgataaggctcaggcgctggaagtcttctgtgacatgacctctgatgggggtggatggattgtgttcctgagacgcaaaaacggacgcgagaacttctaccaaaactggaaggcatatgctgctggatttggggaccgcagagaagaattcctgcactggcttgggctggacaacctgaacaaaatcacagcccaggggcagtacgagctccgggtggacctgcgggaccatggggagacagcctttgctgtctatgacaagttcagcgtgggagatgccaagactcgctacaagctgaaggtggaggggtacagtgggacagcaggtgactccatggcctaccacaatggcagatccttctccacctttgacaaggacacagattcagccatcaccaactgtgctctgtcctacaaaggggctttctggtacaggaactgtcaccgtgtcaacctgatggggagatatggggacaataaccacagtcagggcgttaactggttccactggaagggccacgaacactcaatccagtttgctgagatgaagctgagaccaagcaacttcagaaatcttgaaggcaggcgcaaacgggcataaattccagggaccactgggtgagagaggaataaggcccagagcgaggaaaggattttaccaaagcatcaatacaaccagcccaaccatcggtccacacctgggcatttggtgagagtcaaagctgaccatggatccctggggccaacggcaacagcatgggcctcacctcctctgtgatttctttctttgcaccaaagacatcagtctccaacatgtttctgttttgttgtttgattcagcaaaaatctcccagtgacaacatcgcaatagttttttacttctcttaggtggctctgggaatgggagaggggtaggatgtacaggggtagtttgttttagaaccagccgtattttacatgaagctgtataattaattgtcattatttttgttagcaaagattaaatgtgtcattggaagccatccctttttttacatttcatacaacagaaaccagaaaagcaatactgtttccattttaaggatatgattaatattattaatataataatgatgatgatgatgatgaaaactaaggatttttcaagagatctttctttccaaaacatttctggacagtacctgattgtatttttttttttaaataaaagcacaagtacttttgagtttgttaaaacggaattc

SEQ ID NO: 2582 - DNA, 2709 bp, Homo sapiens
gggaatagcagaataggagcaagccagcactagtcagctaactaagtgactcaaccaaggccttttttccttgttatctttgcagatacttcattttcttagcgtttctggagattacaacatcctgcggttccgtttctgggaactttactgatttatctcccccctcacacaaataagcattgattcctgcatttctgaagatctcaagatctggactactgttgaaaaaatttccagtgaggctcacttatgtctgtaaagatgggaaaaaaatacaagaacattgttctactaaaaggattagaggtcatcaatgattatcattttagaatggttaagtccttactgagcaacgatttaaaacttaatttaaaaatgagagaagagtatgacaaaattcagattgctgacttgatggaagaaaagttccgaggtgatgctggtttgggcaaactaataaaaattttcgaagatataccaacgcttgaagacctggctgaaactcttaaaaaagaaaagttaaaagtaaaaggaccagccctatcaagaaagaggaagaaggaagtgcatgctacttcacctgcaccctccacaagcagcactgtcaaaactgaaggagcagaggcaactcctggagctcagaaaagaaaaaaatcaaccaaagaaaaggctggacccaaagggagtaaggtgtccgaggaacagactcagcctccctctcctgcaggagccggcatgtccacagccatgggccgttccccatctcccaagacctcattgtcagctccacccaacagttcttcaactgagaacccgaaaacagtggccaaatgtcaggtaactcccagaagaaatgttctccaaaaacgcccagtgatagtgaaggtactgagtacaacaaagccatttgaatatgagaccccagaaatggagaaaaaaataatgtttcatgctacagtggctacacagacacagttcttccatgtgaaggttttaaacaccagcttgaaggagaaattcaatggaaagaaaatcatcatcatatcagattatttggaatatgatagtctcctagaggtcaatgaagaatctactgtatctgaagctggtcctaaccaaacgtttgaggttccaaataaaatcatcaacagagcaaaggaaactctgaagattgatattcttcacaaacaagcttcaggaaatattgtatatggggtatttatgctacataagaaaacagtaaatcagaagaccacaatctacgaaattcaggatgatagaggaaaaatggatgtagtggggacaggacaatgtcacaatatcccctgtgaagaaggagataagctccagcttttctgctttcgacttagaaaaaagaaccagatgtcaaaactgatttcagaaatgcatagttttatccagataaagaaaaaaacaaacccgagaaacaatgaccccaagagcatgaagctaccccaggaacagcgtcagcttccatatccttcagaggccagcacaaccttccctgagagccatcttcggactcctcagatgccaccaacaactccatccagcagtttcttcaccaagaaaagtgaagacacaatctccaaaatgaatgacttcatgaggatgcagatactgaaggaagggagtcattttccaggaccgttcatgaccagcataggcccagctgagagccatccccacactcctcagatgcctccatcaacaccaagcagcagtttcttaaccacgttgaaaccaagactgaagactgaacctgaagaagtttccatagaagacagtgcccagagtgacctcaaagaagtgatggtgctgaacgcaacagaatcatttgtatatgagcccaaagagcagaagaaaatgtttcatgccacagtggcaactgagaatgaagtcttccgagtgaaggtttttaatattgacctaaaggagaagttcaccccaaagaagatcattgccatagcaaattatgtttgccgcaatgggttcctggaggtatatcctttcacacttgtggctgatgtgaatgctgaccgaaacatggagatcccaaaaggattgattagaagtgccagcgtaactcctaaaatcaatcagctttgctcacaaactaaaggaagttttgtgaatggggtgtttgaggtacataagaaaaatgtaaggggtgaattcacttattatgaaatacaagataatacagggaagatggaagtggtggtgcatggacgactgaacacaatcaactgtgaggaaggagataaactgaaactcaccagctttgaattggcaccgaaaagtgggaataccggggagttgagatctgtaattcatagtcacatcaaggtcatcaagaccaggaaaaacaagaaagacatactcaatcctgattcaagtatggaaacttcaccagactttttcttctaaaatctggatgtcattgacgataatgtttatggagataaggtctaagtccctaaaaaaatgtacatatacctggttgaaatacaacactatacatacacaccaccatatatactagctgttaatcctatggaatgggggtattgggagtgcttttttaatttttcatagtttttttttaataaaatggcatattttgcatctacaacttctataataagaaaaaataaataaacattatcttttttgtgaaaaaaa

SEQ ID NO: 2583 - DNA, 1612 bp, Homo sapiens
ctctcctgccccaccccgaggtaaagggggcgactaagagaagatggtgttgctcaccgcggtcctcctgctgctggccgcctatgcggggccggcccagagcctgggctccttcgtgcactgcgagccctgcgacgagaaagccctctccatgtgcccccccagccccctgggctgcgagctggtcaaggagccgggctgcggctgctgcatgacctgcgccctggccgaggggcagtcgtgcggcgtctacaccgagcgctgcgcccaggggctgcgctgcctcccccggcaggacgaggagaagccgctgcacgccctgctgcacggccgcggggtttgcctcaacgaaaagagctaccgcgagcaagtcaagatcgagagagactcccgtgagcacgaggagcccaccacctctgagatggccgaggagacctactcccccaagatcttccggcccaaacacacccgcatctccgagctgaaggctgaagcagtgaagaaggaccgcagaaagaagctgacccagtccaagtttgtcgggggagccgagaacactgcccacccccggatcatctctgcacctgagatgagacaggagtctgagcagggcccctgccgcagacacatggaggcttccctgcaggagctcaaagccagcccacgcatggtgccccgtgctgtgtacctgcccaattgtgaccgcaaaggattctacaagagaaagcagtgcaaaccttcccgtggccgcaagcgtggcatctgctggtgcgtggacaagtacgggatgaagctgccaggcatggagtacgttgacggggactttcagtgccacaccttcgacagcagcaacgttgagtgatgcgtccccccccaacctttccctcaccccctcccacccccagccccgactccagccagcgcctccctccaccccaggacgccactcatttcatctcatttaagggaaaaatatatatctatctatttgaggaaactgaggacctcggaatctctagcaagggctcaacttcgaaaatggcaacaacagagatgcaaaaagctaaaaagacaccccccccctttaaatggttttctttttgaggcaagttggatgaacagagaagggaagagaggaagaacgagaggaagagaagggaaggaagtgtttgtgtagaagagagagaaagacgaatagagttaggaaaaggaagacaagcaggtgggcaggaaggacatgcaccgagaccaggcaggggcccaactttcacgtccagccctggcctggggtcgggagaggtgggcgctagaagatgcagcccaggatgtggcaatcaatgacactattggggtttcccaggatggattggtcagggggagaaaggaaaaggcaaaacactccaggacctctcccggatctgtctcctcctctagccagcagtatggacagctggacccctgaacttcctctcctcttacctgggcagagtgttgtctctccccaaatttataaaaactaaaatgcattccattcctctgaaagcaaaacaaattcataattgagtgatattaaatagagaggttttcggaagcagatctgtgaatatgaaat

SEQ ID NO: 2584 - DNA, 1914 bp, Homo sapiens
tgagaagggcaaatgctatcattggaaaaactgacaaaagtcccaataggaaaaataaggaagtggagagttactatgtttctaatttttcatgtgcttctatttttttcctacttcagagccattgactaatagttgagtataacacaggttgtgtttccgggctgctgaaacatgacactaatattttcaaagaactgtggaagcctaaaaggaagccaatgagaaataactaaatgagagtttaggactgcagccttcattttcattcaaagatttaaaagtttccataaagtaaaatgttcttctccggccacctgttttcatagttctgtgttttccttcaggcctttctggcttcctatatggcagtaagaaaatgatgtgcttaatgattacaaatttcatatggaatacgaactttcagtttgtacatatgatgcacagagatgcttttgtggttttattggttttcatattacaaacaaagaaactagaaaatgaaaccattccaaaagtggaagtaatttctcactgcccctgtgataaactgtggtcactggctgtggcagcaactattataagatgctctgaaactcttcagacactgagggggcaccagaggagcagactacaagaatggcacacgctatggaaaactcctggacaatcagtaaagagtaccatattgatgaagaagtgggctttgctctgccaaatccacaggaaaatctacctgatttttataatgactggatgttcattgctaaacatctgcctgatctcatagagtctggccagcttcgagaaagagttgagaagttaaacatgctcagcattgatcatctcacagaccacaagtcacagcgccttgcacgtctagttctgggatgcatcaccatggcatatgtgtggggcaaaggtcatggagatgtccgtaaggtcttgccaagaaatattgctgttccttactgccaactctccaagaaactggaactgcctcctattttggtttatgcagactgtgtcttggcaaactggaagaaaaaggatcctaataagcccctgacttatgagaacatggacgttttgttctcatttcgtgatggagactgcagtaaaggattcttcctggtctctctattggtggaaatagcagctgcttctgcaatcaaagtaattcctactgtattcaaggcaatgcaaatgcaagaacgggacactttgctaaaggcgctgttggaaatagcttcttgcttggagaaagcccttcaagtgtttcaccaaatccacgatcatgtgaacccaaaagcatttttcagtgttcttcgcatatatttgtctggctggaaaggcaacccccagctatcagacggtctggtgtatgaagggttctgggaagacccaaaggagtttgcagggggcagtgcaggccaaagcagcgtctttcagtgctttgacgtcctgctgggcatccagcagactgctggtggaggacatgctgctcagttcctccaggacatgagaagatatatgccaccagctcacaggaacttcctgtgctcattagagtcaaatccctcagtccgtgagtttgtcctttcaaaaggtgatgctggcctgcgggaagcttatgacgcctgtgtgaaagctctggtctccctgaggagctaccatctgcaaatcgtgactaagtacatcctgattcctgcaagccagcagccaaaggagaataagacctctgaagacccttcaaaactggaagccaaaggaactggaggcactgatttaatgaatttcctgaagactgtgagaagtacaactgagaaatcccttttgaaggaaggttaatgtaacccaacaagagcacattttatcatagcagagacatctgtatgcattcctgtcattacc

SEQ ID NO: 2585 - DNA, 4910 bp, Homo sapiens
tagacgcaccctctgaagatggtgactccctcctgagaagctggaccccttggtaaaagacaaggccttctccaagaagaatatgaaagtgttactcagacttatttgtttcatagctctactgatttcttctctggaggctgataaatgcaaggaacgtgaagaaaaaataattttagtgtcatctgcaaatgaaattgatgttcgtccctgtcctcttaacccaaatgaacacaaaggcactataacttggtataaagatgacagcaagacacctgtatctacagaacaagcctccaggattcatcaacacaaagagaaactttggtttgttcctgctaaggtggaggattcaggacattactattgcgtggtaagaaattcatcttactgcctcagaattaaaataagtgcaaaatttgtggagaatgagcctaacttatgttataatgcacaagccatatttaagcagaaactacccgttgcaggagacggaggacttgtgtgcccttatatggagttttttaaaaatgaaaataatgagttacctaaattacagtggtataaggattgcaaacctctacttcttgacaatatacactttagtggagtcaaagataggctcatcgtgatgaatgtggctgaaaagcatagagggaactatacttgtcatgcatcctacacatacttgggcaagcaatatcctattacccgggtaatagaatttattactctagaggaaaacaaacccacaaggcctgtgattgtgagcccagctaatgagacaatggaagtagacttgggatcccagatacaattgatctgtaatgtcaccggccagttgagtgacattgcttactggaagtggaatgggtcagtaattgatgaagatgacccagtgctaggggaagactattacagtgtggaaaatcctgcaaacaaaagaaggagtaccctcatcacagtgcttaatatatcggaaattgaaagtagattttataaacatccatttacctgttttgccaagaatacacatggtatagatgcagcatatatccagttaatatatccagtcactaatttccagaagcacatgattggtatatgtgtcacgttgacagtcataattgtgtgttctgttttcatctataaaatcttcaagattgacattgtgctttggtacagggattcctgctatgattttctcccaataaaagcttcagatggaaagacctatgacgcatatatactgtatccaaagactgttggggaagggtctacctctgactgtgatatttttgtgtttaaagtcttgcctgaggtcttggaaaaacagtgtggatataagctgttcatttatggaagggatgactacgttggggaagacattgttgaggtcattaatgaaaacgtaaagaaaagcagaagactgattatcattttagtcagagaaacatcaggcttcagctggctgggtggttcatctgaagagcaaatagccatgtataatgctcttgttcaggatggaattaaagttgtcctgcttgagctggagaaaatccaagactatgagaaaatgccagaatcgattaaattcattaagcagaaacatggggctatccgctggtcaggggactttacacagggaccacagtctgcaaagacaaggttctggaagaatgtcaggtaccacatgccagtccagcgacggtcaccttcatctaaacaccagttactgtcaccagccactaaggagaaactgcaaagagaggctcacgtgcctctcgggtagcatggagaagttgccaagagttctttaggtgcctcctgtcttatggcgttgcaggccaggttatgcctcatgctgacttgcagagttcatggaatgtaactatatcatcctttatccctgaggtcacctggaatcagattattaagggaataagccatgacgtcaatagcagcccagggcacttcagagtagagggcttgggaagatcttttaaaaaggcagtaggcccggtgtggtggctcacgcctataatcccagcactttgggaggctgaagtgggtggatcaccagaggtcaggagttcgagaccagcccagccaacatggcaaaaccccatctctactaaaaatacaaaaatgagctaggcatggtggcacacgcctgtaatcccagctacacctgaggctgaggcaggagaattgcttgaaccggggagacggaggttgcagtgagccgagtttgggccactgcactctagcctggcaacagagcaagactccgtctcaaaaaaagggcaataaatgccctctctgaatgtttgaactgccaagaaaaggcatggagacagcgaactagaagaaagggcaagaaggaaatagccaccgtctacagatggcttagttaagtcatccacagcccaagggcggggctatgccttgtctggggaccctgtagagtcactgaccctggagcggctctcctgagaggtgctgcaggcaaagtgagactgacacctcactgaggaagggagacatattcttggagaactttccatctgcttgtattttccatacacatccccagccagaagttagtgtccgaagaccgaattttattttacagagcttgaaaactcacttcaatgaacaaagggattctccaggattccaaagttttgaagtcatcttagctttccacaggagggagagaacttaaaaaagcaacagtagcagggaattgatccacttcttaatgctttcctccctggcatgaccatcctgtcctttgttattatcctgcattttacgtctttggaggaacagctccctagtggcttcctccgtctgcaatgtcccttgcacagcccacacatgaaccatccttcccatgatgccgctcttctgtcatcccgctcctgctgaaacacctcccaggggctccacctgttcaggagctgaagcccatgctttcccaccagcatgtcactcccagaccacctccctgccctgtcctccagcttcccctcgctgtcctgctgtgtgaattcccaggttggcctggtggccatgtcgcctgcccccagcactcctctgtctctgctcttgcctcgacccttcctcctcctttgcctaggaggccttctcgcattttctctagctgatcagaattttaccaaaattcagaacatcctccaattccacagtctctgggagactttccctaagaggcgacttcctctccagccttctctctctggtcaggcccactgcagagatggtggtgagcacatctgggaggctggtctccctccagctggaattgctgctctctgagggagaggctgtggtggctgtctctgtccctcactgccttccaggagcaatttgcacatgtaacatagatttatgtaatgctttatgtttaaaaacattccccaattatcttatttaatttttgcaattattctaattttatatatagagaaagtgacctattttttaaaaaaatcacactctaagttctattgaacctaggacttgagcctccatttctggcttctagtctggtgttctgagtacttgatttcaggtcaataacggtcccccctcactccacactggcacgtttgtgagaagaaatgacattttgctaggaagtgaccgagtctaggaatgcttttattcaagacaccaaattccaaacttctaaatgttggaattttcaaaaattgtgtttagattttatgaaaaactcttctactttcatctattctttccctagaggcaaacatttcttaaaatgtttcattttcattaaaaatgaaagccaaatttatatgccaccgattgcaggacacaagcacagttttaagagttgtatgaacatggagaggacttttggtttttatatttctcgtatttaatatgggtgaacaccaacttttatttggaataataattttcctcctaaacaaaaacacattgagtttaagtctctgactcttgcctttccacctgctttctcctgggcccgctttgcctgcttgaaggaacagtgctgttctggagctgctgttccaacagacagggcctagctttcatttgacacacagactacagccagaagcccatggagcagggatgtcacgtcttgaaaagcctattagatgttttacaaatttaattttgcagattattttagtctgtcatccagaaaatgtgtcagcatgcatagtgctaagaaagcaagccaatttggaaacttaggttagtgacaaaattggccagagagtgggggtgatgatgaccaagaattacaagtagaatggcagctggaatttaaggagggacaagaatcaatggataagcgtgggtggaggaagatccaaacagaaaagtgcaaagttattccccatcttccaagggttgaattctggaggaagaagacacattcctagttccccgtgaacttcctttgacttattgtccccactaaaacaaaacaaaaaacttttaatgccttccacattaattagattttcttgcagtttttttatggcatttttttaaagatgccctaagtgttgaagaagagtttgcaaatgcaacaaaaatatttaattaccggttgttaaaactggtttagcacaatttatattttccctctcttgcctttcttatttgcaataaaaggtattgagccattttttaaatgacatttttgataaattatgtttgtactagttgatgaaggagttttttttaacctgtttatataattttgcagcagaagccaaattttttgtatattaaagcaccaaattcatgtacagcatgcatcacggatcaatagactgtacttattttccaataaaattttcaaactttgtactgttaaa

SEQ ID NO: 2586 - DNA, 1823 bp, Homo sapiens
ggacaagttttggtggcacgcagcctggggactctgcctcgtgccgctgagcctggcgcagatcgatttgaatataacctgccgctttgcaggtgtattccacgtggagaaaaatggtcgctacagcatctctcggacggaggccgctgacctctgcaaggctttcaatagcaccttgcccacaatggcccagatggagaaagctctgagcatcggatttgagacctgcaggtatgggttcatagaagggcacgtggtgattccccggatccaccccaactccatctgtgcagcaaacaacacaggggtgtacatcctcacatccaacacctcccagtatgacacatattgcttcaatgcttcagctccacctgaagaagattgtacatcagtcacagacctgcccaatgcctttgatggaccaattaccataactattgttaaccgtgatggcacccgctatgtccagaaaggagaatacagaacgaatcctgaagacatctaccccagcaaccctactgatgatgacgtgagcagcggctcctccagtgaaaggagcagcacttcaggaggttacatcttttacaccttttctactgtacaccccatcccagacgaagacagtccctggatcaccgacagcacagacagaatccctgctaccagagaccaagacacattccaccccagtggggggtcccataccactcatggatctgaatcagatggacactcacatgggagtcaagaaggtggagcaaacacaacctctggtcctataaggacaccccaaattccagaatggctgatcatcttggcatccctcttggccttggctttgattcttgcagtttgcattgcagtcaacagtcgaagaagttgaagagattcaggttatagcataagaagagcactgtttcatcgtcttcttgctgttaggaggtctatgaagcagagaagaactttcctttggaaaacaactaaatgaagacagtcacctccctagaactgacacgtgggctgtttttatattcttgaaggccactctctccctacctgaaccaagacctataggtttacatgttatttacattttatatataatatatatatatatatatacacatacattatatatacacaatagtaattctagcaacagaggaaatgacctttaacaggggtataaatctaaatttataaaagtataaatctaaatttcttacccaagacacttaagatacattattttctccaggacgtaattcataggaatattaagccttttgtaaatgtccctttagatggtttctcataaggtaaaagaaacttatttccaagcaggaccacctttattgtgtccccagatcacctcacagggcagaaaaatgcccctcagtctgggagaagacctagagagaattatggactccttactggtttttggaaagcaaccaacagctaattccaacaccatgggcagcccatacagtctctaattatctgagaaaatcaaatgatgctgttataataattacgctggtacaagttaataaaagtgccatgttacagtcaaacagctatgttgctatctataccattgagggcatagttttaaaaagtagttatgctacctgattgtataaggaacaaaactgagagaaaaaatctaaaaggccgcctatgattgaatggaaagattttttttagttgaatttaaataatgtgacttgggggagcctttacaaagagtctttatacctcccttcagcttcctcattttcccttggattacttttggctcaattaaatatgaatttcct

SEQ ID NO: 2587 - DNA, 3853 bp, Homo sapiens
acgcgctcacacacagagagaaaatccttctgcctgttgatttatggaaacaattatgattctgctggagaacttttcagctgagaaatagtttgtagctacagtagaaaggctcaagttgcaccaggcagacaacagacatggaattcttatatatccagctgttagcaacaaaacaaaagtcaaatagcaaacagcgtcacagcaactgaacttactacgaactgtttttatgaggatttatcaacagagttatttaaggaggaatcctgtgttgttatcaggaactaaaaggataaggctaacaatttggaaagagcaagtactctttcttaaatcaatctacaattcacagataggaagaggtcaatgacctaggagtaacaatcaactcaagattcattttcattatgttattcatgaacacccggagcactacactataatgcacaaatggatactgacatggatcctgccaactttgctctacagatcatgctttcacattatctgtctagtgggtactatatctttagcttgcaatgacatgactccagagcaaatggctacaaatgtgaactgttccagccctgagcgacacacaagaagttatgattacatggaaggaggggatataagagtgagaagactcttctgtcgaacacagtggtacctgaggatcgataaaagaggcaaagtaaaagggacccaagagatgaagaataattacaatatcatggaaatcaggacagtggcagttggaattgtggcaatcaaaggggtggaaagtgaattctatcttgcaatgaacaaggaaggaaaactctatgcaaagaaagaatgcaatgaagattgtaacttcaaagaactaattctggaaaaccattacaacacatatgcatcagctaaatggacacacaacggaggggaaatgtttgttgccttaaatcaaaaggggattcctgtaagaggaaaaaaaacgaagaaagaacaaaaaacagcccactttcttcctatggcaataacttaattgcatatggtatataaagaacccagttccagcagggagatttctttaagtggactgttttctttcttctcaaaattttctttccttttattttttagtaatcaagaaaggctggaaaaactactgaaaaactgatcaagctggacttgtgcatttatgtttgttttaagacactgcattaaagaaagatttgaaaagtatacacaaaaatcagatttagtaactaaaggttgtaaaaaattgtaaaactggttgtacaatcatgatgttagtaacagtaatttttttcttaaattaatttacccttaagagtatgttagatttgattatctgataatgattatttaaatattcctatctgcttataaaatggctgctataataataataatacagatgttgttatataaggtatatcagacctacaggcttctggcaggatttgtcagataatcaagccacactaactatggaaaatgagcagcattttaaatgctttctagtgaaaaattataatctacttaaactctaatcagaaaaaaaattctcaaaaaaactattatgaaagtcaataaaatagataatttaacaaaagtacaggattagaacatgcttatacctataaataagaacaaaatttctaatgctgctcaagtggaaagggtattgctaaaaggatgtttccaaaaatcttgtatataagatagcaacagtgattgatgataatactgtacttcatcttacttgccacaaaataacattttataaatcctcaaagtaaaattgagaaatctttaagtttttttcaagtaacataatctatctttgtataattcatatttgggaatatggcttttaataatgttcttcccacaaataatcatgcttttttcctatggttacagcattaaactctattttaagttgtttttgaactttattgttttgttatttaagtttatgttatttataaaaaaaaaaccttaataagctgtatctgtttcatatgcttttaattttaaaggaataacaaaactgtctggctcaacggcaagtttccctcccttttctgactgacactaagtctagcacacagcacttgggccagcaaatcctggaagcagacaaaaataagagcctgaagcaatgcttacaatagatgtctcacacagaacaatacaaatatgtaaaaactctttcaccacatattcttgccaattaattggatcatataagtaaaatcattacaaatataagtatttacaggattttaaagttagaatatatttgaatgcatgggtagaaaatatcatattttaaaactatgtatatttaaatttagtaattttctaatctctagaaatctctgctgttcaaaaggtggcagcactgaaagttgttttcctgttagatggcaagagcacaatgcccaaaatagaagatgcagttaagaataaggggccctgaatgtcatgaaggcttgaggtcagcctacagataacaggattattacaaggatgaatttccacttcaaaagtctttcattggcagatcttggtagcactttatatgttcaccaatgggaggtcaatatttatctaatttaaaaggtatgctaaccactgtggttttaatttcaaaatatttgtcattcaagtccctttacataaatagtatttggtaatacatttatagatgagagttatatgaaaaggctaggtcaacaaaaacaatagattcatttaattttcctgtggttgacctatacgaccaggatgtagaaaactagaaagaactgcccttcctcagatatactcttgggagagagcatgaatggtattctgaactatcacctgattcaaggactttgctagctaggttttgaggtcaggcttcagtaactgtagtcttgtgagcatattgagggcagaggaggacttagtttttcatatgtgtttccttagtgcctagcagactatctgttcataatcagttttcagtgtgaattcactgaatgtttatagacaaaagaaaatacacactaaaactaatcttcattttaaaagggtaaaacatgactatacagaaatttaaatagaaatagtgtatatacatataaaatacaagctatgttaggaccaaatgctctttgtctatggagttatacttccatcaaattacatagcaatgctgaattaggcaaaaccaacatttagtggtaaatccattcctggtagtataagtcacctaaaaaagacttctagaaatatgtactttaattatttgtttttctcctatttttaaatttattatgcaaattttagaaaataaaatttgctctagttacacacctttagaattctagaatattaaaactgtaaggggcctccatccctcttactcatttgtagtctaggaaattgagattttgatacacctaaggtcacgcagctgggtagatatacagctgtcacaagagtctagatcagttagcacatgctttctactcttcgattattagtattattagctaatggtctttggcatgtttttgttttttatttctgttgagatatagcctttacatttgtacacaaatgtgactatgtcttggcaatgcacttcatacacaatgactaatctatactgtgatgatttgactcaaaaggagaaaagaaattatgtagttttcaattctgattcctattcaccttttgtttatgaatggaaagctttgtgcaaaatatacatataagcagagtaagccttttaaaaatgttctttgaaagataaaattaaatacatgagtttctaacaattaga

SEQ ID NO: 2588 - DNA, 2938 bp, Homo sapiens
gagagaaaaagtaaaagaccgaagaaggaggctggagagaccaggatccttccagctgaacaaagtcagccacaaagcagactagccagccggctacaattggagtcagagtcccaaagacatgggcttgttagagtgctgtgcaagatgtctggtaggggccccctttgcttccctggtggccactggattgtgtttctttggggtggcactgttctgtggctgtggacatgaagccctcactggcacagaaaagctaattgagacctatttctccaaaaactaccaagactatgagtatctcatcaatgtgatccatgccttccagtatgtcatctatggaactgcctctttcttcttcctttatggggccctcctgctggctgagggcttctacaccaccggcgcagtcaggcagatctttggcgactacaagaccaccatctgcggcaagggcctgagcgcaacggtaacagggggccagaaggggaggggttccagaggccaacatcaagctcattctttggagcgggtgtgtcattgtttgggaaaatggctaggacatcccgacaagtttgtgggcatcacctatgccctgaccgttgtgtggctcctggtgtttgcctgctctgctgtgcccgtgtacatttacttcaacacctggaccacctgcgactctattgccttccccagcaagacctctgccagtataggcagtctctgtgctgacgccagaatgtatggtgttctcccatggattgctttccctggcaaggtttgtggctccaaccttctgtccatctgcaaaacagctgagttccaaatgaccttccacctgtttattgctgcatttgtgggggctgcagctacactggtttccctgctcaccttcatgattgctgccacttacaactttgccgtccttaaactcatgggccgaggcaccaagttctgatcccccgtagaaatccccctttctctaatagcgaggctctaaccacacagcctacaatgctgcgtctcccatcttaactctttgcctttgccaccaactggccctcttcttacttgatgagtgtaacaagaaaggagagtcttgcagtgattaagtctctctttggactctcccctcttatgtacctcttttagtcattttgcttcatagctggttcctgctagaaatgggaaatgcctaagaagatgacttcccaactgcaagtcacaaaggaatggaggctctaattgaattttcaagcatctcctgaggatcagaaagtaatttcttctcaaagggtacttccactgatggaaacaaagtggaaggaaagatgctcaggtacagagaaggaatgtctttggtcctctcgccatctataggggccaaatatattctctttggtgtacaaaatgaattcattctggtctctctattaccactgaagatagaagaaaaaagaatgtcagaaaaacaataagagcgtttgcccaaatctgcctattgcagctgggagaagggggtcaaagcaaggatctttcacccacagaaagagagcactgaccccgatggcgatggactactgaagccctaactcagccaaccttacttacagcataagggagcgtagaatctgtgtagacgaagggggcatctggccttacacctcgttagggaagagaaacagggtgttgtcagcatcttctcactcccttctccttgataacagctaccatgacaaccctgtggtttccaaggagctgagaatagaaggaaactagcttacatgagaacagactggcctgaggagcagcagttgctggtggctaatggtgtaacctgagatgccctctggtagacacaggatagataactctttggatagcatgtctttttttctgttaattagttgtgtactctggcctctgtcatatcttcacaatggtgctcatttcatggggtattatccattcagtcatcgtaggtgatttgaaggtcttgatttgttttagaatgatgcacatttcatgtattcccagtttgtttattacttatttgggttgcatcagaaatgtctggagaataattctttgattatgactgttttttaaactaggaaaattggacattaagcatcacaaatgatattaaaaattggctagttgaatctattgggattttctacaagtattctgcctttgcagaaacagatttggtgaatttgaatctcaatttgagtaatctgatcgttctctctagctaatgggaaaatgattttacttagcaatgttatcttggtgtgttaagagttaggtttaacataaaggttattttctcctgatatagatcacataacagaatgcaccagtcatcaggctattcagttggtaagcttccaggaaaaaggacaggcagaaacgagtttgagacctgaatagctcccagatttcagtcttttcctgtttttgttaactttgggttaaaaaaaaaaaaaagtctgattggttttaattgaaggaaagatttgtactacagttcttctgttgtaaagagttgtgttgttcttttcccccaaagtggtttcagcaatatttaaggagatgtaagaggctttacaaaaaaacacttgatacttgttttcaaaccagtatacaagataagcttccaggctgcatagaaggaggagagggaaaatgttttgtaagaaaccaatcaagataaaggacagtgaagtaatccgtaccttgtgttttgttttgatttaataacataacaaataaccaacccttccctgaaaacctcacatgcatacatacacatatatacacacacaaagagagttaatcaactgaaagtgtttccttcatttctgatatagaattgcaattttaacacacataaaggataaacttttagaaacttatcttacaaagtgtattttat

SEQ ID NO: 2589 - DNA, 819 bp, Homo sapiens
actcccaaaagagcgcccaagaagaaaatggccataagtggagtccctgtgctaggatttttcatcatagctgtgctgatgagcgctcaggaatcatgggctatcaaagaagaacatgtgatcatccaggccgagttctatctgaatcctgaccaatcaggcgagtttatgtttgactttgatggtgatgagattttccatgtggatatggcaaagaaggagacggtctggcggcttgaagaatttggacgatttgccagctttgaggctcaaggtgcattggccaacatagctgtggacaaagccaacttggaaatcatgacaaagcgctccaactatactccgatcaccaatgtacctccagaggtaactgtgctcacgaacagccctgtggaactgagagagcccaacgtcctcatctgtttcatagacaagttcaccccaccagtggtcaatgtcacgtggcttcgaaatggaaaacctgtcaccacaggagtgtcagagacagtcttcctgcccagggaagaccaccttttccgcaagttccactatctccccttcctgccctcaactgaggacgtttacgactgcagggtggagcactggggcttggatgagcctcttctcaagcactgggagtttgatgctccaagccctctcccagagactacagagaacgtggtgtgtgccctgggcctgactgtgggtctggtgggcatcattattgggaccatcttcatcatcaagggattgcgcaaaagcaatgcagcagaacgcagggggcctctgtaaggcacatggaggtgatggtgtttctta

SEQ ID NO: 2590 - DNA, 744 bp, Homo sapiens
actcccaaaagagcgcccaagaagaaaatggccataagtggagtccctgtgctaggatttttcatcatagctgtgctgatgagcgctcaggaatcatgggctatcaaagaagaacatgtgatcatccaggccgagttctatctgaatcctgaccaatcaggcgagtttatgtttgactttgatggtgatgagattttccatgtggatatggcaaagaaggagacggtctggcggcttgaagaatttggacgatttgccagctttgaggctcaaggtgcattggccaacatagctgtggacaaagccaacttggaaatcatgacaaagcgctccaactatactccgatcaccaatgacaagttcaccccaccagtggtcaatgtcacgtggcttcgaaatggaaaacctgtcaccacaggagtgtcagagacagtcttcctgcccagggaagaccaccttttccgcaagttccactatctccccttcctgccctcaactgaggacgtttacgactgcagggtggagcactggggcttggatgagcctcttctcaagcactgggagtttgatgctccaagccctctcccagagactacagagaacgtggtgtgtgccctgggcctgactgtgggtctggtgggcatcattattgggaccatcttcatcatcaagggattgcgcaaaagcaatgcagcagaacgcagggggcctctgtaaggcacatggaggtgatggtgtttctta

SEQ ID NO: 2591 - DNA, 1238 bp, Homo sapiens
cgtggaggccggggcggggcgggcgcagccggcgctgagcttgcagggccgctcccctcacccgcccccttcgagtccccgggcttcaccccacccggcccgtgggggagtatctgtcctgccgccttcgcccacgccctgcactccgggaccgtccctgcgcgctctgggcgcaccatggcccgcggggctgcgctggcgctgctgctcttcggcctgctgggtgttctggtcgccgccccggatggtggtttcgatttatccgatgcccttcctgacaatgaaaacaagaaacccactgcaatccccaagaaacccagtgctggggatgactttgacttaggagatgctgttgttgatggagaaaatgacgacccacgaccaccgaacccacccaaaccgatgccaaatccaaaccccaaccaccctagttcctccggtagcttttcagatgctgaccttgcggatggcgtttcaggtggagaaggaaaaggaggcagtgatggtggaggcagccacaggaaagaaggggaagaggccgacgccccaggcgtgatccccgggattgtgggggctgtcgtggtcgccgtggctggagccatctctagcttcattgcttaccagaaaaagaagctatgcttcaaagaaaatgcagaacaaggggaggtggacatggagagccaccggaatgccaacgcagagccagctgttcagcgtactcttttagagaaatagaagattgtcggcagaaacagcccaggcgttggcagcagggttagaacagctgcctgaggctcctccctgaaggacacctgcctgagagcagagatggaggccttctgttcacggcggattctttgttttaatcttgcgatgtgctttgcttgttgctgggcggatgatgtttactaacgatgaattttacatccaaagggggataggcacttggacccccattctccaaggcccgggggggcggtttcccatgggatgtgaaaggctggccattattaagtccctgtaactcaaatgtcaaccccaccgaggcacccccccgtcccccagaatcttggctgtttacaaatcacgtgtccatcgagcacgtctgaaacccctggtagccccgacttctttttaattaaaataaggtaagcccttcaatttgtttcttcaatatttctttcatttgtagggatatttgtttttcatatcagactaataaaaagaaattagaaacc

SEQ ID NO: 2592 - DNA, 1755 bp, Homo sapiens
ctattgcagtatctttcagcttccagtcttatctgaagaccccggcaccaaagtgaccaggaggcagagaagaacttcagaggagtctcgtcttgggctgcccgtgggtgagtgggagggtccgggactgcagaccggtggcgatggccactctcccagcagcagaaacctggatagacgggggtggaggcgtgggtgcagacgccgtgaacctgaccgcctcgctagctgccggggcggccacgggggcagttgagactgggtggctgcaactgctggaccaagctggcaacctctcctcctccccttccgcgctgggactgcctgtggcttcccccgcgccctcccagccctgggccaacctcaccaaccagttcgtgcagccgtcctggcgcatcgcgctctggtccctggcgtatggtgtggtggtggcagtggcagttttgggaaatctcatcgtcatctggatcatcctggcccacaagcgcatgaggactgtcaccaactacttccttgtgaacctggctttctccgacgcctccatggccgccttcaacacgttggtcaatttcatctacgcgcttcatagcgagtggtactttggcgccaactactgccgcttccagaacttctttcctatcacagctgtgttcgccagcatctactccatgacggccattgcggtggacaggtatatggctattattgatcccttgaaacccagactgtctgctacagcaaccaagattgtcattggaagtatttggattctagcatttctacttgccttccctcagtgtctttattccaaaaccaaagtcatgccaggccgtactctctgctttgtgcaatggccagaaggtcccaaacaacatttcacttaccatattatcgtcattatactggtgtactgtttcccattgctcatcatgggtattacatacaccattgttggaattactctctggggaggagaaatcccaggagatacctgtgacaagtatcatgagcagctaaaggccaaaagaaaggttgtcaaaatgatgattattgttgtcatgacatttgctatctgctggctgccctatcatatttacttcattctcactgcaatctatcaacaactaaatagatggaaatacatccagcaggtctacctggctagcttttggctggcaatgagctcaaccatgtacaatcccatcatctactgctgtctgaataaaagatttcgagctggcttcaagagagcatttcgctggtgtcctttcatcaaagtttccagctatgatgagctagagctcaagaccaccaggtttcatccaaaccggcaaagcagtatgtacaccgtgaccagaatggagtccatgacagtcgtgtttgaccccaacgatgcagacaccaccaggtccagtcggaagaaaagagcaacgccaagagacccaagtttcaatggctgctctcgcaggaattccaaatctgcctccgccacttcaagtttcataagctcaccctatacctctgtggatgaatattcttaattccatttcctgaggtaaaagattagtgtgagaccatcatggtgccagtctaggaccccattctcctatttatcagtcctgtcctatataccctctagaaacagaaagcaatttttaggcagctatggtcaaattgagaaaggtagtgtataaatgtgacaaagacactaataacatgttagcctccacccaaaataaaatgggctttaaattt

SEQ ID NO: 2593 - DNA, 3175 bp, Homo sapiens
ggttcctggtcatacaccagtactaccaaggacagcttttttcctgcaagatctgttacctaaagcaataaaaaatggccagaggatcagtgtccgatgaggaaatgatggagctcagagaagcttttgccaaagttgatactgatggcaatggatacatcagcttcaatgagttgaatgacttgttcaaggctgcttgcttgcctttgcctgggtatagagtacgagaaattacagaaaacctgatggctacaggtgatctggaccaagatggaaggatcagctttgatgagtttatcaagattttccatggcctaaaaagcacagatgttgccaagacctttagaaaagcaatcaataagaaggaagggatttgtgcaatcggtggtacttcagagcagtctagcgttggcacccaacactcctattcagaggaagaaaagtatgcctttgtcaactggataaacaaagccctggaaaatgatcctgattgtcggcatgtcatcccaatgaacccaaacacgaatgatctctttaatgctgttggagatggcattgtcctttgtaaaatgatcaacctgtcagtgccagacacaattgatgaaagaacaatcaacaaaaagaagctaacccctttcaccattcaggaaaatctgaacttggctctgaactctgcctcagccatcgggtgccatgtggtcaacataggggctgaggacctgaaggaggggaagccttatctggtcctgggacttctgtggcaagtcatcaagattgggttgtttgctgacattgaactcagcagaaatgaagctctgattgctcttttgagagaaggtgagagcctggaggatttgatgaaactctcccctgaagagctcttgctgaggtgggctaattaccacctggaaaatgcaggctgcaacaaaattggcaacttcagtactgacatcaaggactcaaaagcttattaccacctgcttgagcaggtggctccaaaaggagatgaagaaggtgttcctgctgttgttattgacatgtcaggactgcgggagaaggatgacatccagagggcagaatgcatgctgcagcaggcggagaggctgggctgccggcagtttgtcacagccacagatgttgtccgagggaaccccaagttgaacttggcttttattgccaacctctttaacagataccctgccctgcacaaaccagagaaccaggacattgactggggggctcttgaaggtgagacgagagaagagcggacatttaggaactggatgaactccctgggtgttaaccctcgagtcaatcatttgtacagtgacttatcagatgccctggtcatcttccagctctatgaaaagatcaaagttcctgttgactggaacagagtaaacaaaccgccataccccaaactgggaggcaatatgaagaagcttgagaattgtaactacgcggtagaattggggaagaatcaagcgaagttctccctggttggcatcggtggacaagatctcaatgaaggaaaccgcactctcacactggccttgatttggcagctaatgagaaggtatacactgaatatcctcgaagaaattggtggtggccagaaggtcaatgatgacattattgtcaactgggtgaatgaaacattgagggaagcagagaaaagttcatccatctctagtttcaaggacccgaagattagtacaagtctgcctgttctggacctcatcgatgccatccaaccaggttccattaactatgaccttctgaagacagaaaatctgaatgatgatgagaaactcaacaatgcaaaatatgccatctctatggcccgaaaaattggagcaagagtgtatgccctgccagaagacctggttgaagtgaaccccaaaatggtcatgaccgtgtttgcctgcctcatggggaaaggaatgaagagggtgtgaggccaatggggctgggtgggaggcggtgcactcactcctgactgcccggcacagatgctccagggatgattcaagccattccaaagttcaacttggtgacactctataagattccaaaaagcacatattagtgcagccaagtagcctctcctgtatttaacaaaaagtgcttcattctttgcaggaggcccaacctcctatatataggtttctattcttgatttatttgcttcttcgaaaatctagaggaaaagaaagaagttattttccaggtacccttctcgcttttgccattagccaaggatagaagctgcagtggtattaattttgatataatctttcaaaccagcttgttgtggcttcccttttctttgttcaagatgagggccaggaggggaaacatcacacctgccctaaaccctgttcctggaggtcagcatttgatctgttgcaagcccctctttctgtcccctcttcctaccctgcctcccatgactttgctcctcacacttttggaaccatgccttccgggggggcccatctcttctggcggtccttgtctctgggccacttggagtgtgtgataaatcagtcaagctgttgaagtctcaggagtctctggtagcctgcagaagtaagcctcatcatcagagcctttcctcaaaactggagtcccaaatgtcatcaggttttgttttttttcagccactaagaacccctctgcttttaactctagaatttgggcttggaccagatctaacatcttgaatactctgccctctagagccttcagccttaatggaaggttggatccaaggaggtgtaatggaatcggaatcaagccactcggcaggcatggagctataactaagcatccttagggttctgcctctccaggcattagccctcacattagatctagttactgtggtatggctaatacctgtcaacatttggaggcaatcctaccttgcttttgcttctagagcttagcatatctgattgttgtcaggccatattatcaatgtttacttttttggtactataaaagctttctgccacccctaaactccaggggggacaatatgtgccaatcaatagcacccctactcacatacacacacacctagccagctgtcaagggcagaatgaatctatgctggataagaaatggtggaactgcgttatgaagagctaatttactggacaaagaattc

SEQ ID NO: 2594 - DNA, 1713 bp, Homo sapiens
atggctacaggtgatctggaccaagatggaaggatcagctttgatgagtttatcaagattttccatggcctaaaaagcacagatgttgccaagacctttagaaaagcaatcaataagaaggaagggatttgtgcaatcggtggtacttcagagcagtctagcgttggcacccaacactcctattcagaggaagaaaagtatgcctttgtcaactggataaacaaagccctggaaaatgatcctgattgtcggcatgtcatcccaatgaacccaaacacgaatgatctctttaatgctgttggagatggcattgtcctttgtaaaatgatcaacctgtcagtgccagacacaattgatgaaagaacaatcaacaaaaagaagctaacccctttcaccattcaggaaaatctgaacttggctctgaactctgcctcagccatcgggtgccatgtggtcaacataggggctgaggacctgaaggaggggaagccttatctggtcctgggacttctgtggcaagtcatcaagattgggttgtttgctgacattgaactcagcagaaatgaagctctgattgctcttttgagagaaggtgagagcctggaggatttgatgaaactctcccctgaagagctcttgctgaggtgggctaattaccacctggaaaatgcaggctgcaacaaaattggcaacttcagtactgacatcaaggactcaaaagcttattaccacctgcttgagcaggtggctccaaaaggagatgaagaaggtgttcctgctgttgttattgacatgtcaggactgcgggagaaggatgacatccagagggcagaatgcatgctgcagcaggcggagaggctgggctgccggcagtttgtcacagccacagatgttgtccgagggaaccccaagttgaacttggcttttattgccaacctctttaacagataccctgccctgcacaaaccagagaaccaggacattgactggggggctcttgaaggtgagacgagagaagagcggacatttaggaactggatgaactccctgggtgttaaccctcgagtcaatcatttgtacagtgacttatcagatgccctggtcatcttccagctctatgaaaagatcaaagttcctgttgactggaacagagtaaacaaaccgccataccccaaactgggaggcaatatgaagaagcttgagaattgtaactacgcggtagaattggggaagaatcaagcgaagttctccctggttggcatcggtggacaagatctcaatgaaggaaaccgcactctcacactggccttgatttggcagctaatgagaaggtatacactgaatatcctcgaagaaattggtggtggccagaaggtcaatgatgacattattgtcaactgggtgaatgaaacattgagggaagcagagaaaagttcatccatctctagtttcaaggacccgaagattagtacaagtctgcctgttctggacctcatcgatgccatccaaccaggttccattaactatgaccttctgaagacagaaaatctgaatgatgatgagaaactcaacaatgcaaaatatgccatctctatggcccgaaaaattggagcaagagtgtatgccctgccagaagacctggttgaagtgaaccccaaaatggtcatgaccgtgtttgcctgcctcatggggaaaggaatgaagagggtgtga

SEQ ID NO: 2595 - DNA, 2777 bp, Homo sapiens
gaattcgggaaaagaccgaagaaggaggctggagagaccaggatccttccagctgaacaaagtcagccacaaagcagactagccagccggctacaattggagtcagagtcccaaagacatgggcttgttagagtgctgtgcaagatgtctggtaggggccccctttgcttccctggtggccactggattgtgtttctttggggtggcactgttctgtggctgtggacatgaagccctcactggcacagaaaagctaattgagacctatttctccaaaaactaccaagactatgagtatctcatcaatgtgatccatgccttccagtatgtcatctatggaactgcctctttcttcttcctttatggggccctcctgctggctgagggcttctacaccaccggcgcagtcaggcagatctttggcgactacaagaccaccatctgcggcaagggcctgagcgcaacggtaacagggggccagaaggggaggggttccagaggccaacatcaagctcattctttggagcgggtgtgtacttgtttgggaaaatggctaggacatcccgacaagtttgtgggcatcacctatgccctgaccgttgtgtggctcctggtgtttgcctgctctgctgtgcctgtgtacatttacttcaacacctggaccacctgccagtctattgccttccccagcaagacctctgccagtataggcagtctctgtgctgacgccagaatgtatggtgttctcccatggaatgctttccctggcaaggtttgtggctccaaccttctgtccatctgcaaaacagctgagttccaaatgaccttccacctgtttattgctgcatttgtgggggctgcagctacactggtttccctgctcaccttcatgattgctgccacttacaactttgccgtccttaaactcatgggccgaggcaccaagttctgatcccccgtagaaatccccctttctctaatagcgaggctcctctaaccacacagcctacaatgctgcgtctcccatcttaactctttgcctttgccaccaactggccctcttcttacttgatgagtgtaacaagaaaggagagtcttgcagtgattaaggtctctctttggactctcccctcttatgtacctcttttagtcattttgcttcatagctggttcctgctagaaatgggaaatgcctaagaagatgacttcccaactcgaagtcacaaaggaatggaggctctaattgaattttcaagcatctcctgaggatcagaaagtaatttcttctcaaagggtacttccactgatggaaacaaagtggaaggaaagaaggtcaggtacagagaaggaatgtctttggtcctcttgccatctataggggccaaatatattctctttggtgtacaaaatggaattcattctggtctctctattaccactgaagatagaagaaaaaagaatgtcagaaaaacaataagagcgtttgcccaaatctgcctattgcagctgggagaagggggtcaaagcaaggatctttcacccacagaaagagagcactgaccccgatggcgatggactactgaagccctaactcagccaaccttacttacagcataagggagcgtagaatctgtgtagacgaagggggcatctggccttacacctcgttagggaagagaaacagggtgttgtcagcatcttctcactcccttctccttgataacagctaccatgacaaccctgtggtttccaaggagctgagaatagaaggaaactagcttacatgagaacagactggcctgaggagcagcagttcctggtggctaatggtgtaacctgagatggccctctggtagacacaggatagataactctttggatagcatgtctttttttctgttaattagttgtgtactctggcctctgtcatatcttcacaatggtgctcatttcatggggtattatccattcagtcatcgtaggtgatttgaaggtcttgatttgttttagaatgatgcacatttcatgtattccagtttgtttattacttatttggggttgcatcagaaatgtctggagaataattctttgattatgactgttttttaaactaggaaaattggacattaagcatcacaaatgatattaaaaattggctagttgaatctattgggattttctacaagtattctgcctttgcagaaacagatttggtgaatttgaatctcaatttgagtaatctgatcgttctttctagctaatggaaaatgattttacttagcaatgttatcttggtgtgttaagagttaggtttaacataaaggttattttctcctgatatagatcacataacagaatgcaccagtcatcagctattcagttggtaagcttccaggaaaaaggacaggcagaaagagtttgagacctgaatagctcccagatttcagtcttttcctgtttttgttaactttgggttaaaaaaaaaaaaagtctgattggttttaattgaaggaaagatttgtactacagttcttttgttgtaaagagttgtgttgttcttttcccccaaagtggtttcagcaatatttaaggagatgtaagagctttacaaaaagacacttgatacttgttttcaaaccagtatacaagataagcttccaggctgcatagaaggaggagagggaaaatgttttgtaagaaaccaatcaagataaaggacagtgaagtaatccgtaccttgtgttttgttttgatttaataacataacaaataaccaa

SEQ ID NO: 2596 - DNA, 729 bp, Homo sapiens
atgggcttgttagagtgctgtgcaagatgtctggtaggggccccctttgcttccctggtggccactggattgtgtttctttggggtggcactgttctgtggctgtggacatgaagccctcactggcacagaaaagctaattgagacctatttctccaaaaactaccaagactatgagtatctcatcaatgtgatccatgccttccagtatgtcatctatggaactgcctctttcttcttcctttatggggccctcctgctggctgagggcttctacaccaccggcgcagtcaggcagatctttggcgactacaagaccaccatctgcggcaagggcctgagcgcaacgtttgtgggcatcacctatgccctgaccgttgtgtggctcctggtgtttgcctgctctgctgtgcctgtgtacatttacttcaacacctggaccacctgccagtctattgccttccctagcaagacctctgccagtataggcagtctctgtgctgatgccagaatgtatggtgttctcccatggaatgctttccctggcaaggtttgtggctccaaccttctgtccatctgcaaaacagctgagttccaaatgaccttccacctgtttattgctgcatttgtgggtgctgcagctacactggtttccctgctcaccttcatgattgctgccacttacaactttgccgtccttaaactcatgggccgaggcaccaagttctga

SEQ ID NO: 2597 - DNA, 3309 bp, Homo sapiens
ctgcagggggggggggggggggggggggggggggggggcgcagcacggctcagaccgaggcgcacaggctcgcagctccgggcgcctagcgcccggtccccgccgcgacgcgccaccgtccctgccggcgcctccgcgccttcgaaatgagggtcctgggtgggcgctgcggggcgccgctggcgtgtctcctcctagtgcttcccgtctcagaggcaaaccttctgtcaaagcaacaggcttcacaagtcctggttaggaagcgtcgtgcaaattctttacttgaagaaaccaaacagggtaatcttgaaagagaatgcatcgaagaactgtgcaataaagaagaagccagggaggtctttgaaaatgacccggaaacggattatttttatccaaaatacttagtttgtcttcgctcttttcaaactgggttattcactgctgcacgtcagtcaactaatgcttatcctgacctaagaagctgtgtcaatgccattccagaccagtgtagtcctctgccatgcaatgaagatggatatatgagctgcaaagatggaaaagcttcttttacttgcacttgtaaaccaggttggcaaggagaaaagtgtgaatttgacataaatgaatgcaaagatccctcaaatataaatggaggttgcagtcaaatttgtgataatacacctggaagttaccactgttcctgtaaaaatggttttgttatgctttcaaataagaaagattgtaaagatgtggatgaatgctctttgaagccaagcatttgtggcacagctgtgtgcaagaacatcccaggagattttgaatgtgaatgccccgaaggctacagatataatctcaaatcaaagtcttgtgaagatatagatgaatgctctgagaacatgtgtgctcagctttgtgtcaattaccctggaggttacacttgctattgtgatgggaagaaaggattcaaacttgcccaagatcagaagagttgtgaggttgtttcagtgtgccttcccttgaaccttgacacaaagtatgaattactttacttggcggagcagtttgcaggggttgttttatatttaaaatttcgtttgccagaaatcagcagattttcagcagaatttgatttccggacatatgattcagaaggcgtgatactgtacgcagaatctatcgatcactcagcgtggctcctgattgcacttcgtggtggaaagattgaagttcagcttaagaatgaacatacatccaaaatcacaactggaggtgatgttattaataatggtctatggaatatggtgtctgtggaagaattagaacatagtattagcattaaaatagctaaagaagctgtgatggatataaataaacctggacccctttttaagccggaaaatggattgctggaaaccaaagtatactttgcaggattccctcggaaagtggaaagtgaactcattaaaccgattaaccctcgtctagatggatgtatacgaagctggaatttgatgaagcaaggagcttctggaataaaggaaattattcaagaaaaacaaaataagcattgcctggttactgtggagaagggctcctactatcctggttctggaattgctcaatttcacatagattataataatgtatccagtgctgagggttggcatgtaaatgtgaccttgaatattcgtccatccacgggcactggtgttatgcttgccttggtttctggtaacaacacagtgccctttgctgtgtccttggtggactccacctctgaaaaatcacaggatattctgttatctgttgaaaatactgtaatatatcggatacaggccctaagtctatgttccgatcaacaatctcatctggaatttagagtcaacagaaacaatctggagttgtcgacaccacttaaaatagaaaccatctcccatgaagaccttcaaagacaacttgccgtcttggacaaagcaatgaaagcaaaagtggccacatacctgggtggccttccagatgttccattcagtgccacaccagtgaatgccttttataatggctgcatggaagtgaatattaatggtgtacagttggatctggatgaagccatttctaaacataatgatattagagctcactcatgtccatcagtttggaaaaagacaaagaattcttaaggcatcttttctctgcttataataccttttccttgtgtgtaattatacttatgtttcaataacagctgaagggttttatttacaatgtgcagtctttgattattttgtggtcctttcctgggatttttaaaaggtcctttgtcaaggaaaaaaattctgttgtgatataaatcacagtaaagaaattcttacttctcttgctatctaagaatagtgaaaaataacaattttaaatttgaatttttttcctacaaatgacagtttcaatttttgtttgtaaaactaaattttaattttatcatcatgaactagtgtctaaatacctatgtttttttcagaaagcaaggaagtaaactcaaacaaaagtgcgtgtaattaaatactattaatcataggcagatactattttgtttatgtttttgtttttttcctgatgaaggcagaagagatggtggtctattaaatatgaattgaatggagggtcctaatgccttatttcaaaacaattcctcagggggaccagctttggcttcatctttctcttgtgtggcttcacatttaaaccagtatctttattgaattagaaaacaagtgggacatattttcctgagagcagcacaggaatcttcttcttggcagctgcagtctgtcaggatgagatatcagattaggttggataggtggggaaatctgaagtgggtacattttttaaattttgctgtgtgggtcacacaaggtctacattacaaaagacagaattcagggatggaaaggagaatgaacaaatgtgggagttcatagttttccttgaatccaacttttaattaccagagtaagttgccaaaatgtgattgttgaagtacaaaaggaactatgaaaaccagaacaaattttaacaaaaggacaaccacagagggatatagtgaatatcgtatcattgtaatcaaagaagtaaggaggtaagattgccacgtgcctgctggtactgtgatgcatttcaagtggcagttttatcacgtttgaatctaccattcatagccagatgtgtatcagatgtttcactgacagtttttaacaataaattcttttcactgtattttatatcacttataataaatcggtgtataatttt

SEQ ID NO: 2598 - DNA, 2653 bp, Homo sapiens; identical to SEQ ID NO: 2397

SEQ ID NO: 2599 - DNA, 7941 bp, Homo sapiens
cacacatacgcacgcacgatctcacttcgatctatacactggaggattaaaacaaacaaacaaaaaaaacatttccttcgctccccctccctctccactctgagaagcagaggagccgcacggcgaggggccgcagaccgtctggaaatgcgaatcctaaagcgtttcctcgcttgcattcagctcctctgtgtttgccgcctggattgggctaatggatactacagacaacagagaaaacttgttgaagagattggctggtcctatacaggagcactgaatcaaaaaaattggggaaagaaatatccaacatgtaatagcccaaaacaatctcctatcaatattgatgaagatcttacacaagtaaatgtgaatcttaagaaacttaaatttcagggttgggataaaacatcattggaaaacacattcattcataacactgggaaaacagtggaaattaatctcactaatgactaccgtgtcagcggaggagtttcagaaatggtgtttaaagcaagcaagataacttttcactggggaaaatgcaatatgtcatctgatggatcagagcatagtttagaaggacaaaaatttccacttgagatgcaaatctactgctttgatgcggaccgattttcaagttttgaggaagcagtcaaaggaaaagggaagttaagagctttatccattttgtttgaggttgggacagaagaaaatttggatttcaaagcgattattgatggagtcgaaagtgttagtcgttttgggaagcaggctgctttagatccattcatactgttgaaccttctgccaaactcaactgacaagtattacatttacaatggctcattgacatctcctccctgcacagacacagttgactggattgtttttaaagatacagttagcatctctgaaagccagttggctgttttttgtgaagttcttacaatgcaacaatctggttatgtcatgctgatggactacttacaaaacaattttcgagagcaacagtacaagttctctagacaggtgttttcctcatacactggaaaggaagagattcatgaagcagtttgtagttcagaaccagaaaatgttcaggctgacccagagaattataccagccttcttgttacatgggaaagacctcgagtcgtttatgataccatgattgagaagtttgcagttttgtaccagcagttggatggagaggaccaaaccaagcatgaatttttgacagatggctatcaagacttgggtgctattctcaataatttgctacccaatatgagttatgttcttcagatagtagccatatgcactaatggcttatatggaaaatacagcgaccaactgattgtcgacatgcctactgataatcctgaacttgatcttttccctgaattaattggaactgaagaaataatcaaggaggaggaagagggaaaagacattgaagaaggcgctattgtgaatcctggtagagacagtgctacaaaccaaatcaggaaaaaggaaccccagatttctaccacaacacactacaatcgcatagggacgaaatacaatgaagccaagactaaccgatccccaacaagaggaagtgaattctctggaaagggtgatgttcccaatacatctttaaattccacttcccaaccagtcactaaattagccacagaaaaagatatttccttgacttctcagactgtgactgaactgccacctcacactgtggaaggtacttcagcctctttaaatgatggctctaaaactgttcttagatctccacatatgaacttgtcggggactgcagaatccttaaatacagtttctataacagaatatgaggaggagagtttattgaccagtttcaagcttgatactggagctgaagattcttcaggctccagtcccgcaacttctgctatcccattcatctctgagaacatatcccaagggtatatattttcctccgaaaacccagagacaataacatatgatgtccttataccagaatctgctagaaatgcttccgaagattcaacttcatcaggttcagaagaatcactaaaggatccttctatggagggaaatgtgtggtttcctagctctacagacataacagcacagcccgatgttggatcaggcagagagagctttctccagactaattacactgagatacgtgttgatgaatctgagaagacaaccaagtccttttctgcaggcccagtgatgtcacagggtccctcagttacagatctggaaatgccacattattctacctttgcctacttcccaactgaggtaacacctcatgcttttaccccatcctccagacaacaggatttggtctccacggtcaacgtggtatactcgcagacaacccaaccggtatacaatggtgagacacctcttcaaccttcctacagtagtgaagtctttcctctagtcacccctttgttgcttgacaatcagatcctcaacactacccctgctgcttcaagtagtgattcggccttgcatgctacgcctgtatttcccagtgtcgatgtgtcatttgaatccatcctgtcttcctatgatggtgcacctttgcttccattttcctctgcttccttcagtagtgaattgtttcgccatctgcatacagtttctcaaatccttccacaagttacttcagctaccgagagtgataaggtgcccttgcatgcttctctgccagtggctgggggtgatttgctattagagcccagccttgctcagtattctgatgtgctgtccactactcatgctgcttcagagacgctggaatttggtagtgaatctggtgttctttataaaacgcttatgttttctcaagttgaaccacccagcagtgatgccatgatgcatgcacgttcttcagggcctgaaccttcttatgccttgtctgataatgagggctcccaacacatcttcactgtttcttacagttctgcaatacctgtgcatgattctgtgggtgtaacttatcagggttccttatttagcggccctagccatataccaatacctaagtcttcgttaataaccccaactgcatcattactgcagcctactcatgccctctctggtgatggggaatggtctggagcctcttctgatagtgaatttcttttacctgacacagatgggctgacagcccttaacatttcttcacctgtttctgtagctgaatttacatatacaacatctgtgtttggtgatgataataaggcgctttctaaaagtgaaataatatatggaaatgagactgaactgcaaattccttctttcaatgagatggtttacccttctgaaagcacagtcatgcccaacatgtatgataatgtaaataagttgaatgcgtctttacaagaaacctctgtttccatttctagcaccaagggcatgtttccagggtcccttgctcataccaccactaaggtttttgatcatgagattagtcaagttccagaaaataacttttcagttcaacctacacatactgtctctcaagcatctggtgacacttcgcttaaacctgtgcttagtgcaaactcagagccagcatcctctgaccctgcttctagtgaaatgttatctccttcaactcagctcttattttatgagacctcagcttcttttagtactgaagtattgctacaaccttcctttcaggcttctgatgttgacaccttgcttaaaactgttcttccagctgtgcccagtgatccaatattggttgaaacccccaaagttgataaaattagttctacaatgttgcatctcattgtatcaaattctgcttcaagtgaaaacatgctgcactctacatctgtaccagtttttgatgtgtcgcctacttctcatatgcactctgcttcacttcaaggtttgaccatttcctatgcaagtgagaaatatgaaccagttttgttaaaaagtgaaagttcccaccaagtggtaccttctttgtacagtaatgatgagttgttccaaacggccaatttggagattaaccaggcccatcccccaaaaggaaggcatgtatttgctacacctgttttatcaattgatgaaccattaaatacactaataaataagcttatacattccgatgaaattttaacctccaccaaaagttctgttactggtaaggtatttgctggtattccaacagttgcttctgatacatttgtatctactgatcattctgttcctataggaaatgggcatgttgccattacagctgtttctccccacagagatggttctgtaacctcaacaaagttgctgtttccttctaaggcaacttctgagctgagtcatagtgccaaatctgatgccggtttagtgggtggtggtgaagatggtgacactgatgatgatggtgatgatgatgatgacagagatagtgatggcttatccattcataagtgtatgtcatgctcatcctatagagaatcacaggaaaaggtaatgaatgattcagacacccacgaaaacagtcttatggatcagaataatccaatctcatactcactatctgagaattctgaagaagataatagagtcacaagtgtatcctcagacagtcaaactggtatggacagaagtcctggtaaatcaccatcagcaaatgggctatcccaaaagcacaatgatggaaaagaggaaaatgacattcagactggtagtgctctgcttcctctcagccctgaatctaaagcatgggcagttctgacaagtgatgaagaaagtggatcagggcaaggtacctcagatagccttaatgagaatgagacttccacagatttcagttttgcagacactaatgaaaaagatgctgatgggatcctggcagcaggtgactcagaaataactcctggattcccacagtccccaacatcatctgttactagcgagaactcagaagtgttccacgtttcagaggcagaggccagtaatagtagccatgagtctcgtattggtctagctgaggggttggaatccgagaagaaggcagttataccccttgtgatcgtgtcagccctgacttttatctgtctagtggttcttgtgggtattctcatctactggaggaaatgcttccagactgcacacttttacttagaggacagtacatcccctagagttatatccacacctccaacacctatctttccaatttcagatgatgtcggagcaattccaataaagcactttccaaagcatgttgcagatttacatgcaagtagtgggtttactgaagaatttgagacactgaaagagttttaccaggaagtgcagagctgtactgttgacttaggtattacagcagacagctccaaccacccagacaacaagcacaagaatcgatacataaatatcgttgcctatgatcatagcagggttaagctagcacagcttgctgaaaaggatggcaaactgactgattatatcaatgccaattatgttgatggctacaacagaccaaaagcttatattgctgcccaaggcccactgaaatccacagctgaagatttctggagaatgatatgggaacataatgtggaagttattgtcatgataacaaacctcgtggagaaaggaaggagaaaatgtgatcagtactggcctgccgatgggagtgaggagtacgggaactttctggtcactcagaagagtgtgcaagtgcttgcctattatactgtgaggaattttactctaagaaacacaaaaataaaaaagggctcccagaaaggaagacccagtggacgtgtggtcacacagtatcactacacgcagtggcctgacatgggagtaccagagtactccctgccagtgctgacctttgtgagaaaggcagcctatgccaagcgccatgcagtggggcctgttgtcgtccactgcagtgctggagttggaagaacaggcacatatattgtgctagacagtatgttgcagcagattcaacacgaaggaactgtcaacatatttggcttcttaaaacacatccgttcacaaagaaattatttggtacaaactgaggagcaatatgtcttcattcatgatacactggttgaggccatacttagtaaagaaactgaggtgctggacagtcatattcatgcctatgttaatgcactcctcattcctggaccagcaggcaaaacaaagctagagaaacaattccagctcctgagccagtcaaatatacagcagagtgactattctgcagccctaaagcaatgcaacagggaaaagaatcgaacttcttctatcatccctgtggaaagatcaagggttggcatttcatccctgagtggagaaggcacagactacatcaatgcctcctatatcatgggctattaccagagcaatgaattcatcattacccagcaccctctccttcataccatcaaggatttctggaggatgatatgggaccataatgcccaactggtggttatgattcctgatggccaaaacatggcagaagatgaatttgtttactggccaaataaagatgagcctataaattgtgagagctttaaggtcactcttatggctgaagaacacaaatgtctatctaatgaggaaaaacttataattcaggactttatcttagaagctacacaggatgattatgtacttgaagtgaggcactttcagtgtcctaaatggccaaatccagatagccccattagtaaaacttttgaacttataagtgttataaaagaagaagctgccaatagggatgggcctatgattgttcatgatgagcatggaggagtgacggcaggaactttctgtgctctgacaacccttatgcaccaactagaaaaagaaaattccgtggatgtttaccaggtagccaagatgatcaatctgatgaggccaggagtctttgctgacattgagcagtatcagtttctctacaaagtgatcctcagccttgtgagcacaaggcaggaagagaatccatccacctctctggacagtaatggtgcagcattgcctgatggaaatatagctgagagcttagagtctttagtttaacacagaaaggggtggggggactcacatctgagcattgttttcctcttcctaaaattaggcaggaaaatcagtctagttctgttatctgttgatttcccatcacctgacagtaactttcatgacataggattctgccgccaaatttatatcattaacaatgtgtgcctttttgcaagacttgtaatttacttattatgtttgaactaaaatgattgaattttacagtatttctaagaatggaattgtggtatttttttctgtattgattttaacagaaaatttcaatttatagaggttaggaattccaaactacagaaaatgtttgtttttagtgtcaaatttttagctgtatttgtagcaattatcaggtttgctagaaatataacttttaatacagtagcctgtaaataaaacactcttccatatgatattcaacattttacaactgcagtattcacctaaagtagaaataatctgttacttattgtaaatactgccctagtgtctccatggaccaaatttatatttataattgtagatttttatattttactactgagtcaagttttctagttctgtgtaattgtttagtttaatgacgtagttcattagctggtcttactctaccagttttctgacattgtattgtgttacctaagtcattaactttgtttcagcatgtaattttaacttttgtggaaaatagaaataccttcattttgaaagaagtttttatgagaataacaccttaccaaacattgttcaaatggtttttatccaaggaattgcaaaaataaatataaatattgccattaaaaaaaaaaaaaaaaaaaaaaaaaaaaaaaaaaa

SEQ ID NO: 2600 - DNA, 4101 bp, Homo sapiens
tcgcggccgcctcttgcggtcccagagtggagtggaaggtctggagctttgggaggagacggggaggacagactggaggcgtgttcctccggagttttctttttcgtgcgagccctcgcgcgcgcgtacagtcatcccgctggtctgacgattgtggagaggcggtggagaggcttcatccatcccacccggtcgtcgccggggattggggtcccagcgacacctccccgggagaagcagtgcccaggaagttttctgaagccggggaagctgtgcagccgaagccgccgccgcgccggagcccgggacaccggccaccctccgcgccacccaccctcgctttctccggcttcctctggcccaggcgccgcgcggacccggcagctgtctgcgcacgccgagctccacggtgaaaaaaaaagtgaaggtgtaaaagcagcacaagtgcaataagagatatttcctcaaatttgcctcaagatggaaaccctttgcctcagggcatccttttggctggcactggttggatgtgtaatcagtgataatcctgagagatacagcacaaatctaagcaatcatgtggatgatttcaccacttttcgtggcacagagctcagcttcctggttaccactcatcaacccactaatttggtcctacccagcaatggctcaatgcacaactattgcccacagcagactaaaattacttcagctttcaaatacattaacactgtgatatcttgtactattttcatcgtgggaatggtggggaatgcaactctgctcaggatcatttaccagaacaaatgtatgaggaatggccccaacgcgctgatagccagtcttgcccttggagaccttatctatgtggtcattgatctccctatcaatgtatttaagctgctggctgggcgctggccttttgatcacaatgactttggcgtatttctttgcaagctgttcccctttttgcagaagtcctcggtggggatcaccgtcctcaacctctgcgctcttagtgttgacaggtacagagcagttgcctcctggagtcgtgttcagggaattgggattcctttggtaactgccattgaaattgtctccatctggatcctgtcctttatcctggccattcctgaagcgattggcttcgtcatggtaccctttgaatataggggtgaacagcataaaacctgtatgctcaatgccacatcaaaattcatggagttctaccaagatgtaaaggactggtggctcttcgggttctatttctgtatgcccttggtgtgcactgcgatcttctacaccctcatgacttgtgagatgttgaacagaaggaatggcagcttgagaattgccctcagtgaacatcttaagcagcgtcgagaagtggcaaaaacagttttctgcttggttgtaatttttgctctttgctggttccctcttcacttaagccgtatattgaagaaaactgtgtataacgaaatggacaagaaccgatgtgaattacttagtttcttactgctcatggattacatcggtattaacttggcaaccatgaattcatgtataaaccccatagctctgtattttgtgagcaagaaatttaaaaattgtttccagtcatgcctctgctgctgctgttaccagtccaaaagtctgatgacctcggtccccatgaacggaacaagcatccagtggaagaaccacgatcaaaacaaccacaacacagaccggagcagccataaggacagcatgaactgaccacccttagaagcactcctcggtactcccataatcctctcggagaaaaaaatcacaaggcaactgtgactccgggaatctcttctctgatccttcttccttaattcactcccacacccaagaagaaatgctttccaaaaccgcaaggtagactggtttatccacccacaacatctacgaatcgtacttctttaattgatctaatttacatattctgcgtgttgtattcagcactaaaaaatggtgggagctgggggagaatgaagactgttaaatgaaaccagaaggatatttactacttttgcatgaaaatagagctttcaagtacatggctagcttttatggcagttctggtgaatgttcaatgggaactggtcaccatgaaactttagagattaacgacaagattttctactttttttaagtgattttttgtccttcagccaaacacaatatgggctcaggtcacttttatttgaaatgtcatttggtgccagtattttttaactgcataatagcctaacatgattatttgaacttatttacacatagtttgaaaaaaaaaagacaaaaatagtattcaggtgagcaattagattagtattttccacgtcactatttatttttttaaaacacaaattctaaagctacaacaaatactacaggcccttaaagcacagtctgatgacacatttggcagtttaatagatgttactcaaagaattttttaagaactgtattttattttttaaatggtgttttattacaagggaccttgaacatgttttgtatgttaaattcaaaagtaatgcttcaatcagatagttctttttcacaagttcaatactgtttttcatgtaaattttgtatgaaaaatcaatgtcaagtaccaaaatgttaatgtatgtgtcatttaactctgcctgagactttcagtgcactgtatatagaagtctaaaacacacctaagagaaaaagatcgaatttttcagatgattcggaaattttcattcaggtatttgtaatagtgacatatatatgtatatacatatcacctcctattctcttaatttttgttaaaatgttaactggcagtaagtcttttttgatcattcccttttccatataggaaacataattttgaagtggccagatgagtttatcatgtcagtgaaaaataattacccacaaatgccaccagtaacttaacgattcttcacttcttggggttttcagtatgaacctaactccccaccccaacatctccctcccacattgtcaccatttcaaagggcccacagtgacttttgctgggcattttcccagatgtttacagactgtgagtacagcagaaaatcttttactagtgtgtgtgtgtatatatataaacaattgtaaatttcttttagcccatttttctagactgtctctgtggaatatatttgtgtgtgtgatatatgcatgtgtgtgatggtatgtatggatttaatctaatctaataattgtgccccgcagttgtgccaaagtgcatagtctgagctaaaatctaggtgattgttcatcatgacaacctgcctcagtccattttaacctgtagcaaccttctgcattcataaatcttgtaatcatgttaccattacaaatgggatataagaggcagcgtgaaagcagatgagctgtggactagcaatatagggttttgtttggttggttggtttgataaagcagtatttggggtcatattgtttcctgtgctggagcaaaagtcattacactttgaagtattatattgttcttatcctcaattcaatgtggtgatgaaattgccaggttgtctgatatttctttcagacttcgccagacagattgctgataataaattaggtaagataatttgttgggccatattttaggacaggtaaaataacatcaggttccagttgcttgaattgcaaggctaagaagtactgcccttttgtgtgttagcagtcaaatctattattccactggcgcatcatatgcagtgatatatgcctataatataagccataggttcacaccattttgtttagacaattgtctttttttcaagatgctttgtttctttcatatgaaaaaaatgcattttataaattcagaaagtcatagatttctgaaggcgtcaacgtgcattttatttatggactggtaagtaactgtggtttactagcaggaatatttccaatttctacctttactacatcttttcaacaagtaactttgtagaaatgagccagaagccaaggccctgagttggcagtggcccataagtgtaaaataaaagtttacagaaacctt

SEQ ID NO: 2601 - DNA, 3634 bp, Homo sapiens
tcaacacaggacaatgcaagcccatgagctgttccggtattttcgaatgccagagctggttgacttccgacagtacgtgcgtactcttccgaccaacacgcttatgggcttcggagcttttgcagcactcaccaccttctggtacgccacgagacccaaacccctgaagccgccatgcgacctctccatgcagtcagtggaagtggcgggtagtggtggtgcacgaagatccgcactacttgacagcgacgagcccttggtgtatttctatgatgatgtcacaacattatacgaaggtttccagaggggaatacaggtgtcaaataatggcccttgtttaggctctcggaaaccagaccaaccctatgaatggctttcatataaacaggttgcagaattgtcggagtgcataggctcagcactgatccagaagggcttcaagactgccccagatcagttcattggcatctttgctcaaaatagacctgagtgggtgattattgaacaaggatgctttgcttattcgatggtgatcgttccactttatgatacccttggaaatgaagccatcacgtacatagtcaacaaagctgaactctctctggtttttgttgacaagccagagaaggccaaactcttattagagggtgtagaaaataagttaataccaggccttaaaatcatagttgtcatggatgcctacggcagtgaactggtggaacgaggccagaggtgtggggtggaagtcaccagcatgaaggcgatggaggacctgggaagagccaacagacggaagcccaagcctccagcacctgaagatcttgcagtaatttgtttcacaagtggaactacaggcaaccccaaaggagcaatggtcactcaccgaaacatagtgagcgattgttcagcttttgtgaaagcaacagagaatacagtcaatccttgcccagatgatactttgatatctttcttgcctctcgcccatatgtttgagagagttgtagagtgtgtaatgctgtgtcatggagctaaaatcggatttttccaaggagatatcaggctgctcatggatgacctcaaggtgcttcaacccactgtcttccccgtggttccaagactgctgaaccggatgtttgaccgaattttcggacaagcaaacaccacgctgaagcgatggctcttggactttgcctccaagaggaaagaagcagagcttcgcagcggcatcatcagaaacaacagcctgtgggaccggctgatcttccacaaagtacagtcgagcctgggcggaagagtccggctgatggtgacaggagccgccccggtgtctgccactgtgctgacgttcctcagagcagccctgggctgtcagttttatgaaggatacggacagacagagtgcactgccgggtgctgcctaaccatgcctggagactggaccgcaggccatgttggggccccgatgccgtgcaatttgataaaacttgttgatgtggaagaaatgaattacatggctgccgagggcgagggcgaggtgtgtgtgaaagggccaaatgtatttcagggctacttgaaggacccagcgaaaacagcagaagctttggacaaagacggctggttacacacaggggacattggaaaatggttaccaaatggcaccttgaaaattatcgaccggaaaaagcacatatttaagctggcacaaggagaatacatagcccctgaaaagattgaaaatatctacatgcgaagtgagcctgttgctcaggtgtttgtccacggagaaagcctgcaggcatttctcattgcaattgtggtaccagatgttgagacattatgttcctgggcccaaaagagaggatttgaagggtcgtttgaggaactgtgcagaaataaggatgtcaaaaaagctatcctcgaagatatggtgagacttgggaaggattctggtctgaaaccatttgaacaggtcaaaggcatcacattgcaccctgaattattttctatcgacaatggccttctgactccaacaatgaaggcgaaaaggccagagctgcggaactatttcaggtcgcagatagatgacctctattccactatcaaggtttagtgtgaagaagaaagctcagaggaaatggcacagttccacaatctcttctcctgctgatggccttcatgttgttaattttgaatacagcaagtgtagggaaggaagcgttcgtgtttgacttgtccattcggggttcttctcataggaatgctagaggaaacagaacaccgccttacagtcacctcatgttgcagaccatgtttatggtaatacacactttccaaaatgagccttaaaaattgtaaaggggatactataaatgtgctaagttatttgagacttcctcagtttaaaaagtgggttttaaatcttctgtctccctgcttttctaatcaaggggttaggactttgctatctctgagatgtctgctacttgctgcaaattctgcagctgtctgctgctctaaagagtacagtgcactagagggaagtgttccctttaaaaataagaacaactgtcctggctggagaatctcacaagcggaccagagatctttttaaatccctgctactgtcccttctcacaggcattcacagaacccttctgattcgtaagggttacgaaactcatgttcttctccagtcccctgtggtttctgttggagcataaggtttccagtaagcgggagggcagatccaactcagaaccatgcagataaggagcctctggcaaatgggtgctcatcagaacgcgtggattctctttcatggcagaatgctcttggactcggttctccaggcctgattccccgactccatcctttttcaggggttatttaaaaatctgccttagattctatagtgaagacaagcatttcaagaaagagttacctggatcagccatgctcagctgtgacgcctgaataactgtctactttatcttcactgaaccactcactctgtgtaaaggccaacagatttttaatgtggttttcatatcaaaagatcatgttgggattaacttgcctttttccccaaaaaataaactctcaggcaagcatttctttaaagctattaagggagtatatacttgagtacttattgaaatggacagtaataagcaaatgttcttataatgctacctgatttctatgaaatgtgtttgacaagccaaaattctaggatgtagaaatctggaaagttcatttcctgggattcacttctccagggattttttaaagttaatttgggaaattaacagcagttcactttattgtgagtctttgccacatttgactgaattgagctgtcatttgtacatttaaagcagctgttttggggtctgtgagagtacatgtattatatacaagcacaacagggcttgcactaaagaattgtcattgtaataacactacttggtagcctaacttcatatatgtattcttaattgcacaaaaagtcaataatttgtcaccttggggttttgaatgtttgctttaagtgttggctatttctatgttttataaaccaaaacaaaatttccaaaaacaatgaaggaaaccaaaataaatatttctgcatttc

SEQ ID NO: 2602 - DNA, 2334 bp, Homo sapiens
aaagattgatctctgggctggtgaacataatctctgtcccagtcagaaaaggagagaggaaattagcagagcgattggtggagaatgatatctgtcaaaagaaacacttggagagcactgagtttagtaataggtgactgccggaaaaaagggaactttgaatattgtcaagatcgtactgagaagcactccacaatgccagactcacctgtggatgtgaagacgcaatctaggctgactcctccaacaatgccacctcccccaactactcaaggagctccaagaaccagttcatttacaccgacaacgttaactaatggcacgagccattctcctacagccttgaatggcgccccctcaccacccaatggcttcagcaatgggccttcctcttcttcctcctcctctctggctaatcaacagctgcccccagcctgtggtgccaggcaactcagcaagctgaaaaggttccttactaccctgcagcagtttggcaatgacatttcacccgagataggagaaagagttcgcaccctcgttctgggactagtgaactccactttgacaattgaagaatttcattccaaactgcaagaagctactaacttcccactgagaccttttgtcatcccatttttgaaggccaacttgcccctgctgcagcgtgagctcctccactgcgcaagactggccaaacagaaccctgcccagtacctcgcccagcatgaacagctgcttctggatgccagcaccacctcacctgttgactcctcagagctgcttctcgatgtgaacgaaaacgggaagaggcgaactccagacagaaccaaagaaaatggctttgacagagagcctttgcactcagaacatccaagcaagcgaccatgcactattagcccaggccagcggtacagtccaaataacggcttatcctaccagcccaatggcctgcctcaccctaccccacctccacctcagcattaccgtttggatgatatggccattgcccaccactacagggactcctatcgacaccccagccacagggacctcagggacagaaacagacctatggggttgcatggcacacgtcaagaagaaatgattgatcacagactaacagacagagaatgggcagaagagtggaaacatcttgaccatctgttaaactgcataatggacatggtagaaaaaacaaggcgatctctcaccgtactaaggcggtgtcaagaagcagaccgggaagaattgaattactggatccggcggtacagtgacgccgaggacttaaaaaaaggtggcggcagtagcagcagccactctaggcagcagagtcccgtcaacccagacccagttgcactagacgcgcatcgggaattccttcacaggcctgcgtctggatacgtgccagaggagatctggaagaaagctgaggaggccgtcaatgaggtgaagcgccaggcgatgacggagctgcagaaggccgtgtctgaggcggagcggaaagcccacgacatgatcacaacagagagggccaagatggagcgcacggtcgccgaggccaaacggcaggcggcggaggacgcactggcagttatcaatcagcaggaggattcaagcgagagttgctggaattgtggccgtaaagcgagtgaaacctgcagtggctgtaacacagcccgatactgtggctcattttgccagcacaaagactgggagaagcaccatcacatctgtggacagaccctgcaggcccagcagcagggagacacacctgcagtcagctcctctgtcacgcccaacagcggggctgggagcccgatggacacaccaccagcagccactccgaggtcaaccaccccgggaaccccttccaccatagagacaacccctcgctagacgtgaactcagaactgtcggaggaaagacaacacaaccaacgcgaaaccaattcctcatcctcagatgctcaaagttgttttttttgtttgtttgtttattagatgaattatcctatttcagtacttcagcaagagagaacctaactgtatcttgaggtggtagtaaaacacagagggccagtaacgggtcgtaatgacttattgtggataacaaagatatcttttctttagagaactgaaaagagagcagagaatataacatgaaatgatagatttgacctcctccctgttattttcaagtagctgggattttaaactagatgacctcattaaccgatgctttaccaaacagcaaaccaagagattgctaattgctgttgaaagcaaaaatgctaatattaaaagtcacaatgttctttatatacaataatgg

SEQ ID NO: 2603 - DNA, 3694 bp, Homo sapiens
gctccgggccgcgctgcccgcgctcctgctgccgttgctgggcctcgccgctgctgccgtcgcggactgtccttcatctacttggattcagttccaagacagttgttacatttttctccaagaagccatcaaagtagaaagcatagaggatgtcagaaatcagtgtactgaccatggagcggacatgataagcatacataatgaagaagaaaatgcttttatactggatactttgaaaaagcaatggaaaggcccagatgatatcctactaggcatgttttatgacacagatgatgcgagtttcaagtggtttgataattcaaatatgacatttgataagtggacagaccaagatgatgatgaggatttagttgacacctgtgcttttctgcacatcaagacaggtgaatggaaaaaaggaaattgtgaagtttcttctgtggaaggaacactatgcaaaacagctatcccatacaaaaggaaatatttatcagataaccacattttaatatcagcattggtgattgctagcacggtaattttgacagttttgggagcaatcatttggttcctgtacaaaaaacattctgattctcgtttcaccacagttttttcaaccgcaccccaatcaccttataatgaagactgtgttttggtagttggagaagaaaatgaatatcctgttcaatttgactaagtttttggtaatcttgcactaagacatcaacaaatgccctggcagagataacttgggaaagattttaatataaaacttgacattggatattagagctttaatggtattccttattccagtaacatttttatgtactcatctgctgtgaaaagtctttaggttcattaaaaaaacaggttttagaaatgatcttagatctaatatagtgattttaagcatcccgtcaaaggcagaatctgtcacttgaatgaaggaaagcttaaagcccaagcagataaaaataaaagcccagcctatttgtcttgcctgctgtatcttccctatttagttgacccactttagtttatatgtttattagtaaacatgaaatggggaataagtgattttaagtacatcccatacatttaaatatctttgataattgttatttttttggcagataattcctctagaatgtgtatctttttatgatttagatgaagaaaattttacaacttttaacaccccacaccaattttagtttcattacttttacacacaccattttatcacaaatgactcaagttttaatgaatgtttataaattatttgaaacaaaatatgatcgctgtgtccaggatggcatagagaaagctggcaattaggttaacacttacatattatagtgcccctttaaggatttctctcttgccaccataccttttgtactttcccctatacaagatgtatctcattctcctcaagcatttataaatttttccttcaatgacatgaaaactgtgcaagcaaaaaccgaagaaaaacacttaagtacaactgtagtgacagtgatcaaagttttcagtgcatttattgtacattttaagaaaaaggtgaaaatcatttggggagtaaaaaaatgaaaaagctgaaacgagtaattttcctcaccatcaataaaccaaaaacaggaaagataaagaatgtataaatttcacgtaaattagtcacgtatcacttatcaatggggatacgttctaagaaatgcatagttagggaatcttgtgtgaaaatcagcttgtatttacacaaacccagatggtagagcctattttgtcccaaacctacacagcatgttactgtgctgaatactgcagacaattgtaacacaatatttgtgtatctaaatatagaaaaggtacagtaaaaatatggtctactaaggaaacactgttctatatgtggtccattactgactgaagtatactgtctagaagtctgaggctcaaagaaaagtaatccctcttctgaatccacaccccatcaattatcttactttcttctggggagatagatagatatactatctcactagcttgactaatggcaacaaagttccagcttgtgtagtctctttttattgaccacatgaatcgaaaacactcatcacaattaatggcactatcattaatgagacatgagtaactaaaaagtgatagaaaactattacagtgcggctacatggtactgaaaatgcaggcattacaccagctgttacacaagcacaagcatgctctgtaagagctttacatttctgagattttgtatagtgattgagatgtctattttattattgatagactattactaatgtcaatattgaacactaccctggaattcctgcctggttttcctacccaaattgtaccactccttgaagaactacaggcacagtaaaaaaatatggcgtattatgtgaactaaaagagttctaaaggagttcttaaaggagtggtagaatttgggtaggaaagtgattaagtccaacttaaaaccaacagtctcaaacgtctacaactacaatgtccaatgagccactagccacatgaggctatttaagtaaatttagtttaaaatccagttttcgaattacattagccacattgtcaagtgttcaaatcacaggtggttagtggctactgtactgggcaacatacattatagaacattttcattataggaagttttattgggcagtgctgctcttaaatcctaccttccactcaactcccatacaactttcttttgtacattttgatactttctacctaatggcagctcttccaaaatagctgctttaaactctgatttaattttcaatatttggtttcatttttcaacaggccaagaggcctctggtaatgaagtgctatatatatatatatatgacggagtctcactgtgctgcccaggctacagtgcagtggctcgatcttggctctctccaatctccgccttgcaggttttcaagcaattctcctgcctcagcctccttagtagctgggaccacagacatctgtcaccacacccagctaactttttgtatttttggtagagacggggtttcgccatattgactgggctggtctcaaactcctgacctcaagtgatccacccaccttggtctcccaaagtgctgggattacatgcgtgagccaccacacttggcctacattttttctttatataccagaacatctataacaggcaccttatctactcattagtgaagagataattggattacacaggcaggcttgtttactacatccagaatgtagaaactgctttcttcaacatcttggttctagctagtaataacaatataattctttggcagatattcagaataacattttaaactacattttcttagaaaattgcattcttgtagtgagcagtgtatggtctcttttgttcagaatttaaaactgataaccaatgaaagccttttctcttattcctctaccgtcatttacatgataatctgaagctaatatgacaatatttaaatactaagtggtactagggaactacaagaatactgtaaagcttaagccattgttatcactgtcatttagcatttaataacaaaactatacagaattatgtgcataccaatgaatgttttgtaccatctagttaaattttttaaataaagttttatgggttaagcag

SEQ ID NO: 2604 - DNA, 2773 bp, Homo sapiens
ccacctctctctgcctttttgtaccccgctttttttctgcgttctgctcggtttttgtagccgtctgtttttgcaccccatttcgttttgtttctagacggtttggcggggggtgaagctgcattcataccccttcctcttgttattctcccctgctctgacagcaccccttttcatcgcagttggggggcctaggatcggtgcatcttccgccgcgctgccagcaccccgcagcgcgtggtcgtgcaccccggaatctgcagcagctgcatatctgaggggggtctcctttgcccgcgccgccttcgctccccgtgcttttgggtgtgtggagggcttcagtgcgcggcgcccccgcttctccgcaaccccccgccccgcgcccggactcgccccgcgccaccaagatggtcatccagaaagagaagaagagctgcgggcaggtggttgaggagtggaaggagttcgtgtggaacccgaggacgcaccagtttatgggccgcaccgggaccagctgggcctttatcctcctcttctacctcgttttttatgggttccccaccgccatgttcaccctcaccatgtgggtgatgctgcagactgtctccgaccatacccccaagtaccaggaccgactggccacaccgggcttgatgattcgccccaagactgagaaccttgatgtcattgtcaatgtcagtgacactgaaagctgggaccagcatgttcagaagctcaacaagttcttggagccttacaacgactctatgcaagcccaaaagaatgatgtctgccgccctgggcgctattacgaacagccagataatggagtcctcaactaccccaaactggcctgccaattcaaccggacccagctgggcaactgctccggcattggggactccacccactatggttacagcactgggcagccctgtgtcttcatcaagatgaaccgggtcatcaacttctatgcaggagcaaaccagagcatgaatgttacctgtgctgggaagcgagatgaagatgctgagaatctcggcaacttcgtcatgttccccgccaacggcaacatcgacctcatgtacttcccctactatggcaaaaagttccacgtgaactacacacagcccctggtggctgtgaagttcctgaatgtgacccccaacgtggaggtgaatgtagaatgtcgcatcaacgccgccaacatcgccacagacgatgagcgagacaagttcgccggccgcgtggccttcaaactccgcatcaacaaaacctgaggccccttcctcccaccccatctctctcctgtggatgctcctggaatgtccctgaccctgcctgatccctccctcacccaccccaaaggtatttttgataacagagctatgacttgtctgagcctcacatccttttccttgacttctcaacccagcctgaagtccattgcggttccgtcactcgcctttcccaccaacttctcccaacctcagatcagtcagacagggagctgggctaagatggccacagaggagttaggagcctttctagttctggtttagctgtgagagctatccactctcctgcctgcatatcccctgagagttatcggaagtgcccactgacccacccacccacctacaccccccgccacacacacacacaaacgtgcacacgcagtctcatttgacccctttgcttccagagatgaatgtggcactccctccttccattcctaagctctagccaccgtcccttgatctctcatactttctccctgtctacacagtcgccatcttggtgactttgaatttatctggctcctgggcaggtcttctcctcctctccatccctattccctcctctgaaatgcacccctttgtaattgaggacaaggtggttctgtggccttttccctctttgctggcacgttctgcttctcaccctctggtgactctgtgagctgggaaatgcgggactggaagtgaggcctgtgttgacccttcctgaaaatcctctagcagcccccgacttcagcagtttctttctttgtttttttgagatggagtttcgctcttgttgcccaggctggagtgcaatggtgcaatctcagctcactgcaacttccgcatcccaggttcaagcgattctcccgcctcaggttcccgagtagctgggactacaggcatgtgccaccatgcccggctaatttctttctttctttttttttttttttttgcattttttagtagagatgggggtttctccttgttggtcaggctggtctcgaactcccgacctcaggtgatccacctgcctcggcctcccaaagtgttgggattacaggcgtgagccaccgcgcctggccttcagtttcttcctaggccgttctgtcacccaaatagctgctacccagaggggcggggttgacctaggctgaatatccactttgtttttatggatggctcccttcccccattcgccttcccagaatatccttcaagttccacttcccagggagctctgggggaggggcggccattctggctccgtccccagtggccaccttggaaacatcggctggctttgggactattccacctccttcccctgagcccagatctgcccccaccatcctttctctggcttcttttagcaagttatcaactaatcactaactccttccttttcctctgcatgccagcctgaaaattccaaatctagcctctgaatgtcttggctccatctcttcagacccctttgcctttaaaaa

SEQ ID NO: 2605 - DNA, 1796 bp, Homo sapiens
ctagatcaccatggcgactggacagaagttgatgagagctgttagagtttttgaatttggtgggccagaagtcctgaaattgcgatcagatattgcagtaccgattccaaaagaccatcaggttctaatcaaggtccatgcatgtggtgtcaaccccgtggagacatacattcgctctggtacttatagtagaaaaccactcttaccctatactcctggctcagatgtggctggggtgatagaagctgttggagataatgcatctgctttcaagaaaggtgacagagttttcactagcagcacgatctctgggggttatgcagagtatgctcttgcagcagaccacactgtttacaaactacctgaaaaactggactttaaacaaggagctgccatcggcattccatattttactgcttatcgagctctgatccacagtgcctgtgtgaaagctggagagagtgttctggttcatggggcaagtggaggagttggattagcagcatgccaaattgctagagcttatggcttaaagattttgggcactgctggtactgaggaaggacaaaagattgttttgcaaaatggagcccatgaagtgttcaatcacagagaagtgaattacattgataaaattaagaagtatgttggtgagaaaggaattgatataattattgaaatgttagctaatgtaaatcttagtaaagacttgagtcttctgtcacatggaggacgagtgatagttgttggcagcagaggtactattgaaataaacccacgagacaccatggcaaaggagtcgagtataattggagttactctcttttcctcaaccaaggaggaatttcagcaatatgcagcagcccttcaagctggaatggaaattggctggttgaaacctgtgataggttctcaatatccattggagaaggtggccgaggctcatgaaaatatcattcatggtagtggggctactggaaaaatgattcttctcttatgatgattaattctttcatggatttcctatgtaattagaggtactgtctttcccccagttgtacttaccctatcttttctttaattaacattcgattccatgagcttcttatgtgaaaaaataagatttttctttagagagcagaagcagaagagtaaaatttattgtatagctagcaatatttttttatgccatctgtctcaaatcaaagagtcatcatagtaggaaataacatgttagttgtcatttggcatgagtgtgcattccagtaattcttaattgatatttgattaattccatacctttgattaaaacatgctagttcaaaataagactgctcagtttccaagggttttcaagcctacttacctttataaaggttctctagtctctgattagccatgactgtattggactttgaacattttctgaactaaaaacctctattctaaactaatctcatttggatgtgtaagtcttttgtaaaggcaagaataaataatatccaggacaatttattagttttctcagtattttcccaaatattagaatatttacttcattattggttggctgccaatgaccccatatgttctgtgagaatagtagctttatctttgatataatacatagtctccaaataggtaatacttcgcaattgattagattttcagagtagatttagagttatctgtttttctggtgagggtcaaatatttttgttaattaagctcacaaatttgataaattaagaattatctgcatttgtctggtaacataataatgtgtaataaagtct

SEQ ID NO: 2606 - DNA, 4286 bp, Homo sapiens
gagacattccggtgggggactctggccagcccgagcaacgtggatcctgagagcactcccaggtaggcatttgccccggtgggacgccttgccagagcagtgtgtggcaggcccccgtggaggatcaacacagtggctgaacactgggaaggaactggtacttggagtctggacatctgaaacttggctctgaaactgcgcagcggccaccggacgccttctggagcaggtagcagcatgcagccgcctccaagtctgtgcggacgcgccctggttgcgctggttcttgcctgcggcctgtcgcggatctggggagaggagagaggcttcccgcctgacagggccactccgcttttgcaaaccgcagagataatgacgccacccactaagaccttatggcccaagggttccaacgccagtctggcgcggtcgttggcacctgcggaggtgcctaaaggagacaggacggcaggatctccgccacgcaccatctcccctcccccgtgccaaggacccatcgagatcaaggagactttcaaatacatcaacacggttgtgtcctgccttgtgttcgtgctggggatcatcgggaactccacacttctgagaattatctacaagaacaagtgcatgcgaaacggtcccaatatcttgatcgccagcttggctctgggagacctgctgcacatcgtcattgacatccctatcaatgtctacaagctgctggcagaggactggccatttggagctgagatgtgtaagctggtgcctttcatacagaaagcctccgtgggaatcactgtgctgagtctatgtgctctgagtattgacagatatcgagctgttgcttcttggagtagaattaaaggaattggggttccaaaatggacagcagtagaaattgttttgatttgggtggtctctgtggttctggctgtccctgaagccataggttttgatataattacgatggactacaaaggaagttatctgcgaatctgcttgcttcatcccgttcagaagacagctttcatgcagttttacaagacagcaaaagattggtggctgttcagtttctatttctgcttgccattggccatcactgcatttttttatacactaatgacctgtgaaatgttgagaaagaaaagtggcatgcagattgctttaaatgatcacctaaagcagagacgggaagtggccaaaaccgtcttttgcctggtccttgtctttgccctctgctggcttccccttcacctcagcaggattctgaagctcactctttataatcagaatgatcccaatagatgtgaacttttgagctttctgttggtattggactatattggtatcaacatggcttcactgaattcctgcattaacccaattgctctgtatttggtgagcaaaagattcaaaaactgctttaagtcatgcttatgctgctggtgccagtcatttgaagaaaaacagtccttggaggaaaagcagtcgtgcttaaagttcaaagctaatgatcacggatatgacaacttccgttccagtaataaatacagctcatcttgaaagaagaactattcactgtatttcattttctttatattggaccgaagtcattaaaacaaaatgaaacatttgccaaaacaaaacaaaaaactatgtatttgcacagcacactattaaaatattaagtgtaattattttaacactcacagctacatatgacattttatgagctgtttacggcatggaaagaaaatcagtgggaattaagaaagcctcgtcgtgaaagcacttaattttttacagttagcacttcaacatagctcttaacaacttccaggatattcacacaacacttaggcttaaaaatgagctcactcagaatttctattctttctaaaaagagatttatttttaaatcaatgggactctgatataaaggaagaataagtcactgtaaaacagaacttttaaatgaagcttaaattactcaatttaaaattttaaaatcctttaaaacaacttttcaattaatattatcacactattatcagattgtaattagatgcaaatgagagagcagtttagttgttgcatttttcggacactggaaacatttaaatgatcaggagggagtaacagaaagagcaaggctgtttttgaaaatcattacactttcactagaagcccaaacctcagcattctgcaatatgtaaccaacatgtcacaaacaagcagcatgtaacagactggcacatgtgccagctgaatttaaaatataatacttttaaaaagaaaattattacatcctttacattcagttaagatcaaacctcacaaagagaaatagaatgtttgaaaggctatcccaaaagacttttttgaatctgtcattcacataccctgtgaagacaatactatctacaattttttcaggattattaaaatcttcttttttcactatcgtagcttaaactctgtttggttttgtcatctgtaaatacttacctacatacactgcatgtagatgattaaatgagggcaggccctgtgctcatagctttacgatggagagatgccagtgacctcataataaagactgtgaactgcctggtgcagtgtccacatgacaaaggggcaggtagcaccctctctcacccatgctgtggttaaaatggtttctagcatatgtataatgctatagttaaaatactatttttcaaaatcatacagattagtacatttaacagctacctgtaaagcttattactaatttttgtattatttttgtaaatagccaatagaaaagtttgcttgacatggtgcttttctttcatctagaggcaaaactgctttttgagaccgtaagaacctcttagctttgtgcgttcctgcctaatttttatatcttctaagcaaagtgccttaggatagcttgggatgagatgtgtgtgaaagtatgtacaagagaaaacggaagagagaggaaatgaggtggggttggaggaaacccatggggacagattcccattcttagcctaacgttcgtcattgcctcgtcacatcaatgcaaaaggtcctgattttgttccagcaaaacacagtgcaatgttctcagagtgactttcgaaataaattgggcccaagagctttaactcggtcttaaaatatgcccaaatttttactttgtttttcttttaataggctgggccacatgttggaaataagctagtaatgttgttttctgtcaatattgaatgtgatggtacagtaaaccaaaacccaacaatgtggccagaaagaaagagcaataataattaattcacacaccatatggattctatttataaatcacccacaaacttgttctttaatttcatcccaatcactttttcagaggcctgttatcatagaagtcattttagactctcaattttaaattaattttgaatcactaatattttcacagtttattaatatatttaatttctatttaaattttagattatttttattaccatgtactgaatttttacatcctgataccctttccttctccatgtcagtatcatgttctctaattatcttgccaaattttgaaactacacacaaaaagcatacttgcattatttataataaaattgcattcagtggctttttaaaaaaaatgtttgattcaaaactttaacatactgataagtaagaaacaattataatttctttacatactcaaaaccaagatagaaaaaggtgctatcgttcaacttcaaaacatgtttcctagtattaaggactttaatatagcaacagacaaaattattgttaacatggatgttacagctcaaaagatttataaaagattttaacctattttctcccttattatccactgctaatgtggatgtatgttcaaacaccttttagtattgatagcttacatatggccaaaggaatacagtttatagcaaaacatgggtatgctgtagctaactttataaaagtgtaatataacaatgtaaaaaattatatatctgggaggattttttggttgcctaaagtggctatagttactgattttttattatgtaagcaaaaccaataaaaatttaagtttttttaacaactaccttatttttcactgtacagacactaattcattaaatactaattgattgtttaaaagaaatataaatgtgacaagtggacattatttatgttaaatatacaattatcaagcaagtatgaagttattcaattaaaatgccacatttctggtctctggg

SEQ ID NO: 2607 - DNA, 6314 bp, Homo sapiens
gtcggcgaggagggtccggccggagttgaaggattgaactttccggctcagtcgcggcggctgcctggtcctcagcagtgcagccccggcgcggagcagggagcctcggcccgcgcccggcgccctcgccctcgccctcgacccgcagccatggtgcccggggtgcccggcgcggtcctgaccctctgcctctggctggcggcctccagcggctgcctggcggccggccccggcgcggctgctgcgcggcggctggacgagtcgctgtctgccgggagcgtccagcgcgctccgtgcgcctccaggtgcctgagcctgcagatcactcgcatctccgccttcttccagcacttccagaacaatggttccctggtttggtgccagaatcacaagcaatgttctaagtgcctggagccctgcaaggaatcaggggacctgaggaaacaccagtgccaaagcttttgtgagcctctcttccccaagaagagctacgaatgcttgaccagctgtgagttcctcaaatacatcctgttggtgaagcagggggactgtccggctcctgagaaagccagtggatttgcggccgcctgtgttgaaagctgcgaagttgacaatgagtgctctggggtgaagaaatgttgttcgaatgggtgtggacacacctgtcaagtacccaagactctgtacaaaggtgtccccctgaagcccagaaaagagttacgatttacagaactgcagtctggacagctggaggttaagtggtcctcgaaattcaatatttctattgagcctgtgatctatgtggtacaaagaagatggaattatggaatccatcctagcgaagatgacgccactcactggcagacagtggcccagaccacagacgagcgagttcaactgactgacataagacccagccgatggtaccagtttcgagtggctgctgtgaatgtgcatggaactcgaggcttcactgcccccagcaaacacttccgttcttccaaagatccatctgccccaccagcaccggctaacctccggctggccaactccaccgtcaacagtgatgggagtgtgaccgtcactatagtttgggatctccccgaggagccggacatccctgtgcatcattacaaggtcttttggagctggatggtcagcagtaagtctcttgtcccaacaaagaagaagcggagaaagactacggatgggtttcaaaattctgtgatcctggagaaactccagccagactgtgactatgttgtggaattgcaagccataacgtactggggacagacacggctgaagagtgcaaaggtgtcccttcacttcacatcgacacatgcaaccaacaacaaagaacagcttgtgaaaactagaaaaggtggaattcaaacacaactcccttttcaaagacgacgacccactcgcccgctggaagtcggagctcccttctatcaggatggccaactgcaagttaaagtctactggaagaagacagaagatcccactgtcaaccgatatcatgtgcggtggtttcctgaagcgtgtgcccacaacagaacaaccggatcagaggcatcatctggcatgacccacgaaaattacataattcttcaagatctgtcattttcctgcaagtataaggtgactgtccaaccaatacggccaaaaagtcactccaaggcagaagctgttttcttcactactccaccatgctctgctcttaaggggaagagccacaagcctattggctgcctgggcgaagcaggtcatgttctttctaaggtgctagctaagcctgagaacctttctgcttcattcatcgtccaggatgtgaacatcaccggtcacttttcttggaagatggccaaggccaatctctatcagcccatgactgggtttcaagtgacttgggctgaggtcactacggaaagcagacagaacagcctacccaacagcattatttcacagtcccagattctgccttccgatcattatgtcctaacagtgcccaatctgagaccatctactctttaccgactggaagtgcaagtgctgaccccaggaggggaggggccggccaccatcaagacgttccggacgccggagctcccaccctcttcagcacacagatctcatcttaagcatcgtcatccacatcattacaagccttctccagaaagatactaaactgttcaaaaagattttgtgaaattgcacagatgtgtaagcttgttgaacttcggccacgagacatgcacacttccagaggcagtgggaactgctcagaggcccggactctcctatgtgactttagtgcaggaagaacttctgtcaatcatggacgcatctggagacaagtgagaaacagtagattggtgaagacagacaccagttccctacaagcatggagaaaatgaagaataggcctgtttaatgctaaattttgttttcatgtatggtgtcgctcatttctattgaattacaacagaactcagttttccctgaatttggagcaccaaactccgccccaaaaaggagagtaacaaatacacaattcacacataacactaagcgtaaatctaatcaataaaatatatttttgactaaattattgattcgatatgaaaaatcaactaagattacacagctttgtttttttgaatctttcctaagatcatttttatcctaggtgatttttaaatgaaaatgtgtaatctaaaatataccagcgaatttaaatctaaaaatgctcctactttaagtaccttgtgctgctctttatgcaaaggtaaatcaaagttccctctataaattatgatttacaaaagacacccaagccagaggaactcaatgaaataagctgctaatcagattttaccttggagaaatgaaaattatttcttggggatgccttttaatatttgatcctattatgtgagagattttcctgatatgttatcttatttatattttcccttattttcctcaatgcagataatagcttttggtgcacttttgtttcaccatctgaaaattcacaaaacttcttgcttcaaatgaaaaaatcccaactattgagcatgtttaaatctttgcagagatttgccttttcttaatcaaagaaaggtctttgtgtgctagaatattattggtaatgttttaaaaattcctttgattgatagagaaggacagttatttgcatttaattcacccatatgctttcaaatctagtatatcttactttttggaaatgttttatgctacaaattagtgccttgtagcatgaacttaagtcaaaacgtgttatcaatatagagtgttgcagtgtatattgtaacaacctaaaacgcagagaagtttaatttaatactgttttttttcttgaaggaatactcacatacatggtttgaaatgtgcatagatatgcatgtctatataattataaatgcatgtgtatatatatgcaaatatatgtacatatacatgtatatacacacagacacatgcatatacatgaatataccttgagcatgaatccctggagaaatcgttttcgtaggctcaccaatggtgagtaaagatacagctcttttaaaggtcataaggataatatattttccccatcaatgctgattctgagaaaagagcaatttatcaaaattaaacactgtaaaagaaaggtgtccatatgtctttacctacctaagtaaaacaggaagaaaatcagtaacattatccttaggttttgacaatggtacttgcttcttgttgttttattgtttcctgaattcatgcagatgcctggccattcctgggaagagtggataactcagaagtcactgtactccacagagcctcactgcagtgtctaaaggtagatgcaaattaaaatgcagggaaaataacttttctgatgttgatgcatgtctttgggaaacacatttataaacatggatacctgataatagatattgaaacccatttcctgtgtgttaaaatatttaaaaagtggatattccaggaatgttttgcagctttgtacaagtaacataaattggacacctcagaatgaaagttcatgttggttctgaatggttcactgcagctcctgtcacaagctgggatggatttatcacattgagttatgaaattacctggttctaagaatttttgagtggcaaaaatagaaaacaatcttcatttgaaaacatccctaagcttgaataaatggataccatagatagcttctcttttttattctggtgtcattaccagcatctgaatttcaagttcttaaaatttcaaaaattaaaatttttcattattagctatccatttatcttttacatgaacttgtcatgaacaaattcaaatgtttatgccagcaaatttttgtactgttgcatagttaaaaatgctgggagtctctgcatagatacaaaatattattaaattattacataaatttaattttataaaatttaatcatgcttcttttgtctggtaatagacattggacagatatttttagttcagatggtgattctgaagcttacatctcccttaaaaaaatctaaagcagctcttatgggcttctaattttaatataaataaataatttaaattttattggtgttattggaagaaaaatgctattaatgggctaataaaaaacatgtgtttctcttatggattttaataagctccagtattattcaaatgatcaaaaatatagttataattttttgaattttaaaaatgtgattgctctaataaagaataaaatctatgctttttaacaaacatagttttggtgcctaattctgtaatatgttttattgaaattagattcatttctctaatgtgagaaaaatatatccagtaatagtattgactgtttaaaaaattgagctcatcaaaaatattgtcatcaaatacaggtggttaatctgacatacattgcagttacatgcattatttttatttacaacatttgctccttaatgatgaatttatctgtgttaccctgtttttctacctggaactccatagaatgatgtttgcaaaccaacatgtgctcttttcagtcattcactgttttaatatgacatggtagagaagataaggtttatggcaggtaattttttgtaatgtgtattaaacgaagttcaaagattagaaatacatctgtgtcctgaaaaccttagatacatagccgactgtatacagaggttcatctcaacctcaacactattgacttttggggctggatagttctctgttgtgggggtttgtcttgtgcactgtaggtttttagtagcatccacactttctcctcaccagatgccagttgcaccctcccccaagttgagacaaccaaaaatgtctccagatattgccagctaccccttgagggatggtacctctggttgagaaccattgctagagaatgatctttactgaatttgccctttataagaaacccagtgaatttctagagcaagtcccaaaaactaagggacagctaagaagttattatggttgacttcaaaggcctaaactgtgttttttatgtccactaaacaacttgattaaaagacggaattttgactcgtgtctgtatcatacaagtacaaatactaattttgccctatgtatccgtaaatgtcatttgtgattttgacttatttatttaatgccctttcttatgccgtgggttttcaagtttactcatttctatggttgcaaataactctaaaacttattatataaactttcatattataggcagaacacaatggctaaatatctgttgcatgtactttaaagtttattataaaatataaacagatatataaagatgttgactcttacctgtgattttgcatggtcagactcggtgtcaggtacggagaggattctcatgactgtcttacctctactgaatattctagtgagttatatgatttacggagtgattaacagaggtctatataaagttacttttcccctttacttaattatattgtagtgtgcagataacaaaactgctaccttctcatccaagtggtctgtagaattcatgtcccttacagtggtcatttaaagtcaatatttatttatgtatgtaataaaaaaagttggatttttgtgtatgtctgtcacattatttagagagaagtaatcttgtaaaaatgttttgtaaaaaacaaaaaagtattgtaaatagtcttgatattctgtgactcattattttcatgttagagtttgtacatactggttcaataataaagtatccttaaaccaga

SEQ ID NO: 2608 - DNA, 4092 bp, Homo sapiens
agccagcccttgccgtggccggagccgagcggcgcatccgggccggagaagaggacgacgacgaggtcctcgaagtggacccgtttgcgaagcgccagggagaaggaggagcggacgcatcgtagaaaggggtggtggcgcccgaccccgcgccccggcccgaagctctgagggcttcccggcccccactgcctgcggcatggcccggggctcggcgctcccgcggcggccgctgctgtgcatcccggccgtctgggcggccgccgcgcttctgctctcagtgtcccggacttcaggtgaagtggaggttctggatccgaacgaccctttaggaccccttgatgggcaggacggcccgattccaactctgaaaggttactttctgaattttctggagccagtaaacaatatcaccattgtccaaggccagacggcaattctgcactgcaaggtggcaggaaacccaccccctaacgtgcggtggctaaagaatgatgccccggtggtgcaggagccgcggcggatcatcatccggaagacagaatatggttcacgactgcgaatccaggacctggacacgacagacactggctactaccagtgcgtggccaccaacgggatgaagaccattaccgccactggcgtcctgtttgtgcggctgggtccaacgcacagcccaaatcataactttcaggatgattaccacgaggatgggttctgccagccttaccggggaattgcctgtgcacgcttcattggcaaccggaccatttatgtggactcgcttcagatgcagggggagattgaaaaccgaatcacagcggccttcaccatgatcggcacgtctacgcacctgtcggaccagtgctcacagttcgccatcccatccttctgccacttcgtgtttcctctgtgcgacgcgcgctcccgggcacccaagccgcgtgagctgtgccgcgacgagtgcgaggtgctggagagcgacctgtgccgccaggagtacaccatcgcccgctccaacccgctcatcctcatgcggcttcagctgcccaagtgtgaggcgctgcccatgcctgagagccccgacgctgccaactgcatgcgcattggcatcccagccgagaggctgggccgctaccatcagtgctataacggctcaggcatggattacagaggaacggcaagcaccaccaagtcaggccaccagtgccagccgtgggccctgcagcacccccacagccaccacctgtccagcacagacttccctgagcttggaggggggcacgcctactgccggaaccccggaggccagatggagggcccctggtgctttacgcagaataaaaacgtacgcatggaactgtgtgacgtaccctcgtgtagtccccgagacagcagcaagatggggattctgtacatcttggtccccagcatcgcaattccactggtcatcgcttgccttttcttcttggtttgcatgtgccggaataagcagaaggcatctgcgtccacaccgcagcggcgacagctgatggcctcgcccagccaagacatggaaatgcccctcattaaccagcacaaacaggccaaactcaaagagatcagcctgtctgcggtgaggttcatggaggagctgggagaggaccggtttgggaaagtctacaaaggtcacctgttcggccctgccccgggggagcagacccaggctgtggccatcaaaacgctgaaggacaaagcggaggggcccctgcgggaggagttccggcatgaggctatgctgcgagcacggctgcaacaccccaacgtcgtctgcctgctgggcgtggtgaccaaggaccagcccctgagcatgatcttcagctactgttcgcacggcgacctccacgaattcctggtcatgcgctcgccgcactcggacgtgggcagcaccgatgatgaccgcacggtgaagtccgccctggagccccccgacttcgtgcaccttgtggcacagatcgcggcggggatggagtacctatccagccaccacgtggttcacaaggacctggccacccgcaatgtgctagtgtacgacaagctgaacgtgaagatctcagacttgggcctcttccgagaggtgtatgccgccgattactacaagctgctggggaactcgctgctgcctatccgctggatggccccagaggccatcatgtacggcaagttctccatcgactcagacatctggtcctacggtgtggtcctgtgggaggtcttcagctacggcctgcagccctactgcgggtactccaaccaggatgtggtggagatgatccggaaccggcaggtgctgccttgccccgatgactgtcccgcctgggtgtatgccctcatgatcgagtgctggaacgagttccccagccggcggccccgcttcaaggacatccacagccggctccgagcctggggcaacctttccaactacaacagctcggcgcagacctcgggggccagcaacaccacgcagaccagctccctgagcaccagcccagtgagcaatgtgagcaacgcccgctacgtggggcccaagcagaaggccccgcccttcccacagccccagttcatccccatgaagggccagatcagacccatggtgcccccgccgcagctctacgtccccgtcaacggctaccagccggtgccggcctatggggcctacctgcccaacttctacccggtgcagatcccaatgcagatggccccgcagcaggtgcctcctcagatggtccccaagcccagctcacaccacagtggcagtggctccaccagcacaggctacgtcaccacggccccctccaacacatccatggcagacagggcagccctgctctcagagggcgctgatgacacacagaacgccccagaagatggggcccagagcaccgtgcaggaagcagaggaggaggaggaaggctctgtcccagagactgagctgctgggggactgtgacactctgcaggtggacgaggcccaagtccagctggaagcttgagtggcaccagggcccggggttcggggatagaagccccgccgagaccccacagggacctcagtcacctttgagaagacaccatactcagcaatcacaagagcccgccggccagtgggcttgtttgcagactgggtgaggtggagccctgctcctctctgtcctctgacacagagagctgccctgcctaggagcacccaagccaggcagggggtctggcagcacggcgtcctggggagcaggacacatggtcatccccagggctgtatacattgattctggtggtagactggtagtgagcagcaaatgcctttcaagaaaataggtggcagcttcactccatgtcatatatggagtgaatatttcaaaacgttgggaataagggcctgcaaaaggcagcgaggaggcacctcgggtcttgaggttcctgacaaccgatctggtctgttggtttgaggatgaaggggctccatttctgctgcctccctgctgagaatattctccctttagcagccaaagattcgctggaacggaggctgccctctgctgcctgttggggtcggaagacaaggggcttctgaaatgggagttcctgagatacaacaaaatgtgtgccttcaaagaaactgacagctttgtatttggtgaaatggttttaattatactccatgtgtattttgcccactttttttgggaattcaagggaaagtgtttcttgggtttggaatgttcagaggaagcagtattgtacagaacacggtattgttatttttgttaagaatcatgtacagagcttaaatgtaatttatatgtttttaatatgccattttcattgaagtattttggtcttaagatgactttagtaatttaactgtttatgttacccacgttgggatccagttggtcttggtttgcttctctctgtaccacgtgcacatgaggtccattcattttacagcccctgttacacacagacccacaggcagccgtctgtgcccgcacacattgttggtcctatttgtaaatcccacacccggtgtatccaataaagtgaaaccaacccc

SEQ ID NO: 2609 - DNA, 2733 bp, Homo sapiens
gaattcgggagcgtcctcagatgcaccgatcttcccgatactgcctttggagcggctagattgctagccttggctgctccattggcctgccttgccccttacctgccgattgcatatgaactcttcttctgtctgtacatcgttgtcgtcggagtcgtcgcgatcgtcgtggcgctcgtgtgatggccttcgtccgtttagagtagtgtagttagttaggggccaacgaagaagaaagaagacgcgattagtgcagagatgctggaggtggtcagttactaagctagagtaagatagcggagcgaaaagagccaaacctagccggggggcgcacggtcacccaaaggaggtcgactcgccggcgcttcctatcgcgccgagctccctccattcctctccctccgccgaggcgcgaggttgcggcgcgcagcgcagcgcagctcagcgcaccgactgccgcgggctccgctgggcgattgcagccgagtccgtttctcgtctagctgccgccgcggcgaccgctgcctggtcttcctcccggacgctagtgggttatcagctaacacccgcgagcatctataacataggccaactgacgccatccttcaaaaacaactgtctgggaaaaaaagaataaaaagtagtgtgagagcagaaaacgtgattgaaacacgaccaatctttcttcagtgccaaagggtggaaaagaaaggatgatatgatgaacctagcctgttaatttcgtcttctcaattttaaactttggttgcttaagactgaagcaatcatggtgaacctgaggaatgcggtgcattcattccttgtgcacctaattggcctattggtttggcaatgtgatatttctgtgagcccagtagcagctatagtaactgacattttcaatacctccgatggtggacgcttcaaattcccagacggggtacaaaactggccagcactttcaatcgtcatcataataatcatgacaataggtggcaacatccttgtgatcatggcagtaagcatggaaaagaaactgcacaatgccaccaattacttcttaatgtccctagccattgctgatatgctagtgggactacttgtcatgcccctgtctctcctggcaatcctttatgattatgtctggccactacctagatatttgtgccccgtctggatttctttagatgttttattttcaacagcgtccatcatgcacctctgcgctatatcgctggatcggtatgtagcaatacgtaatcctattgagcatagccgtttcaattcgcggactaaggccatcatgaagattgctattgtttgggcaatttctataggtgtatcagttcctatccctgtgattggactgagggacgaagaaaaggtgttcgtgaacaacacgacgtgcgtgctcaacgacccaaatttcgttcttattgggtccttcgtagctttcttcataccgctgacgattatggtgattacgtattgcctgaccatctacgttctgcgccgacaagctttgatgttactgcacggccacaccgaggaaccgcctggactaagtctggatttcctgaagtgctgcaagaggaatacggccgaggaagagaactctgcaaaccctaaccaagaccagaacgcacgccgaagaaagaagaaggagagacgtcctaggggcaccatgcaggctatcaacaatgaaagaaaagcttcgaaagtccttgggattgttttctttgtgtttctgatcatgtggtgcccatttttcattaccaatattctgtctgttctttgtgagaagtcctgtaaccaaaagctcatggaaaagcttctgaatgtgtttgtttggattggctatgtttgttcaggaatcaatcctctggtgtatactctgttcaacaaaatttaccgaagggcattctccaactatttgcgttgcaattataaggtagagaaaaagcctcctgtcaggcagattccaagagttgccgccactgctttgtctgggagggagcttaatgttaacatttatcggcataccaatgaaccggtgatcgagaaagccagtgacaatgagcccggtatagagatgcaagttgagaatttagagttaccagtaaatccctccagtgtggttagcgaaaggattagcagtgtgtgagaaagaacagcacagtcttttctacggtacaagctacatatgtaggaaaattttcttctttaatttttctgttggtcttaactaatgtaaatattgctgtctgaaaaagtgtttttacatatagctttgcaaccttgtactttacaatcatgcctacattagtgagatttagggttctatatttactgtttataataggtggagactaacttattttgattgtttgatgaataaaatgtttatttttgctctccctcccttctttccttccttttttcctttcttccttcctttctctctttcttttgtgcatatggcaacgttcatgttcatctcaggtggcatttgcaggtgaccagaatgaggcacatgacagtggttatatttcaaccacacctaaattaacaaattcagtggacatttgttctgggttaacagtaaatatacactttacattcttgctctgctcatctacacatataaacacagtaagataggttctgctttctgatacatctgtcagtgagtcagaggcagaacctagtcttgttgttcatataggggaattc

SEQ ID NO: 2610 - DNA, 2570 bp, Homo sapiens
gcccctcccgtcagttcgccagctgccagccccgggaccttttcatctcttcccttttggccggaggagccgagttcagatccgccactccgcacccgagactgacacactgaactccacttcctcctcttaaatttatttctacttaatagccactcgtctctttttttccccatctcattgctccaagaatttttttcttcttactcgccaaagtcagggttccctctgcccgtcccgtattaatatttccacttttggaactactggccttttctttttaaaggaattcaagcaggatacgtttttctgttgggcattgactagattgtttgcaaaagtttcgcatcaaaaacaacaacaacaaaaaaccaaacaactctccttgatctatactttgagaattgttgatttcttttttttattctgacttttaaaaacaacttttttttccacttttttaaaaaatgcactactgtgtgctgagcgcttttctgatcctgcatctggtcacggtcgcgctcagcctgtctacctgcagcacactcgatatggaccagttcatgcgcaagaggatcgaggcgatccgcgggcagatcctgagcaagctgaagctcaccagtcccccagaagactatcctgagcccgaggaagtccccccggaggtgatttccatctacaacagcaccagggacttgctccaggagaaggcgagccggagggcggccgcctgcgagcgcgagaggagcgacgaagagtactacgccaaggaggtttacaaaatagacatgccgcccttcttcccctccgaaactgtctgcccagttgttacaacaccctctggctcagtgggcagcttgtgctccagacagtcccaggtgctctgtgggtaccttgatgccatcccgcccactttctacagaccctacttcagaattgttcgatttgacgtctcagcaatggagaagaatgcttccaatttggtgaaagcagagttcagagtctttcgtttgcagaacccaaaagccagagtgcctgaacaacggattgagctatatcagattctcaagtccaaagatttaacatctccaacccagcgctacatcgacagcaaagttgtgaaaacaagagcagaaggcgaatggctctccttcgatgtaactgatgctgttcatgaatggcttcaccataaagacaggaacctgggatttaaaataagcttacactgtccctgctgcacttttgtaccatctaataattacatcatcccaaataaaagtgaagaactagaagcaagatttgcaggtattgatggcacctccacatataccagtggtgatcagaaaactataaagtccactaggaaaaaaaacagtgggaagaccccacatctcctgctaatgttattgccctcctacagacttgagtcacaacagaccaaccggcggaagaagcgtgctttggatgcggcctattgctttagaaatgtgcaggataattgctgcctacgtccactttacattgatttcaagagggatctagggtggaaatggatacacgaacccaaagggtacaatgccaacttctgtgctggagcatgcccgtatttatggagttcagacactcagcacagcagggtcctgagcttatataataccataaatccagaagcatctgcttctccttgctgcgtgtcccaagatttagaacctctaaccattctctactacattggcaaaacacccaagattgaacagctttctaatatgattgtaaagtcttgcaaatgcagctaaaattcttggaaaagtggcaagaccaaaatgacaatgatgatgataatgatgatgacgacgacaacgatgatgcttgtaacaagaaaacataagagagccttggttcatcagtgttaaaaaatttttgaaaaggcggtactagttcagacactttggaagtttgtgttctgtttgttaaaactggcatctgacacaaaaaaagttgaaggccttattctacatttcacctactttgtaagtgagagagacaagaagcaaattttttttaaagaaaaaaataaacactggaagaatttattagtgttaattatgtgaacaacgacaacaacaacaacaacaacaaacaggaaaatcccattaagtggagttgctgtacgtaccgttcctatcccgcgcctcacttgatttttctgtattgctatgcaataggcacccttcccattcttactcttagagttaacagtgagttatttattgtgtgttactatataatgaacgtttcattgcccttggaaaataaaacaggtgtataaagtggagaccaaatactttgccagaaactcatggatggcttaaggaacttgaactcaaacgagccagaaaaaaagaggtcatattaatgggatgaaaacccaagtgagttattatatgaccgagaaagtctgcattaagataaagaccctgaaaacacatgttatgtatcagctgcctaaggaagcttcttgtaaggtccaaaaactaaaaagactgttaataaaagaaactttcagtcag

SEQ ID NO: 2611 - DNA, 2153 bp, Homo sapiens
ctggtatatttgtgcctgctggaggtggaattaacagtaagaaggagaaagggattgaatggacttacaggaaggatttcaagtaaattcagggaaacacatttacttgaatagtacaacctagagtattattttacactaagacgacacaaaagatgttaaagttatcaccaagctgccggacagatatatattccaacaccaaggtgcagatcagcatagatctgtgattcagaaatcaggatttgttttggaaagagctcaagggttgagaagaactcaaaagcaagtgaagattactttgggaactacagtttatcagaagatcaacttttgctaattcaaataccaaaggcctgattatcataaattcatataggaatgcataggtcatctgatcaaataatattagccgtcttctgctacatcaatgcagcaaaaactcttaacaactgtggataattggaaatctgagtttcagctttcttagaaataactactcttgacatattccaaaatatttaaaataggacaggaaaatcggtgaggatgttgtgctcagaaatgtcactgtcatgaaaaataggtaaatttgttttttcagctactgggaaactgtacctcctagaaccttaggtttttttttttttaagaggacaagaaggactaaaaatatcaacttttgcttttggacaaaaatgcatctgactgtatttttacttaagggtattgtgggtttcctctggagctgctgggttctagtgggttatgcaaaaggaggtttgggagacaatcatgttcactccagttttatttatagaagactacggaaccacgaaagacgggaaatacaaagggaaattctctctatcttgggtttgcctcacagacccagaccattttcacctggaaaacaagcgtcctctgcacctctctttatgctggatctctacaatgccatgaccaatgaagaaaatcctgaagagtcggagtactcagtaagggcatccttggcagaagagaccagaggggcaagaaagggatacccagcctctcccaatgggtatcctcgtcgcatacagttatctcggacgactcctctgaccacccagagtcctcctctagccagcctccatgataccaactttctgaatgatgctgacatggtcatgagctttgtcaacttagttgaaagagacaaggatttttctcaccagcgaaggcattacaaagaatttcgatttgatcttacccaaattcctcatggagaggcagtgacagcagctgaattccggatatacaaggaccggagcaacaaccgatttgaaaatgaaacaattaagattagcatatatcaaatcatcaaggaatacacaaatagggatgcagatctgttcttgttagacacaagaaaggcccaagctttagatgtgggttggcttgtctttgatatcactgtgaccagcaatcattgggtgattaatccccagaataatttgggcttacagctctgtgcagaaacaggggatggacgcagtatcaacgtaaaatctgctggtcttgtgggaagacagggacctcagtcaaaacaaccattcatggtggccttcttcaaggcgagtgaggtacttcttcgatccgtgagagcagccaacaaacgaaaaaatcaaaaccgcaataaatccagctctcatcaggactcctccagaatgtccagtgttggagattataacacaagtgagcaaaaacaagcctgtaagaagcacgaactctatgtgagcttccgggatctgggatggcaggactggattatagcaccagaaggatacgctgcattttattgtgatggagaatgttcttttccacttaacgcccatatgaatgccaccaaccacgctatagttcagactctggttcatctgatgtttcctgaccacgtaccaaagccttgttgtgctccaaccaaattaaatgccatctctgttctgtactttgatgacagctccaatgtcattttgaaaaaatatagaaatatggtagtacgctcatgtggctgccactaatattaaataatattgataataacaaaaagatctgtattaaggtttatggctgcaataaaaagcatactttcagacaaacagaaaaaaaaa

SEQ ID NO: 2612 - DNA, 2637 bp, Homo sapiens
ttcgatgtgggctcagagaagacacgaattggtcttgcacagtatagtggtgaccccagaatagaatggcacttgaatgcatttagcacaaaagatgaagtgattgaagctgtccgaaacctcccatataaaggaggaaatacactaacaggtcttgctttgaactacatttttgaaaatagcttcaaaccagaagcaggatcaaggactggagtatccaaaattggcattttaatcacagatggaaaatcccaagatgacattattccaccatctagaaatcttcgtgagtctggtgtagaactgtttgccataggggtgaaaaacgcggatgtgaatgagctgcaggagatcgcctctgaaccagacagcactcatgtgtacaatgttgccgaattcgatctgatgcacacagttgtggagagtctgaccaggactctctgctctagagtggaagaacaggacagagaaattaaagcctcagcccatgccatcactgggccgcctacggagttgattacttctgaagtcactgccagaagctttatggttaactggactcatgccccaggaaatgtggaaaaatacagagttgtgtattatcctaccaggggtggaaaaccagacgaggtggtggtagatggaactgtatcttccacagtgttgaaaaacttgatgtctttaactgaatatcagatagcagtctttgcaatctatgcccacactgctagtgaaggcctacggggaactgaaactacacttgctttaccgatggcttctgaccttctactgtacgacgtgactgagaacagcatgcgagtcaaatgggatgcagtgcctggggcctcaggttacctgatcctttatgctcctctaacagagggcctggctggggatgaaaaagagatgaaaattggagagacccacacagatattgaattgagtgggttgttgcccaatacagaatacacagtcacagtttatgccatgtttggagaagaggccagtgatcctgttacgggacaagaaacaacattggctttaagtccaccaagaaacctgagaatctccaatgttggctctaacagtgctcgattaacctgggacccaacttcaagacagatcaatggttatcgaattgtatataacaatgcagatgggactgaaatcaatgaggttgaagtcgatcctattactaccttccctctgaagggcttgacacctctcacagagtatactattgctattttctccatctatgatgaaggacagtcagagcctctgattggagtttttaccaccgaggaagttccagcccagcaatacttagaaattgatgaggtgacgacagacagttttagggtgacctggcatcccctctcagctgatgaagggctacacaaattgatgtggattccagtctatggggggaagactgaggaggttgtcctgaaagaagagcaggactcacatgttattgaaggcctggagcccggtacggagtatgaagtttcactattggccgtacttgatgatggaagcgagagtgaggtggtgactgctgtcgggaccacacttgacagtttttggacagaaccagctacaaccatagtgcctaccacatctgtgacttcagttttccagacgggaatcagaaacctagttgtaggtgatgaaactacttctagcctgcgggtaaaatgggacatttctgacagcgatgtgcagcagtttagggtgacctacatgacagctcaaggggaccctgaggaagaagtcataggaacggttatggtgcctggaagccagaacaacctccttctgaagcctctgcttcctgatactgaatacaaagtcacagtgactcccatctacacggatggcgaaggcgtcagcgtctccgctcctggaaaaaccttaccatcctcggggccccagaacttgcgggtgtccgaggaatggtataaccggttgcgcattacgtgggaccccccatcttccccggtgaaaggctatagaattgtctacaaacctgtcagtgttcctggtccaacactggaaacgtttgtgggagctgacattaacaccatccttatcacaaacctcctcagcggaatggactacaatgtgaagatatttgcctcccaggcctcaggcttcagcgacgccctgacaggcatggtgaaaacattgttcttgggtgttaccaatctccaagccaaacatgttgaaatgaccagcttgtgtgcccactggcaggtacatcgccatgccacagcctatagggttgttatagaatccctccaggataggcaaaagcaagaatccactgtgggtggagggacaaccaggcattgcttctatggacttcagcctgattctgaatataaaatcagtgtttatacaaagctccaggagattgaaggacctagtgtgagcataatggaaaaaacacaatcacttcctacacgaccaccaacttttcctccaaccattccaccagcaaaagaaggtaaaagaataatagaataattatctgattctaggtttaggatttgtgttggttttgtttgcctgttcatttcaaaccaggatattaataaagtatatttattgtgctaaaaaaaaaaaaaaaaa

SEQ ID NO: 2613 - DNA, 1399 bp, Homo sapiens
ggtgtctgtcaaactccagcaattgctgacattgtaatcctggtcgatggttcatggagtattggaagattcaacttcagactggttcggcatttcttggaaaacctggttacagcattcgatgtgggctcagagaagacacgaattggggtgaaaaacgcggatgtgaatgagctgcaggagatcgcctctgaaccagacagcactcatgtgtacaatgttgccgaattcgatctgatgcacacagttgtggagagtctgaccaggactctctgctctagagtggaagaacaggacagagaaattaaagcctcagcccatgccatcactgggccgcctacggagttgattacttctgaagtcactgccagaagctttatggttaactggactcatgccccaggaaatgtggaaaaatacagagttgtgtattatcctaccaggggtggaaaaccagacgaggtggtggtagatggaactgtatcttccacagtgttgaaaaacttgatgtctttaactgaatatcagatagcagtctttgcaatctatgcccacactgctagtgaaggcctacggggaactgaaactacacttgctttaccgatggcttctgaccttctactgtacgacgtgactgagaacagcatgcgagtcaaatgggatgcagtgcctggggcctcaggttacctgatcctttatgctcctctaacagagggcctggctggggatgaaaaagagatgaaaattggagagacccacacagatattgaattgagtgggttgttgcccaatacagaatacacagtcacagtttatgccatgtttggagaagaggccagtgatcctgttacgggacaagaaacaacattggctttaagtccaccaagaaacctgagaatctccaatgttggctctaacagtgctcgattaacctgggacccaacttcaagacagatcaatggttatcgaattgtatataacaatgcagatgggactgaaatcaatgaggttcagattttgcttaaactgtggagcaatggtttcagtttagatgatggagaattgagaccttacaatgaaccaacaaatgctcaatttctggagtctgttaagagaggccttacacctgaaatagtcagtacaccttcctctccagaagaggaggataaatcaatacttaatgcagttgttcttattgatgattcagtgccaacaacaaaaattcaaatcaggttagcagatgggagtcgtttgatacaaagattcaatagtacacacaggatcctggatgtccggaactttattgtacagtctcgtcctgaatttgccggctcttgactttattcttgtgacttcatttccgaataaagagctaacagatgaaaaaaaaaaaaaaaaa

SEQ ID NO: 2614 - DNA, 2808 bp, Homo sapiens
ggaaagcacctgtgagcttggcaagtcagttcagagctccagcccgctccagcccggcccgacccgaccgcacccggcgcctgcctcgctcgggctccccggccagccatgggcccttggagccgcagcctctcgggcctgctgctgctgctgaggtctcctcttggctctcaggagcggagccctcctccctgtttgacgcgagagctacacgttcacggtgccccggcgccacctgagaagaggccgcgtctgggcagagtgaattttgaagattgcaccggtcgacaaaggacagctattttcctgacaccgattccgaaagtgggcacagatggtgtgattacagtcaaaaggcctctacggtttcataacccaacagatccatttcttggtctacgctgggactccacctacagaaagttttccaccaaagtcacgctgaatacagtggggcaccaccaccgccccccgccccatcaggcctccgtttctggaatccaagcagaattgctcacatttcccaactcctctcctggcctcagaagacagaagagagactgggttattcctcccatcagctgcccagaaaatgaaaaaggcccatttcctaaaaacctggttcagatcaaatccaacaaagacaaagaaggcaaggttttctacagcatcactggccaaggagctgacacaccccctgttggtgtctttattattgaaagagaaacaggatggctgaaggtgacagagcctctggatagagaacgcattgccacatacactctcttctctcacgctgtgtcatccaacgggaatgcagttgaggatccaatggagattttgatcacggtaaccgatcagaatgacaacaagcccgaattcacccaggaggtctttaaggggtctgtcatggaaggtgctcttccaggaacctctgtgatggaggtcacagccacagacgcggacgatgatgtgaacacctacaatgccgccatcgcttacaccatcctcagccaagatcctgagctccctgacaaaaatatgttcaccattaacaggaacacaggagtcatcagtgtggtcaccactgggctggaccgagagagtttccctacgtataccctggtggttcaagctgctgaccttcaaggtgaggggttaagcacaacagcaacagctgtgatcacagtcactgacaccaacgataatcctccgatcttcaatcccaccacgtacaagggtcaggtgcctgagaacgaggctaacgtcgtaatcaccacactgaaagtgactgatgctgatgcccccaataccccagcgtgggaggctgtatacaccatattgaatgatgatggtggacaatttgtcgtcaccacaaatccagtgaacaacgatggcattttgaaaacagcaaagggcttggattttgaggccaagcagcagtacattctacacgtagcagtgacgaatgtggtaccttttgaggtctctctcaccacctccacagccaccgtcaccgtggatgtgctggatgtgaatgaaggccccatctttgtgcctcctgaaaagagagtggaagtgtccgaggactttggcgtgggccaggaaatcacatcctacactgcccaggagccagacacatttatggaacagaaaataacatatcggatttggagagacactcgcaactggctggagattaatccggacactggtgccatttccactcgggctgagctggacagggaggattttgagcacgtgaagaacagcacgtacacagccctaatcatagctacagacaatggttctccagttgctactggaacagggacacttctgctgatcctgtctgatgtgaatgacaacgcccccataccagaacctcgaactatattcttctgtgagaggaatccaaagcctcaggtcataaacattcatgatgcagaccttcctcccaatacatctcccttcacagcagaactaacacacgggcgagtgcccaactggaccattcagtacaacgacccaacccaagaatctatcattttgaagccaaagatggccttagaggtgggtgactacaaaatcaatctcaagctcatggataaccagaataaagaccaagtgaccaccttagaggtcagcgtgtgtgactgtgaaggggccgccggcgtctgtaggaaggcacagcctgtcgaagcaggattgcaaattcctgccattctggggattcttggaggaattcttgctttgctaattctgattctgctgctcttgctgtttcttcggaggagagcggtggtcaaagagcccttactgcccccagaggatgacacccgggacaacgtttattactatgatgaagaaggaggcggagaagaggaccaggactttgacttgagccagctgcacaggggcctggacgctcggcctgaagtgactcgtaacgacgttgcaccaaccctcatgagtgtcccccggtatcttccccgccctgccaatcccgatgaaattggaaattttattgatgaaaatctgaaagcggctgatactgaccccacagccccgccttatgattctctgctcgtgtttgactatgaaggaagcggttccgaagctgctagtctgagctccctgaactcctcagagtcagacaaagaccaggactatgactacttgaacgaatggggcaatccgttcaagaagctggctgacatgtacggaggcggcgaggaccactaggggactcgagagaggcggcccagaccatgtgcagaaatgcagaaatcagcgttctggtgtttt

SEQ ID NO: 2615 - DNA, 5717 bp, Homo sapiens
ggctaccgctcccggcttggcgtcccgcgcgcacttcggcgatggcttttccgccgcggcgacggctgcgcctcggtccccgcggcctcccgcttcttctctcgggactcctgctacctctgtgccgcgccttcaacctagacgtggacagtcctgccgagtactctggccccgagggaagttacttcggcttcgccgtggatttcttcgtgcccagcgcgtcttcccggatgtttcttctcgtgggagctcccaaagcaaacaccacccagcctgggattgtggaaggagggcaggtcctcaaatgtgactggtcttctacccgccggtgccagccaattgaatttgatgcaacaggcaatagagattatgccaaggatgatccattggaatttaagtcccatcagtggtttggagcatctgtgaggtcgaaacaggataaaattttggcctgtgccccattgtaccattggagaactgagatgaaacaggagcgagagcctgttggaacatgctttcttcaagatggaacaaagactgttgagtatgctccatgtagatcacaagatattgatgctgatggacagggattttgtcaaggaggattcagcattgattttactaaagctgacagagtacttcttggtggtcctggtagcttttattggcaaggtcagcttatttcggatcaagtggcagaaatcgtatctaaatacgaccccaatgtttacagcatcaagtataataaccaattagcaactcggactgcacaagctatttttgatgacagctatttgggttattctgtggctgtcggagatttcaatggtgatggcatagatgactttgtttcaggagttccaagagcagcaaggactttgggaatggtttatatttatgatgggaagaacatgtcctccttatacaattttactggcgagcagatggctgcatatttcggattttctgtagctgccactgacattaatggagatgattatgcagatgtgtttattggagcacctctcttcatggatcgtggctctgatggcaaactccaagaggtggggcaggtctcagtgtctctacagagagcttcaggagacttccagacgacaaagctgaatggatttgaggtctttgcacggtttggcagtgccatagctcctttgggagatctggaccaggatggtttcaatgatattgcaattgctgctccatatgggggtgaagataaaaaaggaattgtttatatcttcaatggaagatcaacaggcttgaacgcagtcccatctcaaatccttgaagggcagtgggctgctcgaagcatgccaccaagctttggctattcaatgaaaggagccacagatatagacaaaaatggatatccagacttaattgtaggagcttttggtgtagatcgagctatcttatacagggccagaccagttatcactgtaaatgctggtcttgaagtgtaccctagcattttaaatcaagacaataaaacctgctcactgcctggaacagctctcaaagtttcctgttttaatgttaggttctgcttaaaggcagatggcaaaggagtacttcccaggaaacttaatttccaggtggaacttcttttggataaactcaagcaaaagggagcaattcgacgagcactgtttctctacagcaggtccccaagtcactccaagaacatgactatttcaagggggggactgatgcagtgtgaggaattgatagcgtatctgcgggatgaatctgaatttagagacaaactcactccaattactatttttatggaatatcggttggattatagaacagctgctgatacaacaggcttgcaacccattcttaaccagttcacgcctgctaacattagtcgacaggctcacattctacttgactgtggtgaagacaatgtctgtaaacccaagctggaagtttctgtagatagtgatcaaaagaagatctatattggggatgacaaccctctgacattgattgttaaggctcagaatcaaggagaaggtgcctacgaagctgagctcatcgtttccattccactgcaggctgatttcatcggggttgtccgaaacaatgaagccttagcaagactttcctgtgcatttaagacagaaaaccaaactcgccaggtggtatgtgaccttggaaacccaatgaaggctggaactcaactcttagctggtcttcgtttcagtgtgcaccagcagtcagagatggatacttctgtgaaatttgacttacaaatccaaagctcaaatctatttgacaaagtaagcccagttgtatctcacaaagttgatcttgctgttttagctgcagttgagataagaggagtctcgagtcctgatcatatctttcttccgattccaaactgggagcacaaggagaaccctgagactgaagaagatgttgggccagttgttcagcacatctatgagctgagaaacaatggtccaagttcattcagcaaggcaatgctccatcttcagtggccttacaaatataataataacactctgttgtatatccttcattatgatattgatggaccaatgaactgcacttcagatatggagatcaaccctttgagaattaagatctcatctttgcaaacaactgaaaagaatgacacggttgccgggcaaggtgagcgggaccatctcatcactaagcgggatcttgccctcagtgaaggagatattcacactttgggttgtggagttgctcagtgcttgaagattgtctgccaagttgggagattagacagaggaaagagtgcaatcttgtacgtaaagtcattactgtggactgagacttttatgaataaagaaaatcagaatcattcctattctctgaagtcgtctgcttcatttaatgtcatagagtttccttataagaatcttccaattgaggatatcaccaactccacattggttaccactaatgtcacctggggcattcagccagcgcccatgcctgtgcctgtgtgggtgatcattttagcagttctagcaggattgttgctactggctgttttggtatttgtaatgtacaggatgggcttttttaaacgggtccggccacctcaagaagaacaagaaagggagcagcttcaacctcatgaaaatggtgaaggaaactcagaaacttaactgcagtttttaagttatgctacatcttgacccactagaattagcaactttattatagatttaaactttcttcatgaggagtaaaaatccaaggctttactgctgatagtgctaattggcattaaccacaaaatgagaattatatttgtcaaccttctccttataaataagttcagacatacatttaataacatagggtgacttgtgtttttaggtatttaaataataaaatttcaagggatagtttttattcaatgtatataagacaggtagtgcctgatttactactttatataaaatagtacctccttcagttactgtttctgatttaatgtacggaactttatttgttgttgttgttgttgttgttgttgttgttttaaagcagtccaaatttggaccttagcaatcatgtcttttgtataggtacttaatgttaatacatattacactacagtttacttttcagaatactaaagactttataactgcatgaacttggatttttttaatcactcatatggtagaattttataaacacatacatgataccatccaaattcttgcttttaataacaaaggtacaatattttgttttagtatgaaaatctggtagatcctattacacttctgtttatattaaatccacaatattttattacatttttaacttgtataaattttaggtcaaatccttcaagccaacctatactaaaaattagttccataatcacaaatggctcttttgtgtaattgtttaatttcacctgaatatcataatgcttaaagccatatggagttggaaattatttccaaagcatatttattccattgttttagtctggctatttacagtataaaaaaagcattttattaaaatactgtgtagttctttgagatagttgcttatgcatatagtaagtattacattcttagagtagagcagagtttttagttagtattaatttattttcctccattcatgtacttttccttatatttccaaaactgttactgagaatgggtcaagatcagtgagaaatctttacagttgacaggaacctggaccccttaccccaactttatgagtaatgcttggaataaaaaactcttaaggcaactcactgatttacttctagcaatagcatgatgttacaggaatattacctctgtttaagcaaggtaatgtgtaaaatcagtctcggctgtcagaataacttctaaaaggtatttttataagcagttcaagttactgaaaaccttttaaacctttctgaagttcgttagtataaattacttttctaggattattaataaaagccacataggtggcaagttgtagttttatatggctctgtagagtggtgaaccttctagaggaatatatgatttattcacagttcctcaaggcctggggatgatgatcagttatacctatttttgtgcaattacatcatgttgtacattagaaatggagagtttaatagctctttaactgctgtcctcattaggtaatgataaatatttcccttaaataattgactattttgctgtgttttaaaaatgattgaaatttatcttgccatatctcataatttcatgcacaagttgactgagctaatcttgagaatatattcgtaaaataggagcacatttagttgaggtatacaaggtaggactctagacaaaaccttctattttagctttagtgaatttcaaaagtaatgggtcttggagtatagatttttattagtagcttgaaagagcttaatcatatgcagtaagtatttttattaccaataaatttaaaattttttaagaaaaatatttttatcctagggccaagtgttgcctgccaccaatcagtaagttagtctataacaaattttaccctaacagttttaccacctagcaacagtcatttctgaaaatatgttggatagaaagtcactctttggcaaaagtgttagaatttgcttttgtgccatctattccttttatggcatctatcttgaaagtaatcttgtattggagattgaaagatgctgtaatttagaaattaacatgatatcttaaattacctttatgaaatatagttttgtataatagcatagattttccttcaaaaaatgaacatttatatatctacaaaaatatggagaagagcaatttgaaagcctactttctgaagaaaatggtgggatttttttttatcatgattaaatatcaaaaaattgccctatgaaaactttaaatctctaaaacatttgaaatactaccatatttgtgatttattgagaataaaaatccattttgaaatgtaaaatttttatgatctgattcagttttaagaaaacatgaatgaactagaagatattaaaaacatttgacattggtaagaaatattgatactgatattgatttttatataggtatttatttcagaattgatattttgagaaaaatacatgtgagtcattttttctgtttctcttttctcttaacgattatcactgtaattctgaatct

SEQ ID NO: 2616 - DNA, 1631 bp, Homo sapiens
ggaattccgccacggatggatggccagatggatagatctggcaggaaagaagccgtggtcctggggaccgaggacgcgctgccgccgccgctgcctcctccgggcagcctctaccacttcttccagctgcacatggtttgggtcgtgctgctcagcctcctgtgctacctcgtgctgttcctctgccgacattcctcccatcgaggcgtcttcctatccgtcaccatcctcatctacctactcatgggtgagatgcacatggtagacaccgtgacatggcacaagatgcgaggggcacagatgattgtggccatgaaggcagtgtctctgggcttcgacctggaccggggcgaggtgggtacggtgccctcgccagtggagttcatgggctacctctacttcgtgggcaccatcgtcttcgggccctggatatccttccacagctacctacaagctgtccaaggccgcccactgagctgccggtggctgcagaaggtggcccggagcctggcactggccctgctgtgccttgtgctgtccacttgcgtgggcccctacctcttcccgtacttcatccccctcaacggtgaccgcctccttcgcaacaagaaacgcaaagccaggggcaccatggtaaggtggctgcgagcctacgagagtgctgtctccttccacttcagcaactattttgtgggctttctttccgaggccacggccacgttggcgggggctggctttaccgaggagaaggatcacctggaatgggacctgacggtgtccaagccactgaatgtggagctgcctcggtcaatggtggaagttgtcacaagctggaacctgcccatgtcttattggctaaataactatgttttcaagaatgctctccgcctggggaccttctcggctgtgctggtcacctatgcagccagcgccctcctacatggcttcagtttccacctggctgcggtcctgctgtccctggcttttatcacttacgtggagcatgtcctccggaagcgcctggctcggatcctcagtgcctgtgtcttgtcaaagcggtgcccgccagactgttcgcaccagcatcgcttgggcctgggggtgcgagccttaaacttgctctttggagctctggccatcttccacctggcctacctgggctccctgtttgatgtcgatgtggatgacaccacagaggagcagggctacggcatggcatacactgtccacaagtggtcagagctcagctgggccagtcactgggtcacttttggatgctggatcttctaccgtctcataggctgaggcacatctgtggaccctcataaccctcttaagacccctctcagggtgccactgatgggggatgagggaaggccctctctctactccttgaccccctccatccttgacccccaacacctcaacacacacacacacacacacacacaaaatcacaccattttcatgcctgtcaatccccaccccaccacaaggcaggaaaggggtggtgcctgctggggcctagagggggatgcttggggaaacgagaaggggagatccagggcctcccccccttccttcttcctttttatatacaatttgttattgtcaaataaaaacggaattcc

SEQ ID NO: 2617 - DNA, 3213 bp, Homo sapiens
agagactcaagatgattccctttttacccatgttttctctactattgctgcttattgttaaccctataaacgccaacaatcattatgacaagatcttggctcatagtcgtatcaggggtcgggaccaaggcccaaatgtctgtgcccttcaacagattttgggcaccaaaaagaaatacttcagcacttgtaagaactggtataaaaagtccatctgtggacagaaaacgactgttttatatgaatgttgccctggttatatgagaatggaaggaatgaaaggctgcccagcagttttgcccattgaccatgtttatggcactctgggcatcgtgggagccaccacaacgcagcgctattctgacgcctcaaaactgagggaggagatcgagggaaagggatccttcacttactttgcaccgagtaatgaggcttgggacaacttggattctgatatccgtagaggtttggagagcaacgtgaatgttgaattactgaatgctttacatagtcacatgattaataagagaatgttgaccaaggacttaaaaaatggcatgattattccttcaatgtataacaatttggggcttttcattaaccattatcctaatggggttgtcactgttaattgtgctcgaatcatccatgggaaccagattgcaacaaatggtgttgtccatgtcattgaccgtgtgcttacacaaattggtacctcaattcaagacttcattgaagcagaagatgacctttcatcttttagagcagctgccatcacatcggacatattggaggcccttggaagagacggtcacttcacactctttgctcccaccaatgaggcttttgagaaacttccacgaggtgtcctagaaaggttcatgggagacaaagtggcttccgaagctcttatgaagtaccacatcttaaatactctccagtgttctgagtctattatgggaggagcagtctttgagacgctggaaggaaatacaattgagataggatgtgacggtgacagtataacagtaaatggaatcaaaatggtgaacaaaaaggatattgtgacaaataatggtgtgatccatttgattgatcaggtcctaattcctgattctgccaaacaagttattgagctggctggaaaacagcaaaccaccttcacggatcttgtggcccaattaggcttggcatctgctctgaggccagatggagaatacactttgctggcacctgtgaataatgcattttctgatgatactctcagcatggttcagcgcctccttaaattaattctgcagaatcacatattgaaagtaaaagttggccttaatgagctttacaacgggcaaatactggaaaccatcggaggcaaacagctcagagtcttcgtatatcgtacagctgtctgcattgaaaattcatgcatggagaaagggagtaagcaagggagaaacggtgcgattcacatattccgcgagatcatcaagccagcagagaaatccctccatgaaaagttaaaacaagataagcgctttagcaccttcctcagcctacttgaagctgcagacttgaaagagctcctgacacaacctggagactggacattatttgtgccaaccaatgatgcttttaagggaatgactagtgaagaaaaagaaattctgatacgggacaaaaatgctcttcaaaacatcattctttatcacctgacaccaggagttttcattggaaaaggatttgaacctggtgttactaacattttaaagaccacacaaggaagcaaaatctttctgaaagaagtaaatgatacacttctggtgaatgaattgaaatcaaaagaatctgacatcatgacaacaaatggtgtaattcatgttgtagataaactcctctatccagcagacacacctgttggaaatgatcaactgctggaaatacttaataaattaatcaaatacatccaaattaagtttgttcgtggtagcaccttcaaagaaatccccgtgactgtctatacaactaaaattataaccaaagttgtggaaccaaaaattaaagtgattgaaggcagtcttcagcctattatcaaaactgaaggacccacactaacaaaagtcaaaattgaaggtgaacctgaattcagactgattaaagaaggtgaaacaataactgaagtgatccatggagagccaattattaaaaaatacaccaaaatcattgatggagtgcctgtggaaataactgaaaaagagacacgagaagaacgaatcattacaggtcctgaaataaaatacactaggatttctactggaggtggagaaacagaagaaactctgaagaaattgttacaagaagaggtcaccaaggtcaccaaattcattgaaggtggtgatggtcatttatttgaagatgaagaaattaaaagactgcttcagggagacacacccgtgaggaagttgcaagccaacaaaaaagttcaaggttctagaagacgattaagggaaggtcgttctcagtgaaaatccaaaaaccagaaaaaaatgtttatacaaccctaagtcaataacctgaccttagaaaattgtgagagccaagttgacttcaggaactgaaacatcagcacaaagaagcaatcatcaaataattctgaacacaaatttaatatttttttttctgaatgagaaacatgagggaaattgtggagttagcctcctgtggtaaaggaattgaagaaaatataacaccttacaccctttttcatcttgacattaaaagttctggctaactttggaatccattagagaaaaatccttgtcaccagattcattacaattcaaatcgaagagttgtgaactgttatcccattgaaaagaccgagccttgtatgtatgttatggatacataaaatgcacgcaagccattatctctccatgggaagctaagttataaaaataggtgcttggtgtacaaaactttttatatcaaaaggctttgcacatttctatatgagtgggtttactggtaaattatgttattttttacaactaattttgtactctcagaatgtttgtcatatgcttcttgcaatgcatattttttaatctcaaacgtttcaataaaaccatttttcagatataaagagaattacttcaaattgagtaattcagaaaaactcaagatttaagttaaaaagtggtttggacttgggaa

SEQ ID NO: 2618 - DNA, 4952 bp, Homo sapiens; identical to SEQ ID NO: 1958

SEQ ID NO: 2619 - DNA, 5959 bp, Homo sapiens
gaattccggatgctcagatgaaagccccgagatcacagagacccggcgagatcacagagacccggcctgaaggaacgtggaaagaccaatgtacctgttttgaccggttgcctggagcaagaagttccagttggggagaattttcagaagataaagtcggagattgtggaaagacttgacttgcagcattactctactgactggcagagacaggagaggtagatgtcaacgcccacagaccctggtgcgatgccccacccagggccttcgccgggtcctgggccttcccctgggccaattcttgggcctagtccaggaccaggaccatccccaggttccgtccacagcatgatggggccaagtcctggacctccaagtgtctcccatcctatgccgacgatggggtccacagacttcccacaggaaggcatgcatcaaatgcataagcccatcgatggtatacatgacaaggggattgtagaagacatccattgtggatccatgaagggcactggtatgcgaccacctcacccaggcatgggccctccccagagtccaatggatcaacacagccaaggttatatgtcaccacacccatctccattaggagccccagagcacgtctccagccctatgtctggaggaggcccaactccacctcagatgccaccaagccagccgggggccctcatcccaggtgatccgcaggccatgagccagcccaacagaggtccctcacctttcagtcctgtccagctgcatcagcttcgagctcagattttagcttataaaatgctggcccgaggccagcccctccccgaaacgctgcagcttgcagtccaggggaaaaggacgttgcctggcttgcagcaacaacagcagcagcaacagcagcagcagcagcagcagcagcagcagcagcagcagcaacagcagccgccgcaaccacagacgcagcaacaacagcagccggcccttgttaactacaacagaccatctggcccggggccggagctgagcggcccgagcaccccgcagaagctgccggtgcccgcgcccggcggccggccctcgcccgcgccccccgcagccgcgcagccgcccgcggccgcagtgcccgggccctcagtgccgcagccggccccggggcagccctcgcccgtcctccagctgcagcagaagcagagccgcatcagccccatccagaaaccgcaaggcctggaccccgtggaaattctgcaagagcgggaatacagacttcaggcccgcatagctcataggatacaagaactggaaaatctgcctggctctttgccaccagatttaagaaccaaagcaaccgtggaactaaaagcacttcggttactcaatttccagcgtcagctgagacaggaggtggtggcctgcatgcgcagggacacgaccctggagacggctctcaactccaaagcatacaaacggagcaagcgccagactctgagagaagctcgcatgaccgagaagctggagaagcagcagaagattgagcaggagaggaaacgccgtcagaaacaccaggaatacctgaacagtattttgcaacatgcaaaagattttaaggaatatcatcggtctgtggccggaaagatccagaagctctccaaagcagttgcaacttggcatgccaacactgaaagagagcagaagaaggagacagagcggattgaaaaggagagaatgcggcgactgatggctgaagatgaggagggttatagaaaactgattgatcaaaagaaagacaggcgtttagcttaccttttgcagcagaccgatgagtatgtagccaatctgaccaatctggtttgggagcacaagcaagcccaggcagccaaagagaagaagaagaggaggaggaggaagaagaaggctgaggagaatgcagagggtggggagtctgccctgggaccggatggagagcccatagatgagagcagccagatgagtgacctccctgtcaaagtgactcacacagaaaccggcaaggttctgttcggaccagaagcacccaaagcaagtcagctggacgcctggctggaaatgaatcctggttatgaagttgcccctagatctgacagtgaagagagtgattctgattatgaggaagaggatgaggaagaagagtccagtaggcaggaaaccgaagagaaaatactcctggatccaaatagcgaagaagtttctgagaaggatgctaagcagatcattgagacagctaagcaagacgtggatgatgaatacagcatgcagtacagtgccaggggctcccagtcctactacaccgtggctcatgccatctcggagtgggtggagaaacagtctgccctcctaattaatgggaccctaaagcattaccagctccagggcctggaatggatggtttccctgtataataacaacttgaacggaatcttagccgatgaaatggggcttggaaagaccatacagaccattgcactcatcacttatctgatggagcacaaaagactcaatggcccctatctcatcattgttcccctttcgactctatctaactggacatatgaatttgacaaatgggctccttctgtggtgaagatttcttacaagggtactcctgccatgcgtcgctcccttgtcccccagctacggagtggcaaattcaatgtcctcttgactacttatgagtatattataaaagacaagcacattcttgcaaagattcggtggaaatacatgatagtggacgaaggccaccgaatgaagaatcaccactgcaagctgactcaggtcttgaacactcactatgtggcccccagaaggatcctcttgactgggaccccgctgcagaataagctccctgaactctgggccctcctcaacttcctcctcccaacaatttttaagagctgcagcacatttgaacaatggttcaatgctccatttgccatgactggtgaaagggtggacttaaatgaagaagaaactatattgatcatcaggcgtctacataaggtgttaagaccatttttactaaggagactgaagaaagaagttgaatcccagcttcccgaaaaagtggaatatgtgatcaagtgtgacatgtcagctctgcagaagattctgtatcgccatatgcaagccaaggggatccttctcacagatggttctgagaaagataagaaggggaaaggaggtgctaagacacttatgaacactattatgcagttgagaaaaatctgcaaccacccatatatgtttcagcacattgaggaatcctttgctgaacacctaggctattcaaatggggtcatcaatggggctgaactgtatcgggcctcagggaagtttgagctgcttgatcgtattctgccaaaattgagagcgactaatcaccgagtgctgcttttctgccagatgacatctctcatgaccatcatggaggattattttgcttttcggaacttcctttacctacgccttgatggcaccaccaagtctgaagatcgtgctgctttgctgaagaaattcaatgaacctggatcccagtatttcattttcttgctgagcacaagagctggtggcctgggcttaaatcttcaggcagctgatacagtggtcatctttgacagcgactggaatcctcatcaggatctgcaggcccaagaccgagctcaccgcatcgggcagcagaacgaggtccgggtactgaggctctgtaccgtgaacagcgtggaggaaaagatcctcgcggccgcaaaatacaagctgaacgtggatcagaaagtgatccaggcgggcatgtttgaccaaaagtcttcaagccacgagcggagggcattcctgcaggccatcttggagcatgaagaggaaaatgaggaagaagatgaagtaccggacgatgagactctgaaccaaatgattgctcgacgagaagaagaatttgacctttttatgcggatggacatggaccggcggagggaagatgcccggaacccgaaacggaagccccgtttaatggaggaggatgagctgccctcctggatcattaaggatgacgctgaagtagaaaggctcacctgtgaagaagaggaggagaaaatatttgggagggggtcccgccagcgccgtgacgtggactacagtgacgccctcacggagaagcagtggctaagggccatcgaagacggcaatttggaggaaatggaagaggaagtacggcttaagaagcgaaaaagacgaagaaatgtggataaagatcctgcaaaagaagatgtggaaaaagctaagaagagaagaggccgccctcccgctgagaaactgtcaccaaatccccccaaactgacaaagcagatgaacgctatcatcgatacgtgtataaactacaaagatagttgtaacgtggagaaggtgcccagtaattctcagttggaaatagaaggaaacagttcagggcgacagctcagtgaagtcttcattcagttaccttcaaggaaagaattaccagaatactatgaattaattaggaagccagtggatttcaaaaaaataaaggaaaggattcgtaatcataagtaccggagcctaggcgacctggagaaggatgtcatgcttctctgtcacaacgctcagacgttcaacctggagggatcccagatctatgaagactccatcgtcttacagtcagtgtttaagagtgcccggcagaaaattgccaaagaggaagagagtgaggatgaaagcaatgaagaggaggaagaggaagatgaagaagagtcagagtccgaggcaaaatcagtcaaggtgaaaattaagctcaataaaaaagatgacaaaggccgggacaaagggaaaggcaagaaaaggccaaatcgaggaaaagccaaacctgtagtgagcgattttgacagcgatgaggagcaggatgaacgtgaacagtcagaaggaagtgggacggatgatgagtgatcagtatggacctttttccttggtagaactgaattccttcctcccctgtctcatttctacccagtgagttcatttgtcatataggcactgggttgtttctatatcatcatcgtctataaactagctttaggatagtgccagacaaacatatgatatcatggtgtaaaaaacacacacatacacaaatatttgtaacatattgtgaccaaatgggcctcaaagattcagattgaaacaaacaaaaagcttttgatggaaaatatgtgggtggatagtatatttctatgggtgggtctaatttggtaacggtttgattgtgcctggttttatcacctgttcagatgagaagatttttgtcttttgtagcactgataaccaggagaagccattaaaagccactggttattttatttttcatcaggcaattttcgaggtttttatttgttcggtattgtttttttacactgtggtacatataagcaactttaataggtgataaatgtacagtagttagatttcacctgcatatacgtttttccattttatgctctatgatctgaacaaaagctttttgaattgtataagatttatgtctactgtaaacattgcttaatttttttgctcttgatttaaaaaaaagttttgttgaaagcgctattgaatattgcaatctatatagtgtattggatggcttcttttgtcaccctgatctcctatgttaccaatgtgtatcgtctccttctccctaaagtgtacttaatctttgctttctttgcacaatgtctttggttgcaagtcataagcctgaggcaaataaattccagtaatttcgaagaatgtggtgttggtgctttcctaataaagaaataatttcgcttgaaaaaaaaaaaaaaaaaaaaaaaaaaaaaaaaaaaaaaaaaaaaaaaaaaaaaaaaaaaaaaaaaaaaaaaaaaaaaaaaaaaaaaaaaaggaattc

SEQ ID NO: 2620 - DNA, 10172 bp, Homo sapiens
atggggagaagacggaggctgtgtctccagctctacttcctgtggctgggctgtgtggtgctctgggcgcagggcacggccggccagcctcagcctcctccgcccaagccgccccggccccagccgccgccgcaacaggttcggtccgctacagcaggctctgaaggcgggtttctagcgcccgagtatcgcgaggagggtgccgcagtggccagccgcgtccgccggcgaggacagcaggacgtgctccgagggcccaacgtgtgcggctccagattccactcctactgctgccctggatggaagacgctccctggaggaaaccagtgcattgtcccgatttgtagaaatagttgtggagatggattttgttcccgtcctaacatgtgtacttgttccagtgggcaaatatcatcaacctgtggatcaaaatcaattcagcagtgcagtgtgagatgcatgaatggtgggacctgtgcagatgaccactgccagtgccagaaaggatatattggaacttattgtggacaacctgtctgtgaaaatggatgtcagaatggtggacgttgcatcgcccaaccgtgtgcttgtgtttatgggttcactggtccacagtgtgaaagagattacaggacaggcccgtgtttcactcaggtcaacaaccagatgtgccaagggcagctgacaggcattgtctgcacgaagactctgtgctgtgccaccactggacgggcgtggggccatccctgtgagatgtgtccagcccagcctcagccctgccgacggggtttcatccccaacatccgcactggagcttgccaagatgttgatgaatgccaggctatcccagggatatgccaaggaggaaactgtatcaatacagtgggctcttttgaatgcagatgccctgctggtcacaaacagagtgaaactactcagaaatgtgaagacattgatgagtgcagcatcattcctgggatatgtgaaactggtgaatgttccaacaccgtgggaagctatttttgtgtttgtccacgtggatatgtaacctcaacagatggctctcgatgcatcgatcagagaacaggcatgtgtttctcgggcctggtgaatggccgctgtgcacaagagctcccggggagaatgacgaaaatgcagtgctgctgtgagcctggccgctgctggggcatcggaaccattcctgaagcctgtcctgtcagaggttctgaggaatatcgcagactttgcatggatggacttccaatgggaggaattccagggagtgctggttccagacctggaggcactgggggaaatggctttgccccaagtggcaatggcaatggctatggcccaggagggacaggcttcatccccatccctggaggcaatggcttttctcctggcgttgggggagccggtgtgggggccgggggacagggacctatcatcactggactaacaattctgaaccagacaatagatatctgtaagcatcatgctaacctttgtttaaatggacgctgtataccaactgtctcaagctaccgatgtgaatgcaacatgggttataagcaggatgcaaatggagattgtatagatgttgatgaatgcacatcaaatccctgcactaatggagattgtgttaacacacctggttcctattattgtaaatgtcatgctggattccagaggactcctaccaagcaagcatgcattgatattgatgagtgcatccagaatggggttctttgtaaaaacggtcgatgcgtgaactcagatggaagtttccagtgcatttgcaatgccggctttgaattaactacagatggaaaaaactgtgttgatcatgatgaatgtacaactaccaacatgtgtttgaatggaatgtgcatcaatgaagatggcagcttcaagtgcatctgcaaaccaggatttgtcttggctccaaatgggcgttactgtactgatgttgatgaatgccagaccccaggaatctgcatgaatgggcactgcatcaacagtgaagggtccttccgctgtgactgtcccccaggcctggctgtgggcatggatggacgtgtgtgtgttgatactcacatgcgcagtacctgctatggaggaatcaagaaaggagtgtgtgtgcgtcctttccccggtgcagtgaccaagtccgaatgctgctgtgccaatccagactatggttttggagaaccctgccagccatgccctgcaaaaaattcagctgaattccacggcctttgtagtagtggagtaggtatcactgtggatggaagagatatcaatgaatgtgctttggatcctgatatatgtgccaatgggatttgtgaaaacttacgtggtagttaccgttgtaattgcaacagtggctatgaaccagatgcctctggaagaaactgtattgacattgatgaatgtttagtaaacagactgctttgtgataacggattgtgccgaaacacgccaggaagttacagctgtacgtgcccaccagggtatgtgttcaggactgagacagagacctgtgaagatataaatgaatgtgaaagcaacccatgtgtcaatggggcctgcagaaacaaccttggatctttcaattgtgaatgttcgcccggcagcaaactcagctccacaggattgatctgtattgacagcctgaaggggacctgttggctcaacatccaggacagccgctgtgaggtgaatattaatggagccactctgaaatctgaatgctgtgccaccctcggagccgcctgggggagcccctgtgagcggtgtgaactagatacagcttgcccaagagggcttgccaggattaaaggtgttacgtgtgaagatgttaatgagtgtgaggtgttccctggcgtttgtccaaatggacgctgtgtcaacagtaagggatcttttcattgcgagtgccctgaaggccttacgttggatgggactggccgtgtatgtttggatattcgcatggagcagtgttacttgaagtgggatgaagatgaatgcatccaccccgttcctggaaagttccgcatggatgcctgctgctgtgctgtcggggcggcttggggcaccgagtgtgaggagtgccccaaacctggcaccaaggaatacgagacactgtgcccccgcggggctggctttgctaaccgaggggatgttcttactgggcggccattttacaaagacatcaatgaatgcaaagcatttcctgggatgtgcacttatgggaagtgcagaaatacaatcggaagcttcaaatgccgttgcaatagtggctttgctctagacatggaggaaagaaactgcacggacatcgacgagtgcaggatttctcctgacctctgtggcagtggaatctgcgtcaatacaccgggcagctttgagtgcgagtgcttcgaaggctatgaaagtggcttcatgatgatgaagaactgcatggacattgacggatgtgaacgtaaccctctcctttgtaggggtggcacctgtgtgaacactgagggcagctttcagtgtgactgcccactgggacacgagctgtcaccatcccgtgaggactgtgtggatattaatgaatgctccctgagtgacaatctctgcagaaatggaaaatgtgtgaacatgattggaacctatcagtgctcttgcaatcctggatatcaggctacgccagaccgccagggctgtacagatattgatgaatgtatgataatgaacggaggctgtgacacccagtgcacaaattcagagggaagctacgaatgcagctgcagtgagggttatgccctgatgccagatgggagatcgtgtgcagacattgatgaatgtgaaaacaatcctgatatctgtgatggcggccagtgtaccaacattcctggagagtatcgctgcctctgctatgatggcttcatggcttccatggacatgaaaacatgcattgatgtcaatgaatgtgacctaaattcaaatatctgcatgtttggggaatgtgagaacacaaagggatccttcatttgccactgtcagctgggttactcagtgaagaaggggaccacaggatgtacagatgtggatgagtgtgaaattggtgctcataactgcgacatgcatgcctcatgtctgaatatcccaggaagcttcaagtgtagctgcagagaaggctggattggaaacggcatcaagtgtattgatctggacgaatgttctaatggaacccaccagtgtagcatcaatgctcagtgtgtaaataccccgggctcataccgctgtgcctgctccgaaggtttcactggtgatggctttacctgctcagatgttgatgagtgtgcagaaaacataaacctctgtgagaacggacagtgccttaatgtcccgggtgcatatcgctgcgagtgtgagatgggcttcactccagcctcagacagcagatcctgccaagatattgatgaatgctccttccaaaacatttgtgtctctggaacatgtaataacctgcctggaatgtttcattgcatctgcgatgatggttatgaattggacagaacaggagggaactgtacagatattgatgagtgtgcagatcctataaactgtgtcaatggcctatgtgtcaacacgcctggtcgctatgagtgtaactgcccacccgattttcagttgaacccaactggtgtgggttgtgttgacaaccgtgtgggcaactgctacctgaagtttggacctcgaggagatgggagtctgtcttgcaacaccgagatcggggtgggcgtcagtcgctcttcatgctgctgctctctgggaaaggcctggggaaacccctgtgagacatgcccccctgtcaatagcactgaatattacaccctgtgtcccggaggtgaaggcttcagacctaaccccatcacaatcattttagaagacattgacgaatgccaggagttaccaggtctctgccagggtggaaactgcatcaacacttttgggagcttccagtgtgagtgcccacaaggctactacctcagcgaggatacccgcatctgtgaggatattgatgagtgttttgcacatcctggtgtgtgtgggcctgggacctgctataacaccctgggaaattacacctgcatttgcccacctgagtacatgcaggtcaatggaggccacaactgcatggacatgagaaaaagcttttgctaccgaagctataatggaaccacttgtgagaatgagttgcctttcaatgtgacaaaaaggatgtgctgctgcacatataatgtgggcaaagctgggaacaaaccttgtgaaccatgcccaactccaggaacagctgactttaaaaccatatgtggaaatattcctggattcacctttgacattcacacaggaaaagctgttgacattgatgaatgtaaagagattccaggcatttgtgcaaatggtgtgtgcattaaccagattggcagtttccgctgtgaatgccctacaggattcagttacaatgacctgctgttggtttgtgaagatatagatgagtgcagcaatggtgataatctctgccagcggaatgcagactgcatcaatagtcctggtagttaccgctgtgaatgtgccgcgggtttcaaactttcacccaatggggcctgtgtagatcgcaatgaatgtttagaaattcctaacgtttgcagtcatggcttgtgtgttgatctgcaaggaagttaccagtgcatctgccacaatggctttaaggcttctcaggaccagaccatgtgcatggatgttgatgagtgcgagcggcacccatgtggaaatggaacttgtaaaaacaccgttggatcctataactgtctgtgctacccagggtttgaactcactcataataatgattgcctggacatagatgagtgcagttccttttttggtcaggtgtgcagaaatggacgttgttttaatgaaattggttctttcaagtgtctatgtaacgaaggttatgaacttaccccagatggcaaaaactgtatagacactaatgagtgtgtcgcccttcccggctcttgctctcctggtacctgtcagaatttggagggatccttcagatgcatctgtcccccagggtatgaagtaaaaagcgagaactgcattgatataaatgaatgtgatgaagatcccaacatttgtctttttggttcctgtactaatactccagggggcttccagtgcctctgcccccctggctttgtactatctgataatggacggagatgctttgatactcgccagagcttctgcttcacaaattttgaaaatggaaagtgttctgtacccaaagctttcaacaccacaaaagcaaaatgctgctgtagtaagatgccaggagagggctggggggacccctgtgagctgtgccccaaagacgatgaagttgcatttcaggatttgtgtccatatggccatggaactgtccctagtcttcatgatacacgtgaagatgtcaatgagtgtcttgagagcccaggcatttgttcaaatggtcaatgtatcaacaccgacggatcttttcgctgtgaatgtccaatgggctacaaccttgactacactggagtacgctgtgtggatactgatgagtgttcaatcggcaatccgtgtggaaatggtacatgcaccaatgttattgggagttttgaatgcaattgcaatgaaggctttgagccagggcccatgatgaattgtgaagatatcaacgaatgtgcccagaacccactgctgtgtgctttacgctgcatgaacacttttgggtcctatgaatgcacgtgcccgattggctatgccctcagggaagatcaaaagatgtgcaaagatctggatgaatgtgctgaagggttacacgactgtgaatctaggggcatgatgtgtaagaatctaatcggcaccttcatgtgcatctgccctcctggaatggcccgaaggcccgatggagaaggctgtgtagatgaaaatgaatgcaggaccaagccaggaatctgtgaaaatggacgttgtgttaacattattggaagctatagatgtgagtgtaatgaaggattccagtcaagttcttcaggcactgaatgccttgacaatcgacagggtctctgctttgcagaggtactgcagacaatatgtcaaatggcatccagtagtcgcaatctcgtcactaagtcagaatgctgctgtgatggtgggcgaggctggggccaccagtgcgagctttgcccacttcctggaactgcccagtacaaaaagatatgtcctcatggcccaggatatacaactgatggaagagatattgatgaatgtaaggtaatgccaaacctctgcaccaatggtcagtgcatcaataccatgggctcattccgatgcttctgcaaggttggctacaccacagacatcagtggaacctcttgtatagaccttgatgaatgctcccagtccccgaaaccatgcaactacatctgcaagaacactgaggggagttatcagtgttcatgtccgagggggtatgtcctgcaagaggatggaaagacatgcaaagaccttgatgaatgtcaaacaaagcagcataactgccagttcctctgtgtcaacaccctgggggggtttacctgtaaatgtccacctggtttcacacagcatcacactgcttgtatcgacaacaacgaatgtgggtctcaacctttgctttgtggaggaaagggaatctgtcaaaacactccaggcagtttcagctgtgaatgccaaagagggttctctcttgatgccaccggactgaactgtgaagatgttgatgaatgtgatgggaaccacaggtgccaacacggctgccagaacatcctgggtggctacagatgtggctgcccccaaggctacatccagcactaccagtggaatcagtgtgtcgatgagaatgaatgctccaatcccaatgcctgtggctctgcttcctgctacaacaccctggggagttacaagtgcgcctgcccctcggggttctccttcgaccagttctccagtgcctgccacgacgtgaatgagtgctcgtcctccaagaacccctgcaattacggctgctctaacacggaggggggctacctctgtggctgcccccctgggtattacagagtgggacaaggccactgtgtctcaggaatgggatttaacaaggggcagtacctgtcactggatacagaggtcgatgaggaaaatgctctgtccccagaagcatgctacgagtgcaaaatcaacggctatcctaagaaagacagcaggcagaagagaagtattcatgaacctgatcccactgctgttgaacagatcagcctagagagtgtcgacatggacagccccgtcaacatgaagttcaacctctcccacctcggctctaaggagcacatcctggaactaaggcccgccatccagcccctcaacaaccacatccgttatgtcatctctcaagggaacgatgacagcgtcttccgcatccaccaaaggaatgggctcagctacttgcacacggccaagaagaagctcatgcccggcacatacacactggaaatcactagcatccctctctacaagaagaaggagcttaagaaactggaagagagcaatgaggatgactacctcctaggggagcttggggaggctctcagaatgaggctgcagattcagctctattaaccgttcacagacttgggcccaggctcaaatcctagcacagccagtctgcagaagcatttgaaaagtcaaggactaattttaaagaggaaaaataataataactcttgtttctttcctccctgtcttagactttgaatgttgaccctcacagggagggataatttagactctggtatggccaaagatttgagctcaaaggcaaccgtggttactgtattttttatataacttcattttaaaatatattaaaagaaacctaaatgttcaagatatcagcatatggcactaaatgcacaaaaataatgtgagcttttttttttttttcctgttagcagtctgtaacactttgggtattttgctatagttgctaattaaaaaaatatagatgtttatttatttttaatgcagtaatatatggagaaatgaacaaactatgtaaacaaaaagggaaactcacttgtttttctttagatttataaatttgagctattttttttagaggtgctttttaaaaatccaatagatacaagagatgtttcctttggttttctgccagtcatccagctgatacacacctgatcgattttaaagaaagccacacagagctgaatcgggcagtgctaatcaataatttaaaagacatgaatgtcattagatcctttataacgtagatcgaagccaaagcagctcatttgtgacaacatttcatatcaccagacacaccaggcaacagaagttgaagcacaaccactgtagcaaaataccttgactgcttgtgagaccattagcattgcaggccaaaccgtactgtatttccttctcataacctcaaggaaccatatgtgctacccacaacacctcattcttacccagggtgcgctgcgtcctcatggtactgtaggcagctgaagaaccgccgttcccttgaaagggaacacctggcattctgtggtgtttcgtgctgtcttaaataatggtgcatttattatgttcaagttatttcaggattgccatatgtgcaaacaaatcatgcaatgcagccaaggaatatatgttgttgttgttgttttaaacccattttttttttagaattttcattaatactgtagttatacaccatatgcctcattttatcatagcctattgtgtatgaaagatgtttgtacaatgaattgatgtttagtttgctttagtcatttaaaaagatattgtaccaggatgtgctattaagagcacgtatccattattcttctcaacccaagaacctgtttcctggaccagtgaccaaacctcatatgtgaaatggccaaagcacatgcaggctcctggttgttcctctcaaacctgtgctgaccaaagattagtaaccagttatacccagtattttgaggttttattgtttttttaataactaaaaaaaaactcgtgccgaattc

SEQ ID NO: 2621 - DNA, 8119 bp, Homo sapiens
cgtccctgcagccctcgcccggcgctccagtagcaggacccggtctcgggaccagccggtaatatgcacgtgtcactagctgaggccctggaggttcggggtggaccacttcaggaggaagaaatatgggctgtattaaatcaaagtgctgaaagtctccaagaattattcagaaaagtaagcctagctgatcctgctgcccttggcttcatcatttctccatggtctctgctgttgctgccatctggtagtgtgtcatttacagatgaaaatatttccaatcaggatcttcgagcattcactgcaccagaggttcttcaaaatcagtcactaacttctctctcagatgttgaaaagatccacatttattctcttggaatgacactgtattggggggctgattatgaagtgcctcagagccaacctattaagcttggagatcatctcaacagcatactgcttggaatgtgtgaggatgttatttacgctcgagtttctgttcggactgtgctggatgcttgcagtgcccacattaggaatagcaattgtgcaccctcattttcctacgtgaaacacttggtaaaactggttctgggaaatctttctgggacagatcagctttcctgtaacagtgaacaaaagcctgatcgaagccaggctattcgagatcgattgcgaggaaaaggattaccaacaggaagaagctctacttctgatgtactagacatacaaaagcctccactctctcatcagacctttcttaacaaagggcttagtaaatctatgggatttctgtccatcaaagatacacaagatgagaattatttcaaggacattttatcagataattctggacgtgaagattctgaaaatacattctccccttaccagttcaaaactagtggcccagaaaaaaaacccatccctggcattgatgtgctttctaagaagaagatctgggcttcatccatggacttgctttgtacagctgacagagacttctcttcaggagagactgccacatatcgtcgttgtcaccctgaggcagtaacagtgcggacttcaactactcctagaaaaaaggaggcaagatactcagatggaagtatagccttggatatctttggccctcagaaaatggatccaatatatcacactcgagaattgcccacctcctcagcaatatcaagtgctttggaccgaatccgagagagacaaaagaaacttcaggttctgagggaagccatgaatgtagaagaaccagttcgaagatacaaaacttatcatggtgatgtctttagtacctccagtgaaagtccatctattatttcctctgaatcagatttcagacaagtgagaagaagtgaagcctcaaagaggtttgaatccagcagtggtctcccaggggtagatgaaaccttaagtcaaggccagtcacagagaccgagcagacaatatgaaacaccctttgaaggcaacttaattaatcaagagatcatgctaaaacggcaagaggaagaactgatgcagctacaagccaaaatggcccttagacagtctcggttgagcctatatccaggagacacaatcaaagcgtccatgcttgacatcaccagggatccgttaagagaaattgccctagaaacagccatgactcaaagaaaactgaggaatttctttggccctgagtttgtgaaaatgacaattgaaccatttatatctttggatttgccacggtctattcttactaagaaagggaagaatgaggataaccgaaggaaagtaaacataatgcttctgaacgggcaaagactggaactgacctgtgataccaaaactatatgtaaagatgtgtttgatatggttgtggcacatattggcttagtagagcatcatttgtttgctttagctaccctcaaagataatgaatatttctttgttgatcctgacttaaaattaaccaaagtggccccagagggatggaaagaagaaccaaagaaaaagaccaaagccactgttaattttactttgtttttcagaattaaattttttatggatgatgttagtctaatacaacatactctgacgtgtcatcagtattaccttcagcttcgaaaagatattttggaggaaaggatgcactgtgatgatgagacttccttattgctggcatccttggctctccaggctgagtatggagattatcaaccagaggttcatggtgtgtcttactttagaatggagcactatttgcccgccagagtgatggagaaacttgatttatcctatatcaaagaagagttacccaaattgcataatacctatgtgggagcttctgaaaaagagacagagttagaatttttaaaggtctgccaaagactgacagaatatggagttcattttcaccgagtgcaccctgagaagaagtcacaaacaggaatattgcttggagtctgttctaaaggtgtccttgtgtttgaagttcacaatggagtgcgcacattggtccttcgctttccatggagggaaaccaagaaaatatctttttctaaaaagaaaatcacattgcaaaatacatcagatggaataaaacatggcttccagacagacaacagtaagatatgccagtacctgctgcacctctgctcttaccagcataagttccagctacagatgagagcaagacagagcaaccaagatgcccaagatattgagagagcttcgtttaggagcctgaatctccaagcagagtctgttagaggatttaatatgggacgagcaatcagcactggcagtctggccagcagcaccctcaacaaacttgctgttcgacctttatcagttcaagctgagattctgaagaggctatcctgctcagagctgtcgctttaccagccattgcaaaacagttcaaaagagaagaatgacaaagcttcatgggaggaaaagcctagagagatgagtaaatcataccatgatctcagtcaggcctctctctatccacatcggaaaaatgtcattgttaacatggaacccccaccacaaaccgttgcagagttggtgggaaaaccttctcaccagatgtcaagatctgatgcagaatctttggcaggagtgacaaaacttaataattcaaagtctgttgcgagtttaaatagaagtcctgaaaggaggaaacatgaatcagactcctcatccattgaagaccctgggcaagcatatgttctaggaatgactatgcatagttctggaaactcttcatcccaagtacccttaaaagaaaatgatgtgctacacaaaagatggagcatagtatcttcaccagaaagggagatcaccttagtgaacctgaaaaaagatgcaaagtatggcttgggatttcaaattattggtggggagaagatgggaagactggacctaggcatatttatcagttcagttgcccctggaggaccagctgacttggatggatgcttgaagccaggagaccgtttgatatctgtgaatagtgtgagtctggagggagtcagccaccatgctgcaattgaaattttgcaaaatgcacctgaagatgtgacacttgttatctctcagccaaaagaaaagatatccaaagtgccttctactcctgtgcatctcaccaatgagatgaaaaactacatgaagaaatcttcctacatgcaagacagtgctatagattcttcttccaaggatcaccactggtcacgtggtaccctgaggcacatctcggagaactcctttgggccatctgggggcctgcgggaaggaagcctgagttctcaagattccaggactgagagtgccagcttgtctcaaagccaggtcaatggtttctttgccagccatttaggtgaccaaacctggcaggaatcacagcatggcagcccttccccatctgtaatatccaaagccaccgagaaagagactttcactgatagtaaccaaagcaaaactaaaaagccaggcatttctgatgtaactgattactcagaccgtggagattcagacatggatgaagccacttactccagcagtcaggatcatcaaacaccaaaacaggaatcttcctcttcagtgaatacatccaacaagatgaattttaaaactttttcttcatcacctcctaagcctggagatatctttgaggttgaactggctaaaaatgataacagcttggggataagtgtcacgggaggtgtgaatacgagtgtcagacatggtggcatttatgtgaaagctgttattccccagggagcagcagagtctgatggtagaattcacaaaggtgatcgcgtcctagctgtcaatggagttagtctagaaggagccacccataagcaagctgtggaaacactgagaaatacaggacaggtggttcatctgttattagaaaagggacaatctccaacatctaaagaacatgtcccggtaaccccacagtgtaccctttcagatcagaatgcccaaggtcaaggcccagaaaaagtgaagaaaacaactcaggtcaaagactacagctttgtcactgaagaaaatacatttgaggtaaaattatttaaaaatagctcaggtctaggattcagtttttctcgagaagataatcttataccggagcaaattaatgccagcatagtaagggttaaaaagctctttcctggacagccagcagcagaaagtggaaaaattgatgtaggagatgttatcttgaaagtgaatggagcctctttgaaaggactatctcagcaggaagtcatatctgctctcaggggaactgctccagaagtattcttgcttctctgcagacctccacctggtgtgctaccggaaattgatactgcgcttttgaccccacttcagtctccagcacaagtacttccaaacagcagtaaagactcttctcagccatcatgtgtggagcaaagcaccagctcagatgaaaatgaaatgtcagacaaaagcaaaaaacagtgcaagtccccatccagaagagacagttacagtgacagcagtgggagtggagaagatgacttagtgacagctccagcaaacatatcaaattcgacctggagttcagctttgcatcagactctaagcaacatggtatcacaggcacagagtcatcatgaagcacccaagagtcaagaagataccatttgtaccatgttttactatcctcagaaaattcccaataaaccagagtttgaggacagtaatccttcccctctaccaccggatatggctcctgggcagagttatcaaccccaatcagaatctgcttcctctagttcgatggataagtatcatatacatcacatttctgaaccaactagacaagaaaactggacacctttgaaaaatgacttggaaaatcaccttgaagactttgaactggaagtagaactcctcattaccctaattaaatcagaaaaaggaagcctgggttttacagtaaccaaaggcaatcagagaattggttgttatgttcatgatgtcatacaggatccagccaaaagtgatggaaggctaaaacctggggaccggctcataaaggttaatgatacagatgttactaatatgactcatacagatgcagttaatctgctccgggctgcatccaaaacagtcagattagttattggacgagttctagaattacccagaataccaatgttgcctcatttgctaccggacataacactaacgtgcaacaaagaggagttgggtttttccttatgtggaggtcatgacagcctttatcaagtggtatatattagtgatattaatccaaggtccgtcgcagccattgagggtaatctccagctattagatgtcatccattatgtgaacggagtcagcacacaaggaatgaccttggaggaagttaacagagcattagacatgtcacttccttcattggtattgaaagcaacaagaaatgatcttccagtggtccccagctcaaagaggtctgctgtttcagctccaaagtcaaccaaaggcaatggttcctacagtgtggggtcttgcagccagcctgccctcactcctaatgattcattctccacggttgctggggaagaaataaatgaaatatcgtaccccaaaggaaaatgttctacttatcagataaagggatcaccaaacttgactctgcccaaagaatcttatatacaagaagatgacatttatgatgattcccaagaagctgaagttatccagtctctgctggatgttgtggatgaggaagcccagaatcttttaaacgaaaataatgcagcaggatactcctgtggtccaggtacattaaagatgaatgggaagttatcagaagagagaacagaagatacagactgcgatggttcacctttacctgagtattttactgaggccaccaaaatgaatggctgtgaagaatattgtgaagaaaaagtaaaaagtgaaagcttaattcagaagccacaagaaaagaagactgatgatgatgaaataacatggggaaatgatgagttgccaatagagagaacaaaccatgaagattctgataaagatcattcctttctgacaaacgatgagctcgctgtactccctgtcgtcaaagtgcttccctctggtaaatacacgggtgccaacttaaaatcagtcattcgagtcctgcggggtttgctagatcaaggaattccttctaaggagctggagaatcttcaagaattaaaacctttggatcagtgtctaattgggcaaactaaggaaaacagaaggaagaacagatataaaaatatacttccctatgatgctacaagagtgcctcttggagatgaaggtggctatatcaatgccagcttcattaagataccagttgggaaagaagagttcgtttacattgcctgccaaggaccactgcctacaactgttggagacttctggcagatgatttgggagcaaaaatccacagtgatagccatgatgactcaagaagtagaaggagaaaaaatcaaatgccagcgctattggcccaacatcctaggcaaaacaacaatggtcagcaacagacttcgactggctcttgtgagaatgcagcagctgaagggctttgtggtgagggcaatgacccttgaagatattcagaccagagaggtgcgccatatttctcatctgaatttcactgcctggccagaccatgatacaccttctcaaccagatgatctgcttacttttatctcctacatgagacacatccacagatcaggcccaatcattacgcactgcagtgctggcattggacgttcagggaccctgatttgcatagatgtggttctgggattaatcagtcaggatcttgattttgacatctctgatttggtgcgctgcatgagactacaaagacacggaatggttcagacagaggatcaatatattttctgctatcaagtcatcctttatgtcctgacacgtcttcaagcagaagaagagcaaaaacagcagcctcagcttctgaagtgacatgaaaagagcctctggatgcatttccatttctctccttaacctccagcagactcctgctctctatccaaaataaagatcacagagcagcaagttcatacaacatgcatgttctcctctatcttagaggggtattcttcttgaaaataaaaaatattgaaatgctgtatttttacagctactttaacctatgataattatttacaaaattttaacactaaccaaacaatgcagatcttagggatgattaaaggcagcatttgatgatagcagacattgttacaaggacatggtgagtctatttttaatgcaccaatcttgtttatagcaaaaatgttttccaatattttaataaagtagttattttataggggatacttgaaaccagtatttaagctttaaatgacagtaatattggcatagaaaaaagtagcaaatgtttactgtatcaatttctaatgtttactatatagaatttcctgtaatatatttatatactttttcatgaaaatggagttatcagttatctgtttgttactgcatcatctgtttgtaatcattatctcactttgtaaataaaaacacaccttaaaacatg

SEQ ID NO: 2622 - DNA, 1411 bp, Homo sapiens
ctcttccagaggcaagaccaaccaagatgagtgccttgggagctgtcattgccctcctgctctggggacagctttttgcagtggactcaggcaatgatgtcacggatatcgcagatgacggctgcccgaagccccccgagattgcacatggctatgtggagcactcggttcgctaccagtgtaagaactactacaaactgcgcacagaaggagatggagtatacaccttaaatgataagaagcagtggataaataaggctgttggagataaacttcctgaatgtgaagcagatgacggctgcccgaagccccccgagattgcacatggctatgtggagcactcggttcgctaccagtgtaagaactactacaaactgcgcacagaaggagatggagtgtacaccttaaacaatgagaagcagtggataaataaggctgttggagataaacttcctgaatgtgaagcagtatgtgggaagcccaagaatccggcaaacccagtgcagcggatcctgggtggacacctggatgccaaaggcagctttccctggcaggctaagatggtttcccaccataatctcaccacaggtgccacgctgatcaatgaacaatggctgctgaccacggctaaaaatctcttcctgaaccattcagaaaatgcaacagcgaaagacattgcccccactttaacactctatgtggggaaaaagcagcttgtagagattgagaaggttgttctacaccctaactactcccaagtagatattgggctcatcaaactcaaacagaaggtgtctgttaatgagagagtgatgcccatctgcctaccatccaaggattatgcagaagtagggcgtgtgggttatgtttctggctgggggcgaaatgccaattttaaatttactgaccatctgaagtatgtcatgctgcctgtggctgaccaagaccaatgcataaggcattatgaaggcagcacagtccccgaaaagaagacaccgaagagccctgtaggggtgcagcccatactgaatgaacacaccttctgtgctggcatgtctaagtaccaagaagacacctgctatggcgatgcgggcagtgcctttgccgttcacgacctggaggaggacacctggtatgcgactgggatcttaagctttgataagagctgtgctgtggctgagtatggtgtgtatgtgaaggtgacttccatccaggactgggttcagaagaccatagctgagaactaatgcaaggctggccggaagcccttgcctgaaagcaagatttcagcctggaagagggcaaagtggacgggagtggacaggagtggatgcgataagatgtggtttgaagctgatgggtgccagccctgcattgctgagtcaatcaataaagagctttcttttgaccc

SEQ ID NO: 2623 - DNA, 6378 bp, Homo sapiens
atggtactatctcctgagtgctgcaagttgtaacgggcaccgctgagcctgtttccctttggagcacttcttatctagaagcagtgtttagtttcttccaaactgggccacttcgtccacctactctgttctgagtaaggaaacagcctccaagcatcagcagagcccagatgagcacgggccgcggagccgcttagcagtctcccgggacccagctccggaggagccgcaagcatgcaccctgggttgtggctgctcctggttacgttgtgcctgaccgaggaactggcagcagcgggagagaagtcttatggaaagccatgtgggggccaggactgcagtgggagctgtcagtgttttcctgagaaaggagcgagaggacgacctggaccaattggaattcaaggcccaacaggtcctcaaggattcactggctctactggtttatcgggattgaaaggagaaaggggtttcccaggccttctgggaccttatggaccaaaaggagataagggtcccatgggagttcctggctttcttggcatcaatgggattccgggccaccctggacaaccaggccccagaggcccacctggtctggatggctgtaatggaactcaaggagctgttggatttccaggccctgatggctatcctgggcttctcggaccacccgggcttcctggtcagaaaggatcaaaaggtgaccctgtccttgctccaggtagtttcaaaggaatgaagggggatcctgggctgcctggactggatggaatcactggcccacaaggagcacccggatttcctggagctgtaggacctgcaggaccaccaggattacaaggtcctccagggcctcctggtcctcttggtcctgatgggaatatggggctaggttttcaaggagagaaaggagtcaagggggatgttggcctccctggcccagcaggacctccaccatctactggagagctggaattcatgggattccccaaagggaagaaaggatccaagggtgaaccagggcctaagggttttccaggcataagtggccctccaggcttcccgggccttggaactactggagaaaagggagaaaagggagaaaagggaatccctggtttgccaggacctaggggtcccatgggttcagaaggagtccaaggccctccagggcaacagggcaagaaagggaccctgggatttcctgggcttaatggattccaaggaattgagggtcaaaagggtgacattggcctgccaggcccagatgttttcatcgatatagatggtgctgtgatctcaggtaatcctggagatcctggtgtacctggcctcccaggccttaaaggagatgaaggcatccaaggcctacgtggcccttctggtgtccctggattgccagcattatcaggtgtcccaggagccctagggcctcagggatttccagggctgaagggggaccaaggaaacccaggccgtaccacaattggagcagctggcctccctggcagagatggtttgccaggcccaccaggtccaccaggcccacctagtccagaatttgagactgaaactctacacaacaaagagtcagggttccctggtctccgaggagaacaaggtccaaaaggaaacctaggcctcaaaggaataaaaggagactcaggtttctgtgcttgtgacggtggtgttcccaacactggaccacccggggaaccaggcccacctggtccatggggtctcataggccttccaggccttaaaggagccagaggagatcgaggctctgggggtgcacagggcccagcaggggctccaggcttagttgggcctctgggtccttcaggacccaaaggaaagaagggggaaccaattctcagtacaatccaaggaatgccaggagatcggggtgattctggctcccagggcttccgtggtgtaataggagaaccaggcaaggacggagtaccaggtttaccaggtctgccaggccttccgggtgatggtggacagggcttcccaggtgaaaaggggttacctggacttcctggtgaaaaaggccatcctggtccacctggcctcccaggaaatgggttaccaggacttcctggaccccgtgggcttcctggagataaaggcaaggatggattaccgggacaacaaggccttcccggatctaagggaatcaccctgccctgtattattcctgggtcatacggtccatcaggatttccaggcactcccggattcccaggccctaaagggtctcgaggcctccctgggaccccaggccagcctgggtcaagtggaagtaaaggagagccagggagtccaggattggttcatcttcctgaattaccaggatttcctggacctcgtggggagaagggcttgcctgggtttcctgggctccctggaaaagatggcttgcctgggatgattggcagtccaggcttacctggttccaagggagccactggtgacatctttggtgctgaaaatggtgctccgggggaacaaggcctacaaggattaacagggcacaaaggatttcttggagactctggccttccaggactcaagggtgtgcacgggaagcctggcttactaggccccaaaggtgagcggggcagccctgggacaccaggacaggtgggacagccaggcaccccaggatctagtggtccatatggcatcaagggcaaatctgggctcccaggagcaccaggcttcccaggcatctcaggacatcctggaaagaaaggaacaagaggcaagaaaggtcctcctggatcaattgtaaagaaagggctgccagggctaaaaggccttcctggaaatccaggcctagtaggactgaaaggaagcccaggctctccaggggtcgctgggttgccagccctctctggacccaagggagagaaggggtctgttggattcgtaggttttccaggaataccaggtctgcctggtatttctggaacaagaggattaaaaggaattccaggatcaactggaaaaatgggaccatctggacgcgctggtactcctggtgaaaagggagacagaggcaatccggggccagtcggaatacctagtccaagacgtccaatgtcaaacctttggctcaaaggagacaaaggctctcaaggctcagccggatccaatggatttcctgggccaagaggtgacaaaggagaggctggtcgacctggaccaccaggcctacctggagctcctggcctcccaggcattatcaaaggagttagtggaaagccagggccccctggcttcatgggaatccggggtttacctggcctgaaggggtcctctgggatcacaggtttcccaggaatgccaggagaaagtggttcacaaggtatcagagggtcgcctggactcccaggagcatctggtctcccaggcctgaaaggagacaacggccagacagttgaaatttccggtagcccaggacccaagggacagcctggcgaatctggttttaaaggcacaaaaggaagagatggactaataggcaatataggcttccctggaaacaaaggtgaagatggaaaagttggtgtttctggagatgttggccttcctggagctccaggatttccaggagttgccggcatgagaggagaaccaggacttccaggttcttctggtcaccaaggggcaattgggcctctaggatcccccggattaataggacccaaaggcttccctggatttcctggtttacatggactgaatgggcttccgggcaccaagggtacccatggcactccaggacctagtatcaccggtgtgcctgggcctgctggtctccctggacccaaaggagaaaaaggatatccaggaattggcatcggagctccagggaagccgggcctgagagggcaaaaaggtgatcgaggtttcccaggtctccagggccctgctggtctccccggtgccccaggcatctccttgccctcactcatagcaggacagcctggtgaccccgggcgaccaggcctagatggagaacgaggccgcccaggccccgctggacccccaggtccccctgggccatcctcgaatcaaggcgacaccggagaccctggcttccctggaattccaggtttttctggcctccctggagagctaggactgaaaggcatgagaggtgagcctggcttcatggggactccaggcaaggttgggccacctggagacccaggatttcccggaatgaaggggaaggcaggggcaagaggctcttctggcctccaaggtgatcctggacaaacaccaactgcagaagctgtccaggttcctcctggacccttgggtctaccagggatcgatggcatccctggcctcactggggaccctggggctcaaggccctgtaggcctacaaggctccaaaggtttacctggcatccccggtaaagatggccccagtgggctcccaggcccacctggggctcttggtgatcctggtctgcctggactgcaaggccctccaggatttgaaggagctccagggcagcaaggccccttcgggatgcctggaatgcctggccagagcatgagagtgggctacacgttggtaaagcacagccagtcggaacaggtgcccccgtgtcccatcgggatgagccagctgtgggtggggtacagcttactgtttgtggaggggcaagagaaagcccacaaccaggacctgggctttgctggctcctgtctgccccgcttcagcaccatgcccttcatctactgcaacatcaacgaggtgtgccactatgccaggcgcaatgataaatcttactggctctccactaccgcccctatccccatgatgcccgtcagccagacccagattccccagtacatcagccgctgctctgtgtgtgaggcaccctcgcaagccattgctgtgcacagccaggacatcaccatcccgcagtgccccctgggctggcgcagcctctggattgggtactctttcctcatgcacactgccgctggtgccgagggtggaggccagtccctggtctcacctggctcctgcctagaggactttcgggccactcctttcatcgaatgcagtggtgcccgaggcacctgccactactttgcaaacaagtacagtttctggttgaccacagtggaggagaggcagcagtttggggagttgcctgtgtctgaaacgctgaaagctgggcagctccacactcgagtcagtcgctgccaggtgtgtatgaaaagcctgtagggtggcacctgccactctgccccttgccctcccctgcccctcacaacagtcacctcacaaacctgaatggtctgaagaaggaaggcctgagcccctttgcctgtcaagttgtacattggagtctcatttgggctagactaccggacactcgtcaccccagccctcgggtccatagagatgagcccaccctgctgagatctgctgtcctgtttctgtcaagctggtgctactgtttgatttggatgattgtgtgactattcatggctacctcagaaagatttgatgggccacaactgtcttagactgctagctttctccttaccgtcttgatcggaaagctcttccgaatcgctaatcagtcatttcttcatgtacagaggtcagcacacattatttggcttaaaccagaacccagtgtttccacacttaaattctctaaccgaatattcatggatggctcaagtctgcacagagcaagtcctcactcttcaaggaggcccactgtgtctaggcaggcaagagaattgaaatgaggtgccacccagtagcccagagtgagctttagctctagaatgagcaagactgggccccacatggcttagagaggcttgaaggccagcagctgggttgggggtggtggtcattaatggcatatggtcctagacaaaccatctcctccttgccggctccccctccagccagagacagaggatgtggcctggttcaaagtaaagcagaggatgcaacaaatgtggccaagctatcaaaggaaatgagaatgacagccttttttcctgggccagaagtagagggggtgggtgcgtaggatgtgtgagttttgcttttgactccaggaacaaaaaggtaaatcccacatcccagtttctcagaagtccctgtttattccaattgccatcagatgtgtgcaatgtggcaaactgaagctgcacagtgttggtttccttgtattctgaggatgttaaagactttgttaaatggttatccaattgctctttcacaggtagcctattaaactattttaatatgtttttttaaacctcataaaaatctagcacactcttctcttgagcagttagcagaccaccg

SEQ ID NO: 2624 - DNA, 1446 bp, Homo sapiens
aagcttcactctgaccatcactgtcttcacaaacccaccgcaagtcgccacctaccacagagccatcaaaatcacagtggatgggccccgagaacctcgaaatcgtactgagaagcactccacaatgccagactcacctgtggatgtgaagacgcaatctaggctgactcctccaacaatgccacctcccccaactactcaaggagctccaagaaccagttcatttacaccgacaacgttaactaatggcacgagccattctcctacagccttgaatggcgccccctcaccacccaatggcttcagcaatgggccttcctcttcttcctcctcctctctggctaatcaacagctgcccccagcctgtggtgccaggcaactcagcaagctgaaaaggttccttactaccctgcagcagtttggcaatgacatttcacccgagataggagaaagagttcgcaccctcgttctgggactagtgaactccactttgacaattgaagaatttcattccaaactgcaagaagctactaacttcccactgagaccttttgtcatcccatttttgaaggccaacttgcccctgctgcagcgtgagctcctccactgcgcaagactggccaaacagaaccctgcccagtacctcgcccagcatgaacagctgcttctggatgccagcaccacctcacctgttgactcctcagagctgcttctcgatgtgaacgaaaacgggaagaggcgaactccagacaggtgagagggaggaggagcctggatgaaccatgacctttttcccatacctgtggcatgaggaaacatttcatgtcacaattaaaccgctggcctatgtcattcttgcacaatagcaataagccattgtggccatcttgagaatctggctctggcctgggattttacagagttttgaatctctggcctgggacagtttggcttttgtgtaggttaatcttttctgcttgtagtattaaagcgaaatggtgaagacgaatgatttttctgatttgccaagtaccactgatggctcttagatgcacatcaatattaaaattctcattcattatgtaatttaacccaaccacatattttacttcaatattctgaaattggctgttcctagtttccttaaaatgtgatggtttggaagcttgtctgtatgtatttcttaacacagtacagtagttatttgttttggttgtatatgaactaagagaaaacttctgggacactagatgaactgagtgaagataagagttatacagtagagacaatagatggtatttttgctgaaaattttacttgttagatactgttctatcagatactgtgctctcataactaagaattctaagaaatgtaaaataaaaccacttctccattaaaccctacagagtaattgttgaataaagcatacacatgaaatttccc

SEQ ID NO: 2625 - DNA, 799 bp, Homo sapiens
aagcttcactctgaccatcactgtcttcacaaacccaccgcaagtcgccacctaccacagagccatcaaaatcacagtggatgggccccgagaacctcgaaatcgtactgagaagcactccacaatgccagactcacctgtggatgtgaagacgcaatctaggctgactcctccaacaatgccacctcccccaactactcaaggagctccaagaaccagttcatttacaccgacaacgttaactaatggcacgagccattctcctacagccttgaatggcgccccctcaccacccaatggcttcagcaatgggccttcctcttcttcctcctcctctctggctaatcaacagctgcccccagcctgtggtgccaggcaactcagcaagctgaaaaggttccttactaccctgcagcagtttggcaatgacatttcacccgagataggagaaagagttcgcaccctcgttctgggactagtgaactccactttgacaattgaagaatttcattccaaactgcaagaagctactaacttcccactgagaccttttgtcatcccatttttgaaggtattgcacagttcactggtcgtgtaaagtattttaaaccatattgttgctaggtcataactgtgtgcttttttagtacatttaggggctctttgatttaatttaatggatgaaaactatctgaatcgattgtatttatgaccatttcctaagtagtctgaaaattacaaggagtgttttaaataattacctgaaaagaagtaaagtttgaagaagagtttagaagtc

SEQ ID NO: 2626 - DNA, 2436 bp, Homo sapiens
tataacactaccaaggtagcatctgcctaagccagaaataacaataggatataatataacctagttacaaatgaggtcctgccatctgtgctataccttcttaagtggggtttggatgataaaatcctgatttaaacgtcagtagataagtgtattttattgatagaagatgttgaatttcttctgttcacttgcttttaaaaaagataaaccccacttgaaaaactgaggtgcttaaggagtaaaataatatgttcctggtggcatcctccagatcgtactgagaagcactccacaatgccagactcacctgtggatgtgaagacgcaatctaggctgactcctccaacaatgccacctcccccaactactcaaggagctccaagaaccagttcatttacaccgacaacgttaactaatggcacgagccattctcctacagccttgaatggcgccccctcaccacccaatggcttcagcaatgggccttcctcttcttcctcctcctctctggctaatcaacagctgcccccagcctgtggtgccaggcaactcagcaagctgaaaaggttccttactaccctgcagcagtttggcaatgacatttcacccgagataggagaaagagttcgcaccctcgttctgggactagtgaactccactttgacaattgaagaatttcattccaaactgcaagaagctactaacttcccactgagaccttttgtcatcccatttttgaaggccaacttgcccctgctgcagcgtgagctcctccactgcgcaagactggccaaacagaaccctgcccagtacctcgcccagcatgaacagctgcttctggatgccagcaccacctcacctgttgactcctcagagctgcttctcgatgtgaacgaaaacgggaagaggcgaactccagacagaaccaaagaaaatggctttgacagagagcctttgcactcagaacatccaagcaagcgaccatgcactattagcccaggccagcggtacagtccaaataacggcttatcctaccagcccaatggcctgcctcaccctaccccacctccacctcagcattaccgtttggatgatatggccattgcccaccactacagggactcctatcgacaccccagccacagggacctcagggacagaaacagacctatggggttgcatggcacacgtcaagaagaaatgattgatcacagactaacagacagagaatgggcagaagagtggaaacatcttgaccatctgttaaactgcataatggacatggtagaaaaaacaaggcgatctctcaccgtactaaggcggtgtcaagaagcagaccgggaagaattgaattactggatccggcggtacagtgacgccgaggacttaaaaaaaggtggcggcagtagcagcagccactctaggcagcagagtcccgtcaacccagacccagttgcactagacgcgcatcgggaattccttcacaggcctgcgtctggatacgtgccagaggagatctggaagaaagctgaggaggccgtcaatgaggtgaagcgccaggcgatgacggagctgcagaaggccgtgtctgaggcggagcggaaagcccacgacatgatcacaacagagagggccaagatggagcgcacggtcgccgaggccaaacggcaggcggcggaggacgcactggcagttatcaatcagcaggaggattcaagcgagagttgctggaattgtggccgtaaagcgagtgaaacctgcagtggctgtaacacagcccgatactgtggctcattttgccagcacaaagactgggagaagcaccatcacatctgtggacagaccctgcaggcccagcagcagggagacacacctgcagtcagctcctctgtcacgcccaacagcggggctgggagcccgatggacacaccaccagcagccactccgaggtcaaccaccccgggaaccccttccaccatagagacaacccctcgctagacgtgaactcagaactgtcggaggaaagacaacacaaccaacgcgaaaccaattcctcatcctcagatgctcaaagttgttttttttgtttgtttgtttattagatgaattatcctatttcagtacttcagcaagagagaacctaactgtatcttgaggtggtagtaaaacacagagggccagtaacgggtcgtaatgacttattgtggataacaaagatatcttttctttagagaactgaaaagagagcagagaatataacatgaaatgatagatttgacctcctccctgttattttcaagtagctgggattttaaactagatgacctcattaaccgatgctttaccaaacagcaaaccaagagattgctaattgctgttgaaagcaaaaatgctaatattaaaagtcacaatgttctttatatacaataatgg

SEQ ID NO: 2627 - DNA, 2291 bp, Homo sapiens
gcaattaaagtcaagagctaaggagggagggagagggtttagaaataccagcataataagtagtatgactgggtgctctgtaaattaactcaattagacaaagcctgacttaacgggggaagatggtgagaagcgctaccctcattaaatttggttgttagaggcgcttctaaggaaattaagtctgttagttgtttgaatcacataaaattgtgtgtgcacgttcatgtacacatgtgcacacatgtaacctctgtgattcttgtgggtatttttttaagaagaaaggaatagaaagcaaagaaaaataaaaaatactgaaaagaaaagactgaaagagtagaagataaggagaaaagtacgacagagacaaggaaagtaagagagagagagagctctcccaattataaagccatgagccccctttggtgggggtttctgctcagttgcttgggctgcaaaatcctgccaggagcccagggtcagttcccccgagtctgcatgacggtggacagcctagtgaacaaggagtgctgcccacgcctgggtgcagagtcggccaatgtctgtggctctcagcaaggccgggggcagtgcacagaggtgcgagccgacacaaggccctggagtggtccctacatcctacgaaaccaggatgaccgtgagctgtggccaagaaaattcttccaccggacctgcaagtgcacaggaaactttgccggctataattgtggagactgcaagtttggctggaccggtcccaactgcgagcggaagaaaccaccagtgattcggcagaacatccattccttgagtcctcaggaaagagagcagttcttgggcgccttagatctcgcgaagaagagagtacaccccgactacgtgatcaccacacaacactggctgggcctgcttgggcccaatggaacccagccgcagtttgccaactgcagtgtttatgatttttttgtgtggctccattattattctgttagagatacattattaggaccaggacgcccctacagggccatagatttctcacatcaaggacctgcatttgttacctggcaccggtaccatttgttgtgtctggaaagagatctccagcgactcattggcaatgagtcttttgctttgccctactggaactttgccactgggaggaacgagtgtgatgtgtgtacagaccagctgtttggggcagcgagaccagacgatccgactctgattagtcggaactcaagattctccagctgggaaactgtctgtgatagcttggatgactacaaccacctggtcaccttgtgcaatggaacctatgaaggtttgctgagaagaaatcaaatgggaagaaacagcatgaaattgccaaccttaaaagacatacgagattgcctgtctctccagaagtttgacaatcctcccttcttccagaactctaccttcagtttcaggaatgctttggaagggtttgataaagcagatgggactctggattctcaagtgatgagccttcataatttggttcattccttcctgaacgggacaaacgctttgccacattcagccgccaatgatcccatttttgtggttcttcattcctttactgatgccatctttgatgagtggatgaaaagatttaatcctcctgcagatgcctggcctcaggagctggcccctattggtcacaatcggatgtacaacatggttcctttcttccctccagtgactaatgaagaactctttttaacctcagaccaacttggctacagctatgccatcgatctgccagtttcagttgaagaaactccaggttggcccacaactctcttagtagtcatgggaacactggtggctttggttggtctttttgtgctgttggcttttcttcaatatagaagacttcgaaaaggatatacacccctaatggagacacatttaagcagcaagagatacacagaagaagcctagggtgctcatgccttacctaagagaagaggctggccaagccacagttctgacgctgacaataaaggaactaatcctcactgttccttcttgagttgaagatctttgacataggttcttctatagtgatgatgatctcattcagaagatgcttagctgtagtttccgctttgcttgcttgtttaacaaacccaactaaagtgcttgaggctacctctaccttcaaataaagatagacctgacaatttgtgatatctaataataaccccccccccaatattgattaagcctcctccttttctgaaagcatttaaaaaaaa

SEQ ID NO: 2628 - DNA, 2553 bp, Homo sapiens; identical to SEQ ID NO: 669

SEQ ID NO: 2629 - DNA, 1524 bp, Homo sapiens
gccgtcttcccctcctcccgtcctccctcgccccgcatgtactccccgtactgcctcacccaggatgagttccacccgttcatcgaggcactgctgcctcacgtccgcgctttctcctacacctggttcaacctgcaggcgcggaagcgcaagtacttcaagaagcatgaaaagcggatgtcgaaggacgaggagcgggcggtgaaggacgagctgctgggcgagaagcccgagatcaagcagaagtgggcatcccggctgctggccaagctgcgcaaggacatccggcccgagttccgcgaggactacgtgctgaccatcacgggcaagaagcccccctgctgcgtgctctccaaccccgaccagaagggcaagatccggcggattgactgcctgcgccaggctgacaaggtgtggcggctggacctggtcatggtgattttgtttaaggggatccccctggaaagtactgatggggagcggctctacaagtcgcctcagtgctcgaaccccggcctgtgcgtccagccacatcacattggagtcacaatcaaagaactggatctttatctggcttactttgtccacactccggaatccggacaatcagatagttcaaaccagcaaggagatgcggacatcaaaccactgcccaacggacacttaagtttccaggactgttttgtgacttccggggtctggaatgtgacggagctggtgagagtatcacagactcctgttgcaacagcatcagggcccaacttctccctggcggacctggagagtcccagctactacaacatcaaccaggtgaccctggggcggcggtccatcacctcccctccttccaccagcaccaccaagcgccccaagtccatcgatgacagtgagatggagagccctgttgatgacgtgttctatcccgggacaggccgttccccagcagctggcagcagccagtccagcgggtggcccaacgatgtggatgcaggcccggcttctctaaagaagtcaggaaagctggacttctgcagtgccctctcctctcagggcagctccccgcgcatggctttcacccaccacccgctgcctgtgcttgctggagtcagaccagggagcccccgggccacagcatcagccctgcacttcccctccacgtccatcatccagcagtcgagcccgtatttcacgcacccgaccatccgctaccaccaccaccacgggcaggactcactgaaggagtttgtgcagtttgtgtgctcggatggctcgggccaggccaccggacagcattcgcaacgacaggcgcctcctctgccaaccggtttgtcagcatcggaccccgggacggcaactttctgaacatcccacagcagtctcagtcctggttcctctgataaagatcgacaaaagaaacaacaaaatgagaagaagaggttcctcgaaaggggggagaagaaattttgagaacggaaaaatcccccagcccagcccagcccagccccaccggaaagcaaaaatttc

SEQ ID NO: 2630 - DNA, 5102 bp, Homo sapiens
gcttctgcgactccagttgtgagagccgcaagggcatgggaattgacgccactcaccgacccccagtctcaatctcaacgctgtgaggaaacctcgactttgccaggtccccaagggcagcggggctcggcgagcgaggcacccttctccgtccccatcccaatccaagcgctcctggcactgacgacgccaagagactcgagtgggagttaaagcttccagtgagggcagcaggtgtccaggccgggcctgcgggttcctgttgacgtcttgccctaggcaaaggtcccagttccttctcggagccggctgtcccgcgccactggaaaccgcacctccccgcagcatgggcaccagcctcagcccgaacgacccttggccgctaaacccgctgtccatccagcagaccacgctcctgctactcctgtcggtgctggccactgtgcatgtgggccagcggctgctgaggcaacggaggcggcagctccggtccgcgcccccgggcccgtttgcgtggccactgatcggaaacgcggcggcggtgggccaggcggctcacctctcgttcgctcgcctggcgcggcgctacggcgacgttttccagatccgcctgggcagctgccccatagtggtgctgaatggcgagcgcgccatccaccaggccctggtgcagcagggctcggccttcgccgaccggccggccttcgcctccttccgtgtggtgtccggcggccgcagcatggctttcggccactactcggagcactggaaggtgcagcggcgcgcagcccacagcatgatgcgcaacttcttcacgcgccagccgcgcagccgccaagtcctcgagggccacgtgctgagcgaggcgcgcgagctggtggcgctgctggtgcgcggcagcgcggacggcgccttcctcgacccgaggccgctgaccgtcgtggccgtggccaacgtcatgagtgccgtgtgtttcggctgccgctacagccacgacgaccccgagttccgtgagctgctcagccacaacgaagagttcgggcgcacggtgggcgcgggcagcctggtggacgtgatgccctggctgcagtacttccccaacccggtgcgcaccgttttccgcgaattcgagcagctcaaccgcaacttcagcaacttcatcctggacaagttcttgaggcactgcgaaagccttcggcccggggccgccccccgcgacatgatggacgcctttatcctctctgcggaaaagaaggcggccggggactcgcacggtggtggcgcgcggctggatttggagaacgtaccggccactatcactgacatcttcggcgccagccaggacaccctgtccaccgcgctgcagtggctgctcctcctcttcaccaggtatcctgatgtgcagactcgagtgcaggcagaattggatcaggtcgtggggagggaccgtctgccttgtatgggtgaccagcccaacctgccctatgtcctggccttcctttatgaagccatgcgcttctccagctttgtgcctgtcactattcctcatgccaccactgccaacacctctgtcttgggctaccacattcccaaggacactgtggtttttgtcaaccagtggtctgtgaatcatgacccagtgaagtggcctaacccggagaactttgatccagctcgattcttggacaaggatggcctcatcaacaaggacctgaccagcagagtgatgattttttcagtgggcaaaaggcggtgcattggcgaagaactttctaagatgcagctttttctcttcatctccatcctggctcaccagtgcgatttcagggccaacccaaatgagcctgcgaaaatgaatttcagttatggtctaaccattaaacccaagtcatttaaagtcaatgtcactctcagagagtccatggagctccttgatagtgctgtccaaaatttacaagccaaggaaacttgccaataagaagcaagaggcaagctgaaattttagaaatattcacatcttcggagatgaggagtaaaattcagtttttttccagttcctcttttgtgctgcttctcaattagcgtttaaggtgagcataaatcaactgtccatcaggtgaggtgtgctccatacccagcggttcttcatgagtagtgggctatgcaggagcttctgggagatttttttgagtcaaagacttaaagggcccaatgaattattatatacatactgcatcttggttatttctgaaggtagcattctttggagttaaaatgcacatatagacacatacacccaaacacttacaccaaactactgaatgaagaagtattttggtaaccaggccatttttggtgggaatccaagattggtctcccatatgcagaaatagacaaaaagtatattaaacaaagtttcagagtatattgttgaagagacagagacaagtaatttcagtgtaaagtgtgtgattgaaggtgataagggaaaagataaagaccagaaattcccttttcaccttttcaggaaaataacttagactctagtatttatgggtggatttatccttttgccttctggtatacttccttacttttaaggataaatcataaagtcagttgctcaaaaagaaatcaatagttgaattagtgagtatagtggggttccatgagttatcatgaattttaaagtatgcattattaaattgtaaaactccaaggtgatgttgtacctcttttgcttgccaaagtacagaatttgaattatcagcaaagaaaaaaaaaaaagccagccaagctttaaattatgtgaccataatgtactgatttcagtaagtctcataggttaaaaaaaaaagtcaccaaatagtgtgaaatatattacttaactgtccgtaagcagtatattagtattatcttgttcaggaaaaggttgaataatatatgccttgtgtaatattgaaaattgaaaagtacaactaacgcaaccaagtgtgctaaaaatgagcttgattaaatcaaccacctatttttgacatggaaatgaagcagggtttcttttcttcactcaaattttggcgaatctcaaaattagatcctaagatgtgttcttatttttataacatctttattgaaattctatttataatacagaatcttgttttgaaaataacctaattaatatattaaaattccaaattcatggcatgcttaaattttaactaaattttaaagccattctgattattgagttccagttgaagttagtggaaatctgaacattctcctgtggaaggcagagaaatctaagctgtgtctgcccaatgaataatggaaaatgccatgaattacctggatgttctttttacgaggtgacaagagttggggacagaactcccattacaactgaccaagtttctcttctagatgattttttgaaagttaacattaatgcctgctttttggaaagtcagaatcagaagatagtcttggaagctgtttggaaaagacagtggagatgaggtcagttgtgttttttaagatggcaattactttggtagctgggaaagcataaagctcaaatgaaatgtatgcattcacatttagaaaagtgaattgaagtttcaagttttaaagttcattgcaattaaacttccaaagaaagttctacagtgtcctaagtgctaagtgcttattacattttattaagctttttggaatctttgtaccaaaattttaaaaaagggagtttttgatagttgtgtgtatgtgtgtgtggggtggggggatggtaagagaaaagagagaaacactgaaaagaaggaaagatggttaaacattttcccactcattctgaattaattaatttggagcacaaaattcaaagcatggacatttagaagaaagatgtttggcgtagcagagttaaatctcaaataggctattaaaaaagtctacaacatagcagatctgttttgtggtttggaatattaaaaaacttcatgtaattttattttaaaatttcatagctgtacttcttgaatataaaaaatcatgccagtatttttaaaggcattagagtcaactacacaaagcaggcttgcccagtacatttaaattttttggcacttgccattccaaaatattatgccccaccaaggctgagacagtgaatttgggctgctgtagcctatttttttagattgagaaatgtgtagctgcaaaaataatcatgaaccaatctggatgcctcattatgtcaaccaggtccagatgtgctataatctgtttttacgtatgtaggcccagtcgtcatcagatgcttgcggcaaaagaaagctgtgtttatatggaagaaagtaaggtgcttggagtttacctggcttatttaatatgcttataacctagttaaagaaaggaaaagaaaacaaaaaacgaatgaaaataactgaatttggaggctggagtaatcagattactgctttaatcagaaaccctcattgtgtttctaccggagagagaatgtatttgctgacaaccattaaagtcagaagttttactccaggttattgcaataaagtataatgtttattaaatgcttcatttgtatgtcaaagctttgactctataagcaaattgcttttttccaaaacaaaaagatgtctcaggtttgttttgtgaattttctaaaagctttcatgtcccagaacttagcctttacctgtgaagtgttactacagccttaatattttcctagtagatctatattagatcaaatagttgcatagcagtatatgttaatttgtgtgtttttagctgtgacacaactgtgtgattaaaaggtatactttagtagacatttataactcaaggataccttcttatttaatcttttcttatttttgtactttatcatgaatgcttttagtgtgtgcataatagctacagtgcatagttgtagacaaagtacattctggggaaacaacatttatatgtagcctttactgtttgatataccaaattaaaaaaaaattgtatctcattacttatactgggacaccattaccaaaataataaaaatcactttcataatcttgaaaaaa

SEQ ID NO: 2631 - DNA, 5257 bp, Homo sapiens
aaaaattttctgttaccaaattttacaacttctaataagactactataactttatgtaaactgatgaagatgtgctgattaacatattctgtgatatggtttacaacttttaatcataattgtccatgattttggaatgctgttatttatcagtaaatgtaaaatatttgaggcatttagccatacacacactagaactttttaaaactttgtcctatagtgtaattataaactgatgactattatcttcatacattgagtcttcatgcatcaatgaaatgaaaaatataggagtagatgtccacgcccacagaccctggtgcgatgccccacccagggccttcgccggggcctgggccttcccctgggccaattcttgggcctagtccaggaccaggaccatccccaggttccgtccacagcatgatggggccaagtcctggacctccaagtgtctcccatcctatgccgacgatggggtccacagacttcccacaggaaggcatgcatcaaatgcataagcccatcgatggtatacatgacaaggggattgtagaagacatccattgtggatccatgaagggcactggtatgcgaccacctcacccaggcatgggccctccccagagtccaatggatcaacacagccaaggttatatgtcaccacacccatctccattaggagccccagagcacgtctccagccctatgtctggaggaggcccaactccacctcagatgccaccaagccagccgggggccctcatcccaggtgatccgcaggccatgagccagcccaacagaggtccctcacctttcagtcctgtccagctgcatcagcttcgagctcagattttagcttataaaatgctggcccgaggccagcccctccccgaaacgctgcagcttgcagtccaggggaaaaggacgttgcctggcttgcagcaacaacagcagcagcaacagcagcagcagcagcagcagcagcagcagcagcagcagcaacagcagccgcagcagcagccgccgcaaccacagacgcagcaacaacagcagccggcccttgttaactacaacagaccatctggcccggggccggagctgagcggcccgagcaccccgcagaagctgccggtgcccgcgcccggcggccggccctcgcccgcgccccccgcagccgcgcagccgcccgcggccgcagtgcccgggccctcagtgccgcagccggccccggggcagccctcgcccgtcctccagctgcagcagaagcagagccgcatcagccccatccagaaaccgcaaggcctggaccccgtggaaattctgcaagagcgggaatacagacttcaggcccgcatagctcataggatacaagaactggaaaatctgcctggctctttgccaccagatttaagaaccaaagcaaccgtggaactaaaagcacttcggttactcaatttccagcgtcagctgagagaggaggtggtggcctgcatgcgcagggacacgaccctggagacggctctcaactccaaagcatacaaacggagcaagcgccagactctgagagaagctcgcatgaccgagaagctggagaagcagcagaagattgagcaggagaggaaacgccgtcagaaacaccaggaatacctgaacagtattttgcaacatgcaaaagattttaaggaatatcatcggtctgtggccggaaagatccagaagctctccaaagcagtggcaacttggcatgccaacactgaaagagagcagaagaaggagacagagcggattgaaaaggagagaatgcggcgactgatggctgaagatgaggagagttatagaaaactgattgatcaaaagaaagacaggcgtttagcttaccttttgcagcagaccgatgagtatgtagccaatctgaccaatctggtttgggagcacaagcaagcccaggcagccaaagagaagaagaagaggaggaggaggaagaagaaggctgaggagaatgcagagggtggggagtctgccctgggaccggatggagagcccatagatgagagcagccagatgagtgacctccctgtcaaagtgactcacacagaaaccggcaaggttctgttcggaccagaagcacccaaagcaagtcagctggacgcctggctggaaatgaatcctggttatgaagttgcccctagatctgacagtgaagagagtgattctgattatgaggaagaggatgaggaagaagagtccagtaggcaggaaaccgaagagaaaatactcctggatccaaatagcgaagaagtttctgagaaggatgctaagcagatcattgagacagctaagcaagacgtggatgatgaatacagcatgcagtacagtgccaggggctcccagtcctactacaccgtggctcatgccatctcggagagggtggagaaacagtctgccctcctaattaatgggaccctaaagcattaccagctccagggcctggaatggatggtttccctgtataataacaacttgaacggaatcttagccgatgaaatggggcttggaaagaccatacagaccattgcactcatcacttatctgatggagcacaaaagactcaatggcccctatctcatcattgttcccctttcgactctatctaactggacatatgaatttgacaaatgggctccttctgtggtgaagatttcttacaagggtactcctgccatgcgtcgctcccttgtcccccagctacggagtggcaaattcaatgtcctcttgactacttatgagtatattataaaagacaagcacattcttgcaaagattcggtggaaatacatgatagtggacgaaggccaccgaatgaagaatcaccactgcaagctgactcaggtcttgaacactcactatgtggcccccagaaggatcctcttgactgggaccccgctgcagaataagctccctgaactctgggccctcctcaacttcctcctcccaacaatttttaagagctgcagcacatttgaacaatggttcaatgctccatttgccatgactggtgaaagggtggacttaaatgaagaagaaactatattgatcatcaggcgtctacataaggtgttaagaccatttttactaaggagactgaagaaagaagttgaatcccagcttcccgaaaaagtggaatatgtgatcaagtgtgacatgtcagctctgcagaagattctgtatcgccatatgcaagccaaggggatccttctcacagatggttctgagaaagataagaaggggaaaggaggtgctaagacacttatgaacactattatgcagttgagaaaaatctgcaaccacccatatatgtttcagcacattgaggaatcctttgctgaacacctaggctattcaaatggggtcatcaatggggctgaactgtatcgggcctcagggaagtttgagctgcttgatcgtattctgccaaaattgagagcgactaatcaccgagtgctgcttttctgccagatgacatctctcatgaccatcatggaggattattttgcttttcggaacttcctttacctacgccttgatggcaccaccaagtctgaagatcgtgctgctttgctgaagaaattcaatgaacctggatcccagtatttcattttcttgctgagcacaagagctggtggcctgggcttaaatcttcaggcagctcatacagtggtcatctttgacagcgactggaatcctcatcaggatctgcaggcccaagaccgagctcaccgcatcgggcagcagaacgaggtccgggtactgaggctctgtaccgtgaacagcgtggaggaaaagatcctcgcggccgcaaaatacaagctgaacgtggatcagaaagtgatccaggcgggcatgtttgaccaaaagtcttcaagccacgagcggagggcattcctgcaggccatcttggagcatgaagaggaaaatgaggaagaagatgaagtaccggacgatgagactctgaaccaaatgattgctcgacgagaagaagaatttgacctttttatgcggatggacatggaccggcggagggaagatgcccggaacccgaaacggaagccccgtttaatggaggaggatgagctgccctcctggatcattaaggatgacgctgaagtagaaaggctcacctgtgaagaagaggaggagaaaatatttgggagggggtcccgccagcgccgtgacgtggactacagtgacgccctcacggagaagcagtggctaagggccatcgaagacggcaatttggaggaaatggaagaggaagtacggcttaagaagcgaaaaagacgaagaaatgtggataaagatcctgcaaaagaagatgtggaaaaagctaagaagagaagaggccgccctcccgctgagaaactgtcaccaaatccccccaaactgacaaagcagatgaacgctatcatcgatactgtgataaactacaaagatagttcagggcgacagctcagtgaagtcttcattcagttaccttcaaggaaagaattaccagaatactatgaattaattaggaagccagtggatttcaaaaaaataaaggaaaggattcgtaatcataagtaccggagcctaggcgacctggagaaggatgtcatgcttctctgtcacaacgctcagacgttcaacctggagggatcccagatctatgaagactccatcgtcttacagtcagtgtttaagagtgcccggcagaaaattgccaaagaggaagagagtgaggatgaaagcaatgaagaggaggaagaggaagatgaagaagagtcagagtccgaggcaaaatcagtcaaggtgaaaattaagctcaataaaaaagatgacaaaggccgggacaaagggaaaggcaagaaaaggccaaatcgaggaaaagccaaacctgtagtgagcgattttgacagcgatgaggagcaggatgaacgtgaacagtcagaaggaagtgggacggatgatgagtgatcagtatggacctttttccttggtagaactgaattccttcctcccctgtctcatttctacccagtgagttcatttgtcatataggcactgggttgtttctatatcatcatcgtctataaactagctttaggatagtgccagacaaacatatgatatcatggtgtaaaaaacacacacatacacaaatatttgtgaccaaatgggcctcaaagattcagattgaaacaaacaaaaagctttt

SEQ ID NO: 2632 - DNA, 2226 bp, Homo sapiens
accaccaaaaattcaaattgggattttccggagtaaacaagagcctagagccctttgctcaatgctggatttaatacgtatatatttttaagcgagttggttttttcccctttgatttttgatcttcgcgacagttcctcccacgcatattatcgttgttgccgtcgttttctctccccgcgtggctccttgacctgcgagggagagagaggacaccgaagccgggagctcgcagggaccatgtatcagagcttggccatggccgccaaccacgggccgccccccggtgcctaccaggcgggcggccccggccccttcatgcacggcgcgggcgccgcgtcctcgccagtctacctgcccacaccgcgggtgccctcctccgttctgggcctgtcctacctccagggcggaggcgcgggctctgcgtccggaggcccctcgggcggcagccccggtggggccgcgtctggtgcggggcccgggacccagcagggcagcccgggatggagccaggcgggagcgaccggagccgcttacaccccgccgccggtgtcgccgcgcttctccttcccggggaccaccgggtccctggcggcggcggcggcggctgccgccgcccgggaagctgcggcctacagcagtggcggcggagcggcgggtgcgggcctggcgggccgcgagcagtacgggcgcgccggcttcgcgggctcctactccagcccctacccggcttacatggccgacgtgggcgcgtcctgggccgcagccgccgccgcctccgccggccccttcgacagcccggtcctgcacagcctgcccggccgggccaacccggccgcccgacaccccaatctcgatatgtttgacgacttctcagaaggcagagagtgtgtcaactgtggggctatgtccaccccgctctggaggcgagatgggacgggtcactatctgtgcaacgcctgtggcctctaccacaagatgaacggcatcaaccggccgctcatcaagcctcagcgccggctgtccgcctcccgccgagtgggcctctcctgtgccaactgccagaccaccaccaccacgctgtggcgccgcaatgcggagggcgagcctgtgtgcaatgcctgcggcctctacatgaagctccacggggtgcccaggcctcttgcaatgcggaaagaggggatccaaaccagaaaacggaagcccaagaacctgaataaatctaagacaccagcagctccttcaggcagtgagagccttcctcccgccagcggtgcttccagcaactccagcaacgccaccaccagcagcagcgaggagatgcgtcccatcaagacggagcctggcctgtcatctcactacgggcacagcagctccgtgtcccagacgttctcagtcagtgcgatgtctggccatgggccctccatccaccctgtcctctcggccctgaagctctccccacaaggctatgcgtctcccgtcagccagtctccacagaccagctccaagcaggactcttggaacagtctggtcttggccgacagtcacggggacataatcactgcgtaatcttccctcttccctcctcaaattcctgcacggacctgggacttggaggatagcaaagaaggaggccctgggctcccaggggccggcctcctctgcctggtaatgactccagaacaacaactgggaagaaacttgaagtcgacaatctggttaggggaagcgggtgttggattttctcagatgcctttacacgctgatgggactggagggagcccacccttcagcacgagcacactgcatctctcctgtgagttggagacttctttcccaagatgtccttgtcccctgcgttccccactgtggcctagaccgtgggttttgcattgtgtttctagcaccgaaggatctgagaacaagcggagggccgggccctgggacccctgctccagcccgaatgacggcatctgtttgccatgtacctggatgtgacgggcccctggggacaggcccttgccccatccatccgcttgaggcatggcaccgccctgcatccctaataccaaatctgactccaaaactgtggggtgtgacacacaagtgactgagcacttcctggggagctacaggggcacttaacccaccacagcgcagcctcatcaaaatgcagctggcaacttctcccccaggtgccttccccctgctgccggcctttgctcc

SEQ ID NO: 2633 - DNA, 802 bp, Homo sapiens
aacaccatgaatctactcctgatccttacctttgttgcagctgctgttgctgccccctttgatgatgatgacaagatcgttgggggctacatctgtgaggagaattctgtcccctaccaggtgtccttgaattctggctaccacttctgcggtggctccctcatcagcgaacagtgggtggtgtcagcaggtcactgctacaagtcccgcatccaggtgagactgggagagcacaacatcgaagtcctggaggggaatgaacagttcatcaatgcggccaagatcatccgccaccccaaatacaacagccggactctggacaatgacatcctgctgatcaagctctcctcacctgccgtcatcaattcccgcgtgtccgccatctctctgcccactgcccctccagctgctggcaccgagtccctcatctccggctggggcaacactctgagttctggtgccgactacccagacgagctgcagtgcctggatgctcctgtgctgagccaggctgagtgtgaagcctcctaccctggaaagattaccaacaacatgttctgtgtgggcttcctcgagggaggcaaggattcctgccagggtgattctggtggccctgtggtctccaatggagagctccaaggaattgtctcctggggctatggctgtgcccagaagaacaggcctggagtctacaccaaggtctacaactatgtggactggattaaggacaccatagctgccaacagctaaagcccccagtccctctgcagtctctataccaataaagtgaccctgctctcac

SEQ ID NO: 2634 - DNA, 1612 bp, Homo sapiens
gaatataaatagtttctggaaaggacactgacaacttcaaagcaaaatgaagttctttctgttgcttttcaccattgggttctgctgggctcagtattccccaaatacacaacaaggacggacatctattgttcatctgtttgaatggcgatgggttgatattgctcttgaatgtgagcgatatttagctcccaagggatttggaggggttcaggtctctccaccaaatgaaaatgttgcaattcacaaccctttcagaccttggtgggaaagataccaaccagttagctataaattatgcacaagatctggaaatgaagatgaatttagaaacatggtgactagatgtaacaatgttggggttcgtatttatgtggatgctgtaattaatcatatgtctggtaatgctgtgagtgcaggaacaagcagtacctgtggaagttacttcaaccctggaagtagggactttccagcagtcccatattctggatgggattttaatgatggtaaatgtaaaactggaagtggagatatcgagaactacaatgatgctactcaggtcagagattgtcgtctggttggtcttcttgatcttgcactggagaaagattatgtgcgttccaagattgccgaatatatgaatcatctcattgacattggtgttgcagggttcagacttgatgcttccaagcacatgtggcctggagacataaaggcaattttggacaaactgcataatctaaacagtaactggttccctgcaggaagtaaacctttcatttaccaggaggtaattgatctgggtggtgagccaattaaaagcagtgactactttggaaatggccgggtgacagaattcaagtatggtgcaaaactcggcacagttattcgcaagtggaatggagagaagatgtcttacctaaagaactggggagaaggttggggtttcatgccttctgacagagcacttgtctttgtggataaccatgacaatcaacgaggacatggggctggaggagcctctattcttaccttctgggatgctaggctgtataaaatggcagttggatttatgcttgctcatccttatggttttacacgagtaatgtcaagctaccgttggccaagacagtttcaaaatggaaacgatgttaatgattgggttgggccaccaaataataatggagtaattaaagaagttactattaatccagacactacttgtggcaatgactgggtctgtgaacatcgatggcgccaaataaggaacatggttaatttccgcaatgtagtggatggccagccttttacaaactggtatgataatgggagcaaccaagtggcttttgggagaggaaacagaggattcattgttttcaacaatgatgactggacattttctttaactttgcaaactggtcttcctgctggcacatactgtgatgtcatttctggagataaaattaatggcaattgcacaggcattaaaatctacgtttctgacgatggcaaagctcatttttctattagtaactctgctgaggatccatttattgcaattcatgctgaatctaaattataaaatttaaaattaaatgcatatcctcaaaac

SEQ ID NO: 2635 - DNA, 1713 bp, Homo sapiens
gaattcccggcgctttcctcgcaacccgagctcggcgagtcgtcgtcttcttcttctccgtttttatttatttatttccgttcccgccgccgttctcgctgaccttcactcctccgcgggctctgagcagaagggtcgcattctctcccgcctgagacttcttttcctcgccccgggagctcaggcggcgcgctccagcccggggccccggactccccggctgcacacttcactgagacgcccccaggcccgatcagcctcgttctccaccctactttgatttcctggtgcgagttttggcttgcacggccgagtgtgtgtcctctttttggagagactggggagctcgtgccgattgtcttcaggagtcatcccctgggctctactttgcccctctctctctctgggcctcatcagaccaaaccaaagaccatggttcactgtgccggctgcaaaaggcccatcctggaccgctttctcttgaacgtgctggacagggcctggcacgtcaagtgcgtccagtgctgtgaatgtaaatgcaacctgaccgagaagtgcttctccagggaaggcaaactctactgcaagaacgacttcttccggtgtttcggtaccaaatgcgcaggctgccgtcagggcatctcccctagcgacctggtgcggagagcgcggagcaaagtgtttcacctgaactgcttcacctgcatgatgtgtaacaagcagctctccactggcgaggaactctacatcatcgacgagaataagttcgtctgcaaagaggattacctaagtaacagcagtgttgccaaagagaacagccttcactcggccaccacgggcagtgaccccagtttgtctccggattcccaagacccgtcgcaggacgacgccaaggactcggagagcgccaacgtgtcggacaaggaagcgggtagcaacgagaatgacgaccagaacctgggcgccaagcggcggggacccggcaccaccatcaaagccaagcagctggagacgctgaaggccgccttcgctgctacacccaagcccacccgccacatccgcgagcagctggcgcaggagaccggcctcaacatgcgcgtcattcaggtctggttccagaaccggcgctccaaggagcggaggatgaagcagctgagcgccctggccggccacgccttcttccgcagtccgcgccggatgcggccgctggtggaccgcctggagccgggcgagctcatccccaatggtcccttctccttctacggagattaccagagcgagtactacgggcccgggggcaactacgacttcttcccgcaaggccccccgtcctcgcaggcccagacaccagtggacctacccttcgtgccgtcatctgggccgtccgggacgcccctgggtggcctggagcacccgctgccgggccaccacccgtcgagcgaggcgcagcggtttaccgacatcctggcgcacccacccggggactcgcccagccccgagcccagcctgcccgggcctctgcactccatgtcggccgaggtcttcggacccagcccgcccttctcgtcgctgtcggtcaacggtggggcgagctacggaaaccacctgtcccacccccccgaaatgaacgaggcggccgtgtggtagcggggtctcgcacggtctgcggagttcgtggttgtacagaaatgaacctttatttaagaaaaatag

SEQ ID NO: 2636 - DNA, 4523 bp, Homo sapiens
cggtgcgagcgaacaggagtgggggggaaattaaaaaaagctaaacgtggagcagccgatcggggaccgagaaggggaatcgatgcaaggagcacactaaaacaaaagctacttcggaacaaacagcatttaaaaatccacgactcaagataactgaaacctaaaataaaacctgctcatgcaccatggtttttcaaactcggtacccttcatggattattttatgctacatctggctgctccgctttgcacacacaggggaggcgcaggctgcgaaggaagtactactgctggattctaaagcacaacaaacagagttggagtggatttcctctccacccaatgggtgggaagaaattagtggtttggatgagaactataccccgatacgaacataccaggtgtgccaagtcatggagcccaaccaaaacaactggctgcggactaactggatttccaaaggcaatgcacaaaggatttttgtagaattgaaattcaccctgagggattgtaacagtcttcctggagtactgggaacttgcaaggaaacatttaatttgtactattatgaaacagactatgacactggcaggaatataagagaaaacctctatgtaaaaatagacaccattgctgcagatgaaagttttacccaaggtgaccttggtgaaagaaagatgaagcttaacactgaggtgagagagattggacctttgtccaaaaagggattctatcttgcctttcaggatgtaggggcttgcatagctttggtttctgtcaaagtgtactacaagaagtgctggtccattattgagaacttagctatctttccagatacagtgactggttcagaattttcctctttagtcgaggttcgagggacatgtgtcagcagtgcagaggaagaagcggaaaacgcccccaggatgcactgcagtgcagaaggagaatggttagtgcccattggaaaatgtatctgcaaagcaggctaccagcaaaaaggagacacttgtgaaccctgtggccgtgggttctacaagtcttcctctcaagatcttcagtgctctcgttgtccaactcacagtttttctgataaagaaggctcctccagatgtgaatgtgaagatgggtattacagggctccatctgacccaccatacgttgcatgcacaaggcctccatctgcaccacagaacctcattttcaacatcaaccaaaccacagtaagtttggaatggagtcctcctgcagacaatgggggaagaaacgatgtgacctacagaatattgtgtaagcggtgcagttgggagcagggcgaatgtgttccctgtgggagtaacattggatacatgccccagcagactggattagaggataactatgtcactgtcatggacctgctagcccacgctaattatacttttgaagttgaagctgtaaatggagtttctgacttaagccgatcccagaggctctttgctgctgtcagtatcaccactggtcaagcagctccctcgcaagtgagcggagtaatgaaggagagagtactgcagcggagtgtcgagctttcctggcaggaaccagagcatcccaatggagtcatcacagaatatgaaatcaagtattacgagaaagatcaaagggaacggacctactcaacagtaaaaaccaagtctacttcagcctccattaataatctgaaaccaggaacagtgtatgttttccagattcgggcttttactgctgctggttatggaaattacagtcccagacttgatgttgctacactagaggaagctacaggtaaaatgtttgaagctacagctgtctccagtgaacagaatcctgttattatcattgctgtggttgctgtagctgggaccatcattttggtgttcatggtctttggcttcatcattgggagaaggcactgtggttatagcaaagctgaccaagaaggcgatgaagagctttactttcattttaaatttccaggcaccaaaacctacattgaccctgaaacctatgaggacccaaatagagctgtccatcaattcgccaaggagctagatgcctcctgtattaaaattgagcgtgtgattggtgcaggagaattcggtgaagtctgcagtggccgtttgaaacttccagggaaaagagatgttgcagtagccataaaaaccctgaaagttggttacacagaaaaacaaaggagagactttttgtgtgaagcaagcatcatggggcagtttgaccacccaaatgttgtccatttggaaggggttgttacaagagggaaaccagtcatgatagtaatagagttcatggaaaatggagccctagatgcatttctcaggaaacatgatgggcaatttacagtcattcagttagtaggaatgctgagaggaattgctgctggaatgagatatttggctgatatgggatatgttcacagggaccttgcagctcgcaatattcttgtcaacagcaatctcgtttgtaaagtgtcagattttggcctgtcccgagttatagaggatgatccagaagctgtctatacaactactggtggaaaaattccagtaaggtggacagcacccgaagccatccagtaccggaaattcacatcagccagtgatgtatggagctatggaatagtcatgtgggaagttatgtcttatggagaaagaccttattgggacatgtcaaatcaagatgttataaaagcaatagaagaaggttatcgtttaccagcacccatggactgcccagctggccttcaccagctaatgttggattgttggcaaaaggagcgtgctgaaaggccaaaatttgaacagatagttggaattctagacaaaatgattcgaaacccaaatagtctgaaaactcccctgggaacttgtagtaggccaataagccctcttctggatcaaaacactcctgatttcactaccttttgttcagttggagaatggctacaagctattaagatggaaagatataaagataatttcacggcagctggctacaattcccttgaatcagtagccaggatgactattgaggatgtgatgagtttagggatcacactggttggtcatcaaaagaaaatcatgagcagcattcagactatgagagcacaaatgctacatttacatggaactggcattcaagtgtgatatgcatttctcccttttaagggagattacagactgcaagagaacagtactggccttcagtatatgcatagaatgctgctagaagacaagtgatgtcctgggtccttccaacagtgaagagaagatttaagaagcacctatagacttgaactcctaagtgccaccagaatatataaaaagggaatttaggatccaccatcggtggccaggaaaatagcagtgacaataaacaaagtactacctgaaaaacatccaaacaccttgagctctctaacctcctttttgtcttatagactttttaaaatgtacataaagaatttaagaaagaatatatttgtcaaataaaatcatgatcttattgttaaaattaatgaaatattttccttaaatatgtgatttcagactattcctttttaaaatcatttgtgtttattcttcataaggactttgttttagaaagctgtttatagctttggacctttttagtgttaaatctgtaacattactacactgggtacctttgaaagaatctcaaatttcaaaagaaatagcatgattgaagatacatctctgttagaacattggtatcctttttgtgccattttattctgtttaatcagtgctgttttgatattgtttgctaattggcaggtagtcaagaaaatgcaagttgccaagagctctgatattttttaaaaagaatttttttgtaaagatcagacaacacactatcttttcaatgaaaaaagcaataatgatccatacatactataaggcacttttaacagattgtttatagagtgattttactagaaagaatttaataaactcgaagtttaggtttatgagtatataaacaaatgaggcacttcatctgaagaatgttggtgaaggcaagtctctgaaagcagaactatccagtgttatctaaaaattaatctgagcacatcaagattttttcattctcgtgacattaggaaatttaggataaatagttgacatatattttatatcctcttctgttgaatgcagtccaaacatgaaaggaaataattgttttatattataactctgaagcatgataaaggggcagttcacaattttcaccatttaaacacaaatttgctgcacagaatatcaccattgcagttcaaaacaaaacaaaacaaaaagtcttttgtttgtgaacactgatgcaagaaacttgttaaatgaaaggactctttaccctagaaggaagaggtgaaggatctggcttgtttttaaagctttatttattaaaccatattatttgattactgtgttagaatttcataagcaataattaaatgtgtctttatg

SEQ ID NO: 2637 - DNA, 2864 bp, Homo sapiens
gcccaaagaactcaaacaaatttacaagaaacaaacaaccccatcaacaagtggccgaagatatgaacagacacgtctcagaagaaggcatttatggagacaacagacacgcgaggtcaggaagaagccgcttataaattaccgcttccttcgcgccgccgccaacgccgagccccgaggaccgcaagcccagaggacaagctgcgccaagagggagtgcggacgttcacccagcgggtcagagagcgagcgggcaggcagcccccggccggcggaacccggcacagccgagcagagcgcgggcggcgccgcagccaccccagatccagaaccagaaccacagcccttctgaggagctcccaaacaaagcaaggagatggccaccaaggagaagctgcagtgtctgaaagatttccacaaggacatcctgaagccctcaccagggaagagcccaggcaagcggcctgaggacgaggctgagggaaaacctccgcagagggagaagtggtctagcaagatcgactttgtgctctctgtggctggcggcttcgtgggcttgggcaacgtctggcgcttcccgtacctctgctacaagaatggtggaggtgcgtttctcataccgtattttattttcctgtttgggagcggcctgcctgtgtttttcttggagatcatcataggccagtacacctctgaagggggcatcacctgctgggaaaagatctgccccttgttctctggtatcggctatgcctccgttgtaattgtgtccctcctgaatgtctactacatcgtcatcctggcctgggccacatactacctgttccagtccttccagaaggagctgccctgggcacactgcaaccacagctggaacacacctcactgcatggaggacaccatgcgcaagaacaagagtgtctggatcaccatcagctccaccaacttcacctcccctgtcatcgagttctgggagcgcaacgtgctgagcttgtcccctggaatcgaccacccaggctctctgaaatgggacctcgctctctgccttcttttagtctggctagtgtgtttcttctgcatctggaagggcgtcaggtccactgggaaggtcgtctacttcacagccacttttccattcgccatgctcctggtgctgctggtccgagggctgacgctgccgggcgcgggcgcaggcatcaagttctatctgtatcctgacatcacccgccttgaggacccacaggtgtggattgacgctgggactcagatattcttctcttatgccatctgcctgggggctatgacctcgctggggagctacaacaagtacaagtataactcgtacagggactgtatgctgctgggatgcctgaacagtggtaccagttttgtgtctggcttcgcaattttttccatcctgggcttcatggcacaagagcaaggggtggacattgctgatgtggctgagtcaggtcctggcctggccttcattgcctacccaaaagctgtgacaatgatgccgctgcccacattttggtccattcttttttttattatgcttctcttgcttggactggatagccagtttgttgaagttgaaggacagatcacatccttggttgatctttacccatccttcctaaggaagggttatcgtcgggaaatcttcatcgccttcgtgtgtagcatcagctacctgctggggctgacgatggtgacggagggtggcatgtatgtgtttcagctctttgactactatgcagctagcggtgtatgccttttgtgggttgcattctttgaatgttttgttattgcctggatatatggaggtgataacctttatgatggtattgaggacatgattggctatcggcccgggccctggatgaagtacagctgggctgtgatcactccagttctctgtgttggatgtttcatcttctcgctcgtcaagtacgtacccctgacctacaacaaaacatacgtgtaccccaactgggccattgggctgggctggagcctggccctttcctccatgctctgcgttcccttggtcatcgtcatccgcctctgccagactgaggggccgttccttgtgagagtcaagtacctgctgaccccaagggaacccaaccgctgggctgtggagcgcgagggagccacaccttacaactctcgcaccgtcatgaacggcgctctcgtgaaaccgacccacatcattgtggagaccatgatgtgagctctctcgggtcgacggggccaacggtttcctgctgtttactaacattagattctcataggaccaggtttacagagctttatatttgcactaggattttttttttttgtaattgtcacagaaaatgtaattgtgggtgtgtgtgcgtgcgtgtgtgtgtgtgtgtgtatcgtgtgtgtgtgttttgttttgatttgggggatattttgtacaaaaagaaaacccacgggaagatgtccgtggagaggcagagctttcatactgaattagatgtattttatgggaatttggtaaatttttctttgtattttttttttttacatataagtatatatacacttagagattgtcatatacttttaccacttgaattgatcttcttgccagcaatagatctcattttcaaaagcaattcttcggtctgtgtagctggcagaaagttctgtccagtaaacgcaggatggaattttcctgggactctacacccatcttaaggtggtataccttccaaatcctggttcagatggaagaaatagcaggagagaggacccattagctggcagacccagggggaagaaaggagggctgtgaggagatacctcattaaacttggcttagtgaagag

SEQ ID NO: 2638 - DNA, 1908 bp, Homo sapiens
gggacgtcagcggacggggcgctcgcgggccggggctgtatggggctcccgcgcgggtcgttcttctgggtgctgctcctgctcacggctgcctgctcggggctcctctttgccctgtacttctcggcggtgcagcggtacccggggccagcggccggagccagggacaccacatcatttgaagcattctttcaatccaaggcatcgaattcttggacaggaaagggccaggcctgccgacacctgcttcacctggccattcagcggcacccccacttccgtggcctgttcaatctctccattccagtgctgctgtggggggacctcttcaccccagcgctctgggaccgcctgagccaacacaaagccccgtatggctggcgggggctctctcaccaagtcatcgcctccaccctgagccttctgaacggctcagagagtgccaagctgtttgccccgcccagggacacccctccaaagtgtatccggtgtgccgtggtgggcaacggaggcattctgaatgggtcccgccagggtcccaacatcgatgcccatgactatgtattcagactcaatggagctgtgatcaaaggcttcgagcgcgatgtgggcaccaagacttccttctatggtttcactgtgaacacgatgaagaactccctcgtctcctactggaatctgggcttcacctccgtgccacaaggacaggacctgcagtatatcttcatcccctcagacatccgcgactatgtgatgctgagatcggccattctgggcgtgcctgtccctgagggcctagataaaggggacaggccgcacgcctattttggaccagaagcctctgccagtaaattcaagctgctacatccggacttcatcagctacctgacagaaaggttcttgaaatcaaagttgattaacacacattttggagacctatatatgcctagtaccggggctctcatgctgctgacagctttgcatacctgtgaccaggtcagtgcctatggattcatcacaagcaactactggaaattttccgaccactatttcgaacgaaaaatgaagccattgatattttatgcaaaccacgatctgtccctggaagctgccctgtggagggacctgcacaaggccggcatccttcagctgtaccagcgctgaccccaatgcactgagcgctttgcttcttcaagagttgcggccctgatcctctcaagtggccaaaagcttttttaacttttcaatcttcaccttcccttgccaacagagggcactggggtgaattcaagattttcatcgaggtctgttcaatataggacaccccagcttgtccttggctcatccaagaactcttctgtatctaaaacaatacatctcaatcttggccaagggaaaatggactgctttgctggattggcactgagcaactttaggaaatgtcggtggagtgttcagcaagatcagacagcagtccaggtcaaaggcaaacacacacgctccagcccaaatcctcctggtggcacatcctaccccagatgctaaagtgattcaaggactccaggacacctcttaagagcctttctaagaacatgataggcttacttctgctccataataaagtgggagaaaaaagccagaatataacttaagactagataactgcgtacatgatggaccattttttttttttttggctgggtagagaaatcatataaaacgcaggctgtttagcatggagatgactctcagaacactgggagggtctggcacttgatgggggttagttgcttggcagcctgcctgccactgagggaagtcccattagagatgtatcaccaccttgtcaccaacaggatgatgtcaccaacaggatgatgtcaccaggtaataaaccttcatcctcac

SEQ ID NO: 2639 - DNA, 3867 bp, Homo sapiens
acaggcccgcgacgctcccctcagctggcggcggccgcggagagatgccgcgggggccgctcgcagccgccgctgacttgtgaatgggaccgggactggggccgggactgacaccgcagcgcttgccctgcgccagggactggcggctcggaggttgcgtccaccctcaagggccccagaaatcactgtgttttcagctcagcggccctgtgacattccttcgtgttgtcatttgttgagtgaccaatcagatgggtggagtgtgttacagaaattggcagcaagtatccaatgggtgaagaagaagctaactggggacgtgggcagccctgacgtgatgagctcaaccagcagagacattccatcccaagagaggtctgcgtgacgcgtccgggaggccaccctcagcaagaccaccgtacagttggtggaaggggtgacagctgcattctcctgtgcctaccacgtaaccaaaaatgaaggagaactactgtttacaagccgccctggtgtgcctgggcatgctgtgccacagccatgcctttgccccagagcggcgggggcacctgcggccctccttccatgggcaccatgagaagggcaaggaggggcaggtgctacagcgctccaagcgtggctgggtctggaaccagttcttcgtgatagaggagtacaccgggcctgaccccgtgcttgtgggcaggcttcattcagatattgactctggtgatgggaacattaaatacattctctcaggggaaggagctggaaccatttttgtgattgatgacaaatcagggaacattcatgccaccaagacgttggatcgagaagagagagcccagtacacgttgatggctcaggcggtggacagggacaccaatcggccactggagccaccgtcggaattcattgtcaaggtccaggacattaatgacaaccctccggagttcctgcacgagacctatcatgccaacgtgcctgagaggtccaatgtgggaacgtcagtaatccaggtgacagcttcagatgcagatgaccccacttatggaaatagcgccaagttagtgtacagtatcctcgaaggacaaccctatttttcggtggaagcacagacaggtatcatcagaacagccctacccaacatggacagggaggccaaggaggagtaccacgtggtgatccaggccaaggacatgggtggacatatgggcggactctcagggacaaccaaagtgacgatcacactgaccgatgtcaatgacaacccaccaaagtttccgcagagcgtataccagatatctgtgtcagaagcagccgtccctggggaggaagtaggaagagtgaaagctaaagatccagacattggagaaaatggcttagtcacatacaatattgttgatggagatggtatggaatcgtttgaaatcacaacggactatgaaacacaggagggggtgataaagctgaaaaagcctgtagattttgaaaccaaaagagcctatagcttgaaggtagaggcagccaacgtgcacatcgacccgaagtttatcagcaatggccctttcaaggacactgtgaccgtcaagatcgcagtagaagatgctgatgagccccctatgttcttggccccaagttacatccacgaagtccaagaaaatgcagctgctggcaccgtggttgggagagtgcatgccaaagaccctgatgctgccaacagcccgataaggtattccatcgatcgtcacactgacctcgacagatttttcactattaatccagaggatggttttattaaaactacaaaacctctggatagagaggaaacagcctggctcaacatcactgtctttgcagcagaaatccacaatcggcatcaggaagccaaagtcccagtggccattagggtccttgatgtcaacgataatgctcccaagtttgctgccccttatgaaggtttcatctgtgagagtgatcagaccaagccactttccaaccagccaattgttacaattagtgcagatgacaaggatgacacggccaatggaccaagatttatcttcagcctaccccctgaaatcattcacaatccaaatttcacagtcagagacaaccgagataacacagcaggcgtgtacgcccggcgtggagggttcagtcggcagaagcaggacttgtaccttctgcccatagtgatcagcgatggcggcatcccgcccatgagtagcaccaacaccctcaccatcaaagtctgcgggtgcgacgtgaacggggcactgctctcctgcaacgcagaggcctacattctgaacgccggcctgagcacaggcgccctgatcgccatcctcgcctgcatcgtcattctcctgggttgcccaagcttaatggaacccccctctcccagggaagacatgagattgctttatctgggcttccagctgatgctattttcctatgttaaagtaaacagaagattttgtcttctgggggtctttataaaacttcctttcctctatgtggtggctacagagagtccaaccacacttacgtcattgtagtattgtttgtgaccctgagaaggcaaaagaaagaaccactcattgtctttgaggaagaagatgtccgtgagaacatcattacttatgatgatgaagggggtggggaagaagacacagaagcctttgatattgccaccctccagaatcctgatggtatcaatggatttatcccccgcaaagacatcaaacctgagtatcagtacatgcctagacctgggctccggccagcgcccaacagcgtggatgtcgatgacttcatcaacacgagaatacaggaggcagacaatgaccccacggctcctccttatgactccattcaaatctacggttatgaaggcaggggctcagtggccgggtccctgagctccctagagtcggccaccacagattcagacttggactatgattatctacagaactggggacctcgttttaagaaactagcagatttgtatggttccaaagacacttttgatgacgattcttaacaataacgatacaaatttggccttaagaactgtgtctggcgttctcaagaatctagaagatgtgtaaacaggtatttttttaaatcaaggaaaggctcatttaaaacaggcaaagttttacagagaggatacatttaataaaactgcgaggacatcaaagtggtaaatactgtgaaataccttttctcacaaaaaggcaaatattgaagttgtttatcaacttcgctagaaaaaaaaaacacttggcatacaaaatatttaagtgaaggagaagtctaacgctgaactgacaatgaagggaaattgtttatgtgttatgaacatccaagtctttcttcttttttaagttgtcaaagaagcttccacaaaattagaaaggacaacagttctgagctgtaatttcgccttaaactctggacactctatatgtagtgcatttttaaacttgaaatatataatattcagccagcttaaacccatacaatgtatgtacaatacaatgtacaattatgtctcttgagcatcaatcttgttactgctgattcttgtaaatctttttgcttctactttcatcttaaactaatacgtgccagatataactgtcttgtttcagtgagagacgccctatttctatgtcatttttaatgtatctatttgtacaattttaaagttcttattttagtatacatataaatatcagtattctgacatgtaagaaaatgttacggcatcacacttatattttatgaacattgtactgttgctttaatatgagcttcaatataagaagcaatctttgaaataaaaaaagattttttttt

SEQ ID NO: 2640 - DNA, 1687 bp, Homo sapiens
atggatggattttatgaccagcaagtgccttacatggtcaccaatagtcagcgtgggagaaattgtaacgagaaaccaacaaatgtcaggaaaagaaaattcattaacagagatctggctcatgattcagaagaactctttcaagatctaagtcaattacaggaaacatggcttgcagaagctcaggtacctgacaatgatgagcagtttgtaccagactatcaggctgaaagtttggcttttcatggcctgccactgaaaatcaagaaagaaccccacagtccatgttcagaaatcagctctgcctgcagtcaagaacagccctttaaattcagctatggagaaaagtccctgtacaatgtcagtgcctatgatcagaacccacaagtgggaatgaggccctccaacccccccacaccatccagcacgccagtgtccccactgcatcatgcatctccaaactcaactcatacaccgaaacctgaccgggccttcccagctcacctccctccatcgcagtccataccagatagcagctaccccatggaccacagatttcgccgccagctttctgaaccctgtaactcctttcctcctttgccgacgatgccaagggaaggacgtcctatgtaccaacgccagatgtctgagccaaacatccccttcccaccacaaggctttaagcaggagtaccacgacccagtgtatgaacacaacaccatggttggcagtgcggccagccaaagctttccccctcctctgatgattaaacaggaacccagagattttgcatatgactcagaagtgcctagctgccactccatttatatgaggcaagaaggcttcctggctcatcccagcagaacagaaggctgtatgtttgaaaagggccccaggcagttttatgatgacacctgtgttgtcccagaaaaattcgatggagacatcaaacaagagccaggaatgtatcgggaaggacccacataccaacggcgaggatcacttcagctctggcagtttttggtagctcttctggatgacccttcaaattctcattttattgcctggactggtcgaggcatggaatttaaactgattgagcctgaagaggtggcccgacgttggggcattcagaaaaacaggccagctatgaactatgataaacttagccgttcactccgctattactatgagaaaggaattatgcaaaaggtggctggagagagatatgtctacaagtttgtgtgtgatccagaagcccttttctccatggcctttccagataatcagcgtccactgctgaagacagacatggaacgtcacatcaacgaggaggacacagtgcctctttctcactttgatgagagcatggcctacatgccggaagggggctgctgcaacccccacccctacaacgaaggctacgtgtattaacacaagtgacagtcaagcagggcgttttttgcgcttttccttttttctgcaagatacagagaattgctgaatctttgttttatttctgttgttgatatttatttttaaataataatacacaaaaaggggcttttcctgttgcattattctatggtctgccatggactgtgcactttatttgagggtgggtgggagtaatctaaacatttattctgtgtaacaggaagctaatgggtgaatgggcagagggatt

SEQ ID NO: 2641 - DNA, 970 bp, Homo sapiens
cggacagatctctgggtggctggcggtcatggcgctactagatgtatgcggagccccccgagggcagcggccggaatcggctctcccggttgcgggaagcgggcgtcgctcggaccgtcctgactacagtttctctatgcgatctccagagctcgctttaccccggggaatgaagcccacagaattcttccagtccctgggtggggacggagaaaggaacgttcagattgagatggcccatggcaccaccacgctcgccttcaagttccagcatggagtgattgcagcagtggattctcgggcctcagctgggtcctacattagtgccttacgggtgaacaaggtgattgagattaacccttacctgcttggcaccatgtctggctgtgcagcagactgtcagtactgggagcgcctgctggccaaggaatgcaggctgtactatctgcgaaatggagaacgtatttcagtgtcggcagcctccaagctgctgtccaacatgatgtgccagtaccggggcatgggcctctctatgggcagtatgatctgtggctgggataagaagggtcctggactctactacgtggatgaacatgggactcggctctcaggaaatatgttctccacgggtagtgggaacacttatgcctacggggtcatggacagtggctatcggcctaatcttagccctgaagaggcctatgaccttggccgcagggctattgcttatgccactcacagagacagctattctggaggcgttgtcaatatgtaccacatgaaggaagatggttgggtgaaagtagaaagtacagatgtcagtgacctgctgcaccagtaccgggaagccaatcaataatggtggtggtggcagctgggcaggtctcctctgggaggtcttggccgactcagggacctaagccacgttaagtccaaggagaagaagaggcctagcctgagccaaagagag

SEQ ID NO: 2642 - DNA, 970 bp, Homo sapiens
cggacagatctctgggtggctggcggtcatggcgctactagatgtatgcagagccccccgagggcagcggccggaatcggctctcccggttgcgggaagcgggcgtcgctcggaccgtcctgactacagtttctctatgcgatctccagagctcgctttaccccggggaatgcagcccacagaattcttccagtccctgggtggggacggagaaaggaacgttcagattgagatggcccatggcaccaccacgctcgccttcaagttccagcatggagtgattgcagcagtggattctcgggcctcagctgggtcctacattagtgccttacgggtgaacaaggtgattgagattaacccttacctgcttggcaccatgtctggctgtgcagcagactgtcagtactgggagcgcctgctggccaaggaatgcaggctgtactatctgcgaaatggagaacgtatttcagtgtcggcagcctccaagctgctgtccaacatgatgtgccagtaccggggcatgggcctctctatgggcagtatgatctgtggctgggataagaagggtcctggactctactacgtggatgaacatgggactcggctctcaggaaatatgttctccacgggtagtgggaacacttatgcctacggggtcatggacagtggctatcggcctaatcttagccctgaagaggcctatgaccttggccgcagggctattgcttatgccactcacagagacagctattctggaggcgttgtcaatatgtaccacatgaaggaagatggttgggtgaaagtagaaagtacagatgtcagtgacctgctgcaccagtaccgggaagccaatcaataatggtggtggtggcagctgggcaggtctcctctgggaggtcttggccgactcagggacctaagccacgttaagtccaaggagaagaagaggcctagcctgagccaaagagag

SEQ ID NO: 2643 - DNA, 11185 bp, Homo sapiens
gctgccccgagcctttctggggaagaactccaggcgtgcggacgcaacagccgagaacattaggtgttgtggacaggagctgggaccaagatcttcggccagccccgcatcctcccgcatcttccagcaccgtcccgcaccctccgcatccttccccgggccaccacgcttcctatgtgacccgcctgggcaacgccgaacccagtcgcgcagcgctgcagtgaattttccccccaaactgcaataagccgccttccaaggccaagatgttcataaatataaagagcatcttatggatgtgttcaaccttaatagtaacccatgcgctacataaagtcaaagtgggaaaaagcccaccggtgaggggctccctctctggaaaagtcagcctaccttgtcatttttcaacgatgcctactttgccacccagttacaacaccagtgaatttctccgcatcaaatggtctaagattgaagtggacaaaaatggaaaagatttgaaagagactactgtccttgtggcccaaaatggaaatatcaagattggtcaggactacaaagggagagtgtctgtgcccacacatcccgaggctgtgggcgatgcctccctcactgtggtcaagctgctggcaagtgatgcgggtctttaccgctgtgacgtcatgtacgggattgaagacacacaagacacggtgtcactgactgtggatggggttgtgtttcactacagggcggcaaccagcaggtacacactgaattttgaggctgctcagaaggcttgtttggacgttggggcagtcatagcaactccagagcagctctttgctgcctatgaagatggatttgagcagtgtgacgcaggctggctggctgatcagactgtcagatatcccatccgggctcccagagtaggctgttatggagataagatgggaaaggcaggagtcaggacttatggattccgttctccccaggaaacttacgatgtgtattgttatgtggatcatctggatggtgatgtgttccacctcactgtccccagtaaattcaccttcgaggaggctgcaaaagagtgtgaaaaccaggatgccaggctggcaacagtgggggaactccaggcggcatggaggaacggctttgaccagtgcgattacgggtggctgtcggatgccagcgtgcgccaccctgtgactgtggccagggcccagtgtggaggtggtctacttggggtgagaaccctgtatcgttttgagaaccagacaggcttccctccccctgatagcagatttgatgcctactgctttaaacctaaagaggctacaaccatcgatttgagtatcctcgcagaaactgcatcacccagtttatccaaagaaccacaaatggtttctgatagaactacaccaatcatccctttagttgatgaattacctgtcattccaacagagttccctcccgtgggaaatattgtcagttttgaacagaaagccacagtccaacctcaggctatcacagatagtttagccaccaaattacccacacctactggcagtaccaagaagccctgggatatggatgactactcaccttctgcttcaggacctcttggaaagctagacatatcagaaattaaggaagaagtgctccagagtacaactggcgtctctcattatgctacggattcatgggatggtgtcgtggaagataaacaaacacaagaatcggttacacagattgaacaaatagaagtgggtcctttggtaacatctatggaaatcttaaagcacattccttccaaggaattccctgtaactgaaacaccattggtaactgcaagaatgatcctggaatccaaaactgaaaagaaaatggtaagcactgtttctgaattggtaaccacaggtcactatggattcaccttgggagaagaggatgatgaagacagaacacttacagttggatctgatgagagcaccttgatctttgaccaaattcctgaagtcattacggtgtcaaagacttcagaagacaccatccacactcatttagaagacttggagtcagtctcagcatccacaactgtttcccctttaattatgcctgataataatggatcatccatggatgactgggaagagagacaaactagtggtaggataacggaagagtttcttggcaaatatctgtctactacaccttttccatcacagcatcgtacagaaatagaattgtttccttattctggtgataaaatattagtagagggaatttccacagttatttatccttctctacaaacagaaatgacacatagaagagaaagaacagaaacactaataccagagatgagaacagatacttatacagatgaaatacaagaagagatcactaaaagtccatttatgggaaaaacagaagaagaagtcttctctgggatgaaactctctacatctctctcagagccaattcatgttacagagtcttctgtggaaatgaccaagtcttttgatttcccaacattgataacaaagttaagtgcagagccaacagaagtaagagatatggaggaagactttacagcaactccaggtactacaaaatatgatgaaaatattacaacagtgcttttggcccatggtactttaagtgttgaagcagccactgtatcaaaatggtcatgggatgaagataatacaacatccaagcctttagagtctacagaaccttcagcctcttcaaaattgccccctgccttactcacaactgtggggatgaatggaaaggataaagacatcccaagtttcactgaagatggagcagatgaatttactcttattccagatagtactcaaaagcagttagaggaggttactgatgaagacatagcagcccatggaaaattcacaattagatttcagccaactacatcaactggtattgcagaaaagtcaactttgagagattctacaactgaagaaaaagttccacctatcacaagcactgaaggccaagtttatgcaaccatggaaggaagtgctttgggtgaagtagaagatgtggacctctctaagccagtatctactgttccccaatttgcacacacttcagaggtggaaggattagcatttgttagttatagtagcacccaagagcctactacttatgtagactcttcccataccattcctctttctgtaattcccaagacagactggggagtgttagtaccttctgttccatcagaagatgaagttctaggtgaaccctctcaagacatacttgtcattgatcagactcgccttgaagcgactatttctccagaaactatgagaacaacaaaaatcacagagggaacaactcaggaagaattcccttggaaagaacagactgcagagaaaccagttcctgctctcagttctacagcttggactcccaaggaggcagtaacaccactggatgaacaagagggcgatggatcagcatatacagtctctgaagatgaattgttgacaggttctgagagggtcccagttttagaaacaactccagttggaaaaattgatcacagtgtgtcttatccaccaggtgctgtaactgagcacaaagtgaaaacagatgaagtggtaacactaacaccacgcattgggccaaaagtatctttaagtccagggcctgaacaaaaatatgaaacagaaggtagtagtacaacaggatttacatcatctttgagtccttttagtacccacattacccagcttatggaagaaaccactactgagaaaacatccctagaggatattgatttaggctcaggattatttgaaaagcccaaagccacagaactcatagaattttcaacaatcaaagtcacagttccaagtgatattaccactgccttcagttcagtagacagacttcacacaacttcagcattcaagccatcttccgcgatcactaagaaaccacctctcatcgacagggaacctggtgaagaaacaaccagtgacatggtaatcattggagaatcaacatctcatgttcctcccactacccttgaagatattgtagccaaggaaacagaaaccgatattgatagagagtatttcacgacttcaagtcctcctgctacacagccaacaagaccacccactgtggaagacaaagaggcctttggacctcaggcgctttctacgccacagcccccagcaagcacaaaatttcaccctgacattaatgtttatattattgaggtcagagaaaataagacaggtcgaatgagtgatttgagtgtaattggtcatccaatagattcagaatctaaagaagatgaaccttgtagtgaagaaacagatccagtgcatgatctaatggctgaaattttacctgaattccctgacataattgaaatagacctataccacagtgaagaaaatgaagaagaagaagaagagtgtgcaaatgctactgatgtgacaaccaccccatctgtgcagtacataaatgggaagcatctcgttaccactgtgcccaaggacccagaagctgcagaagctaggcgtggccagtttgaaagtgttgcaccttctcagaatttctcggacagctctgaaagtgatactcatccatttgtaatagccaaaacggaattgtctactgctgtgcaacctaatgaatctacagaaacaactgagtctcttgaagttacatggaagcctgagacttaccctgaaacatcagaacatttttcaggtggtgagcctgatgttttccccacagtcccattccatgaggaatttgaaagtggaacagccaaaaaaggggcagaatcagtcacagagagagatactgaagttggtcatcaggcacatgaacatactgaacctgtatctctgtttcctgaagagtcttcaggagagattgccattgaccaagaatctcagaaaatagcctttgcaagggctacagaagtaacatttggtgaagaggtagaaaaaagtacttctgtcacatacactcccactatagttccaagttctgcatcagcatatgtttcagaggaagaagcagttaccctaataggaaatccttggccagatgacctgttgtctaccaaagaaagctgggtagaagcaactcctagacaagttgtagagctctcagggagttcttcgattccaattacagaaggctctggagaagcagaagaagatgaagatacaatgttcaccatggtaactgatttatcacagagaaatactactgatacactcattactttagacactagcaggataatcacagaaagcttttttgaggttcctgcaaccaccatttatccagtttctgaacaaccttctgcaaaagtggtgcctaccaagtttgtaagtgaaacagacacttctgagtggatttccagtaccactgttgaggaaaagaaaaggaaggaggaggagggaactacaggtacggcttctacatttgaggtatattcatctacacagagatcggatcaattaattttaccctttgaattagaaagtccaaatgtagctacatctagtgattcaggtaccaggaaaagttttatgtccttgacaacaccaacacagtctgaaagggaaatgacagattctactcctgtctttacagaaacaaatacattagaaaatttgggggcacagaccactgagcacagcagtatccatcaacctggggttcaggaagggctgaccactctcccacgtagtcctgcctctgtctttatggagcagggctctggagaagctgctgccgacccagaaaccaccactgtttcttcattttcattaaacgtagagtatgcaattcaagccgaaaaggaagtagctggcactttgtctccgcatgtggaaactacattctccactgagccaacaggactggttttgagtacagtaatggacagagtagttgctgaaaatataacccaaacatccagggaaatagtgatttcagagcgattaggagaaccaaattatggggcagaaataaggggcttttccacaggttttcctttggaggaagatttcagtggtgactttagagaatactcaacagtgtctcatcccatagcaaaagaagaaacggtaatgatggaaggctctggagatgcagcatttagggacacccagacttcaccatctacagtacctacttcagttcacatcagtcacatatctgactcagaaggacccagtagcaccatggtcagcacttcagccttcccctgggaagagtttacatcctcagctgagggctcaggtgagcaactggtcacagtcagcagctctgttgttccagtgcttcccagtgctgtgcaaaagttttctggtacagcttcctccattatcgacgaaggattgggagaagtgggtactgtcaatgaaattgatagaagatccaccattttaccaacagcagaagtggaaggtacgaaagctccagtagagaaggaggaagtaaaggtcagtggcacagtttcaacaaactttccccaaactatagagccagccaaattatggtctaggcaagaagtcaaccctgtaagacaagaaattgaaagtgaaacaacatcagaggaacaaattcaagaagaaaagtcatttgaatcccctcaaaactctcctgcaacagaacaaacaatctttgattcacagacatttactgaaactgaactcaaaaccacagattattctgtactaacaacaaagaaaacttacagtgatgataaagaaatgaaggaggaagacacttctttagttaacatgtctactccagatccagatgcaaatggcttggaatcttacacaactctccctgaagctactgaaaagtcacattttttcttagctactgcattagtaactgaatctataccagctgaacatgtagtcacagattcaccaatcaaaaaggaagaaagtacaaaacattttccgaaaggcatgagaccaacaattcaagagtcagatactgagctcttattctctggactgggatcaggagaagaagttttacctactctaccaacagagtcagtgaattttactgaagtggaacaaatcaataacacattatatccccacacttctcaagtggaaagtacctcaagtgacaaaattgaagactttaacagaatggaaaatgtggcaaaagaagttggaccactcgtatctcaaacagacatctttgaaggtagtgggtcagtaaccagcacaacattaatagaaattttaagtgacactggagcagaaggacccacggtggcacctctccctttctccacggacatcggacatcctcaaaatcagactgtcaggtgggcagaagaaatccagactagtagaccacaaaccataactgaacaagactctaacaagaattcttcaacagcagaaattaacgaaacaacaacctcatctactgattttctggctagagcttatggttttgaaatggccaaagaatttgttacatcagcaccaaaaccatctgacttgtattatgaaccttctggagaaggatctggagaagtggatattgttgattcatttcacacttctgcaactactcaggcaaccagacaagaaagcagcaccacatttgtttctgatgggtccctggaaaaacatcctgaggtgccaagcgctaaagctgttactgctgatggattcccaacagtttcagtgatgctgcctcttcattcagagcagaacaaaagctcccctgatccaactagcacactgtcaaatacagtgtcatatgagaggtccacagacggtagtttccaagaccgtttcagggaattcgaggattccaccttaaaacctaacagaaaaaaacccactgaaaatattatcatagacctggacaaagaggacaaggatttaatattgacaattacagagagtaccatccttgaaattctacctgagctgacatcggataaaaatactatcatagatattgatcatactaaacctgtgtatgaagacattcttggaatgcaaacagatatagatacagaggtaccatcagaaccacatgacagtaatgatgaaagtaatgatgacagcactcaagttcaagagatctatgaggcagctgtcaacctttctttaactgaggaaacatttgagggctctgctgatgttctggctagctacactcaggcaacacatgatgaatcaatgacttatgaagatagaagccaactagatcacatgggctttcacttcacaactgggatccctgctcctagcacagaaacagaattagacgttttacttcccacggcaacatccctgccaattcctcgtaagtctgccacagttattccagagattgaaggaataaaagctgaagcaaaagccctggatgacatgtttgaatcaagcactttgtctgatggtcaagctattgcagaccaaagtgaaataataccaacattgggccaatttgaaaggactcaggaggagtatgaagacaaaaaacatgctggtccttcttttcagccagaattctcttcaggagctgaggaggcattagtagaccatactccctatctaagtattgctactacccaccttatggatcagagtgtaacagaggtgcctgatgtgatggaaggatccaatcccccatattacactgatacaacattagcagtttcaacatttgcgaagttgtcttctcagacaccatcatctcccctcactatctactcaggcagtgaagcctctggacacacagagatcccccagcccagtgctctgccaggaatagacgtcggctcatctgtaatgtccccacaggattcttttaaggaaattcatgtaaatattgaagcaactttcaaaccatcaagtgaggaataccttcacataactgagcctccctctttatctcctgacacaaaattagaaccttcagaagatgatggtaaacctgagttattagaagaaatggaagcttctcccacagaacttattgctgtggaaggaactgagattctccaagatttccaaaacaaaaccgatggtcaagtttctggagaagcaatcaagatgtttcccaccattaaaacacctgaggctggaactgttattacaactgccgatgaaattgaattagaaggtgctacacagtggccacactctacttctgcttctgccacctatggggtcgaggcaggtgtggtgccttggctaagtccacagacttctgagaggcccacgctttcttcttctccagaaataaaccctgaaactcaagcagctttaatcagagggcaggattccacgatagcagcatcagaacagcaagtggcagcgagaattcttgattccaatgatcaggcaacagtaaaccctgtggaatttaatactgaggttgcaacaccaccattttcccttctggagacttctaatgaaacagatttcctgattggcattaatgaagagtcagtggaaggcacggcaatctatttaccaggacctgatcgctgcaaaatgaacccgtgccttaacggaggcacctgttatcctactgaaacttcctacgtatgcacctgtgtgccaggatacagcggagaccagtgtgaacttgattttgatgaatgtcactctaatccctgtcgtaatggagccacttgtgttgatggttttaacacattcaggtgcctctgccttccaagttatgttggtgcactttgtgagcaagataccgagacatgtgactatggctggcacaaattccaagggcagtgctacaaatactttgcccatcgacgcacatgggatgcagctgaacgggaatgccgtctgcagggtgcccatctcacaagcatcctgtctcacgaagaacaaatgtttgttaatcgtgtgggccatgattatcagtggataggcctcaatgacaagatgtttgagcatgacttccgttggactgatggcagcacactgcaatacgagaattggagacccaaccagccagacagcttcttttctgctggagaagactgtgttgtaatcatttggcatgagaatggccagtggaatgatgttccctgcaattaccatctcacctatacgtgcaagaaaggaacagttgcttgcggccagccccctgttgtagaaaatgccaagacctttggaaagatgaaacctcgttatgaaatcaactccctgattagataccactgcaaagatggtttcattcaacgtcaccttccaactatccggtgcttaggaaatggaagatgggctatacctaaaattacctgcatgaacccatctgcataccaaaggacttattctatgaaatactttaaaaattcctcatcagcaaaggacaattcaataaatacatccaaacatgatcatcgttggagccggaggtggcaggagtcgaggcgctgatccctaaaatggcgaacatgtgttttcatcatttcagccaaagtcctaacttcctgtgcctttcctatcacctcgagaagtaattatcagttggtttggatttttggaccaccgttcagtcattttgggttgccgtgctcccaaaacattttaaatgaaagtattggcattcaaaaagacagcagacaaaatgaaagaaaatgagagcagaaagtaagcatttccagcctatctaatttctttagttttctatttgcctccagtgcagtccatttcctaatgtataccagcctactgtactatttaaaatgctcaatttcagcaccgatggccatgtaaataagatgatttaatgttgattttaatcctgtatataaaataaaaagtcacaatgagtttgggcatatttaatgatgattatggagccttagaggtctttaatcattggttcggctgcttttatgtagtttaggctggaaatggtttcacttgctctttgactgtcagcaagactgaagatggcttttcctggacagctagaaaacacaaaatcttgtaggtcattgcacctatctcagccataggtgcagtttgcttctacatgatgctaaaggctgcgaatgggatcctgatggaactaaggactccaatgtcgaactcttctttgctgcattcctttttcttcacttacaagaaaggcctgaatggaggacttttctgtaaccagg

SEQ ID NO: 2644 - DNA, 1486 bp, Homo sapiens
ctcaaaatcgggcgttgggctttgccgggtgcttcagatcaatggatgagttccacccgttcatcgaggcactgctgcctcacgtccgcgctttctcctacacctggttcaacctgcaggcgcggaagcgcaagtacttcaagaagcatgaaaagcggatgtcgaaggacgaggagcgggcggtgaaggacgagctgctgggcgagaagcccgagatcaagcagaagtgggcatcccggctgctggccaagctgcgcaaggacatccggcccgagttccgcgaggacttcgtgctgaccatcacgggcaagaagcccccctgctgcgtgctctccaaccccgaccagaagggcaagatccggcggattgactgcctgcgccaggctgacaaggtgtggcggctggacctggtcatggtgattttgtttaaggggatccccctggaaagtactgatggggagcggctctacaagtcgcctcagtgctcgaaccccggcctgtgcgtccagccacatcacattggagtcacaatcaaagaactggatctttatctggcttactttgtccacactccggaatccggacaatcagatagttcaaaccagcaaggagatgcggacatcaaaccactgcccaacgggcacttaagtttccaggactgttttgtgacttccggggtctggaatgtgacggagctggtgagagtatcacagactcctgttgcaacagcatcagggcccaacttctccctggcggacctggagagtcccagctactacaacatcaaccaggtgaccctggggcggcggtccatcacctcccctccttccaccagcaccaccaagcgccccaagtccatcgatgacagtgagatggagagccctgttgatgacgtgttctatcccgggacaggccgttccccagcagctggcagcagccagtccagcgggtggcccaacgatgtggatgcaggcccggcttctctaaagaagtcaggaaagctggacttctgcagtgccctctcctctcagggcagctccccgcgcatggctttcacccaccacccgctgcctgtgcttgctggagtcagaccagggagcccccgggccacagcatcagccctgcacttcccctccacgtccatcatccagcagtcgagcccgtatttcacgcacccgaccatccgctaccaccaccaccacgggcaggactcactgaaggagtttgtgcagtttgtgtgctcggatggctcgggccaggccaccggacagcattcgcaacgacaggcgcctcctctgccaaccggtttgtcagcatcggaccccgggacggcaactttctgaacatcccacagcagtctcagtcctggttcctctgataagatcgacaaaagaaacaacaaaatgagaagaagaggttcctcgaaaggggggagaagaattttgagaatggaaaaatcccccagcccagcccagccccaccgaaa

SEQ ID NO: 2645 - DNA, 1357 bp, Homo sapiens
tggttttataaggggctgcctccaccacgtcgctcttctttctgctctcatctcgtcttcccctcctcccgtcctcctcgccccgcatgctcccggcttgccgcctgcaggatgagttccacccgttcatcgaggcactgctgcctcacgtccgcgctttctcctacacctggttcaacctgcaggcgcggaagcgcaagtacttcaagaagcatgaaaagcggatgtcgaaggacgaggagcgggcggtgaaggacgagctgctgggcgagaagcccgagatcaagcagaagtgggcatcccggctgctggccaagctgcgcaaggacatccggcccgagttccgcgaggacttcgtgctgaccatcacgggcaagaagcccccctgctgcgtgctctccaaccccgaccagaagggcaagatccggcggattgactgcctgcgccaggctgacaaggtgtggcggctggacctggtcatggtgattttgtttaaggggatccccctggaaagtactgatggggagcggctctacaagtcgcctcagtgctcgaaccccggcctgtgcgtccagccacatcacattggagtcacaatcaaagaactggatctttatctggcttactttgtccacactccggaatccggacaatcagatagttcaaaccagcaaggagatgcggacatcaaaccactgcccaacgggcacttaagtttccaggactgttttgtgacttccggggtctggaatgtgacggagctggtgagagtatcacagactcctgttgcaacagcatcagggcccaacttctccctggcggacctggagagtcccagctactacaacatcaaccaggtgaccctggggcggcggtccatcacctcccctccttccaccagcaccaccaagcgccccaagtccatcgatgacagtgagatggagagccctgttgatgacgtgttctatcccgggacaggccgttccccagcagctggcagcagccagtccagcgggtggcccaacgatgtggatgcaggcccggcttctctaaagaagtcaggaaagctggacttctgcagtgccctctcctctcagggcagctccccgcgcatggctttcacccaccacccgctgcctgtgcttgctggagtcagaccagggagcccccgggccacagcatcagccctgcacttcccctccacgtccatcatccagcagtcgagcccgtatttcacgcacccgaccatccgctaccaccaccaccacgggcaggactcactgaaggagtttgtgcagtttgtgtgctcggatggctcgggccaggccaccggacagcattcgcaacgacaggcgcc

SEQ ID NO: 2646 - DNA, 3949 bp, Homo sapiens
gcggtggcgcgggagcggccccggggaccccgcgctgctgacggcggcgaccgcggccggaggcgggcgcgggtctcggaggcggtcgcctcagcaccgccccacgggcggccccagcccctcccgcagccctcctccctcccgctcccttcccgccgcctcctccccgccctcctccctcctcgctcgcgggccgggcccggcatggtgcggcgtcgccgccgatggcgctgaggcggagcatggggcggccggggctcccgccgctgccgctgccgccgccaccgcggctcgggctgctgctggcggctctggcttctctgctgctcccggagtccgccgccgcaggtctgaagctcatgggagccccggtgaagctgacagtgtctcaggggcagccggtgaagctcaactgcagtgtggaggggatggaggagcctgacatccagtgggtgaaggatggggctgtggtccagaacttggaccagttgtacatcccagtcagcgagcagcactggatcggcttcctcagcctgaagtcagtggagcgctctgacgccggccggtactggtgccaggtggaggatgggggtgaaaccgagatctcccagccagtgtggctcacggtagaaggtgtgccatttttcacagtggagccaaaagatctggcagtgccacccaatgcccctttccaactgtcttgtgaggctgtgggtccccctgaacctgttaccattgtctggtggagaggaactacgaagatcgggggacccgctccctctccatctgttttaaatgtaacaggggtgacccagagcaccatgttttcctgtgaagctcacaacctaaaaggcctggcctcttctcgcacagccactgttcaccttcaagcactgcctgcagcccccttcaacatcaccgtgacaaagctttccagcagcaacgctagtgtggcctggatgccaggtgctgatggccgagctctgctacagtcctgtacagttcaggtgacacaggccccaggaggctgggaagtcctggctgttgtggtccctgtgcccccctttacctgcctgctccgggacctggtgcctgccaccaactacagcctcagggtgcgctgtgccaatgccttggggccctctccctatgctgactgggtgccctttcagaccaagggtctagccccagccagcgctccccaaaacctccatgccatccgcacagattcaggcctcatcttggagtgggaagaagtgatccccgaggcccctttggaaggccccctgggaccctacaaactgtcctgggttcaagacaatggaacccaggatgagctgacagtggaggggaccagggccaatttgacaggctgggatccccaaaaggacctgatcgtacgtgtgtgcgtctccaatgcagttggctgtggaccctggagtcagccactggtggtctcttctcatgaccgtgcaggccagcagggccctcctcacagccgcacatcctgggtacctgtggtccttggtgtgctaacggccctggtgacggctgctgccctggccctcatcctgcttcgaaagagacggaaagagacgcggtttgggcaagcctttgacagtgtcatggcccggggagagccagccgttcacttccgggcagcccggtccttcaatcgagaaaggcccgagcgcatcgaggccacattggacagcttgggcatcagcgatgaactaaaggaaaaactggaggatgtgctcatcccagagcagcagttcaccctgggccggatgttgggcaaaggagagtttggttcagtgcgggaggcccagctgaagcaagaggatggctcctttgtgaaagtggctgtgaagatgctgaaagctgacatcattgcctcaagcgacattgaagagttcctcagggaagcagcttgcatgaaggagtttgaccatccacacgtggccaaacttgttggggtaagcctccggagcagggctaaaggccgtctccccatccccatggtcatcttgcccttcatgaagcatggggacctgcatgccttcctgctcgcctcccggattggggagaacccctttaacctacccctccagaccctgatccggttcatggtggacattgcctgcggcatggagtacctgagctctcggaacttcatccaccgagacctggctgctcggaattgcatgctggcagaggacatgacagtgtgtgtggctgacttcggactctcccggaagatctacagtggggactactatcgtcaaggctgtgcctccaaactgcctgtcaagtggctggccctggagagcctggccgacaacctgtatactgtgcagagtgacgtgtgggcgttcggggtgaccatgtgggagatcatgacacgtgggcagacgccatatgctggcatcgaaaacgctgagatttacaactacctcattggcgggaaccgcctgaaacagcctccggagtgtatggaggacgtgtatgatctcatgtaccagtgctggagtgctgaccccaagcagcgcccgagctttacttgtctgcgaatggaactggagaacatcttgggccagctgtctgtgctatctgccagccaggaccccttatacatcaacatcgagagagctgaggagcccactgcgggaggcagcctggagctacctggcagggatcagccctacagtggggctggggatggcagtggcatgggggcagtgggtggcactcccagtgactgtcggtacatactcacccccggagggctggctgagcagccagggcaggcagagcaccagccagagagtcccctcaatgagacacagaggcttttgctgctgcagcaagggctactgccacacagtagctgttagcccacaggcagagggcatcggggccatttggccggctctggtggccactgagctggctgactaagccccgtctgaccccagcccagacagcaaggtgtggaggctcctgtggtagtcctcccaagctgtgctgggaagcccggactgaccaaatcacccaatcccagttcttcctgcaaccactctgtggccagcctggcatcagtttaggccttggcttgatggaagtgggccagtcctggttgtctgaacccaggcagctggcaggagtggggtggttatgtttccatggttaccatgggtgtggatggcagtgtggggagggcaggtccagctctgtgggccctaccctcctgctgagctgcccctgctgcttaagtgcatgcattgagctgcctccagcctggtggcccagctattaccacacttggggtttaaatatccaggtgtgcccctccaagtcacaaagagatgtccttgtaatattcccttttaggtgagggttggtaaggggttggtatctcaggtctgaatcttcaccatctttctgattccgcaccctgcctacgccaggagaagttgaggggagcatgcttccctgcagctgaccgggtcacacaaaggcatgctggagtacccagcctatcaggtgcccctcttccaaaggcagcgtgccgagccagcaagaggaaggggtgctgtgaggcttgcccaggagcaagtgaggccggagaggagttcaggaacccttctccatacccacaatctgagcacgctaccaaatctcaaaatatcctaagactaacaaaggcagctgtgtctgagcccaacccttctaaacggtgacctttagtgccaacttcccctctaactggacagcctcttctgtcccaagtctccagagagaaatcaggcctgatgagggggaattcctggaacctggaccccagccttggtgggggagcctctggaatgcatggggcgggtcctagctgttagggacatttccaagctgttagttgctgtttaaaatagaaataaaattgaagact

SEQ ID NO: 2647 - DNA, 3613 bp, Homo sapiens
cagcccctctggcaggctcccgccagcgtcgctgcggctccggcccgggagcgagcgcccggagctcggaaagatgcggcgcccgcggcggcctgggggtctcgggggatccgggggtctccggctgctcctctgcctcctgctgctgagcagccgcccggggggctgcagcgccgttagtgcccacggctgtctatttgaccgcaggctctgctctcacctggaagtctgtattcaggatggcttgtttgggcagtgccaggtgggagtggggcaggcccggccccttttgcaagtcacctccccagttctccaacgcttacaaggtgtgctccgacaactcatgtcccaaggattgtcctggcacgatgacctcacccagtatgtgatctctcaggagatggagcgcatccccaggcttcgccccccagagccccgtccaagggacaggtctggcttggcacccaagagacctggtcctgctggagagctgcttttacaggacatccccactggctccgcccctgctgcccagcatcggcttccacaaccaccagtgggcaaaggtggagctggggccagctcctctctgtcccctctgcaggctgagctgctcccgcctctcttggagcacctgctgctgcccccacagcctccccacccttcactgagttacgaacctgccttgctgcagccctacctgttccaccagtttggctcccgtgatggctccagggtctcagagggctccccagggatggtcagtgtcggccccctgcccaaggctgaagcccctgccctcttcagcagaactgcctccaagggcatatttggggaccaccctggccactcctacggggaccttccagggccttcacctgcccagctttttcaagactctgggctgctctatctggcccaggagttgccagcacccagcagggccagggtgccaaggctgccagagcaagggagcagcagccgggcagaggactccccagagggctatgagaaggaaggactaggggatcgtggagagaagcctgcttccccagctgtgcagccagatgcggctctgcagaggctggccgctgtgctggcgggctatggggtagagctgcgtcagctgacccctgagcagctctccacactcctgaccctgctgcagctactgcccaagggtgcaggaagaaatccgggaggggttgtaaatgttggagctgatatcaagaaaacaatggaggggccggtggagggcagagacacagcagagcttccagcccgcacatcccccatgcctggacaccccactgccagccctacctccagtgaagtccagcaggtgccaagccctgtctcctctgagcctcccaaagctgccagaccccctgtgacacctgtcctgctagagaagaaaagcccactgggccagagccagcccacggtggcaggacagccctcagcccgcccagcagcagaggaatatggctacatcgtcactgatcagaagcccctgagcctggctgcaggagtgaagctgctggagatcctggctgagcatgtgcacatgtcctcaggcagcttcatcaacatcagtgtggtgggaccagccctcaccttccgcatccggcacaatgagcagaacctgtctttggctgatgtgacccaacaagcagggctggtgaagtctgaactggaagcacagacagggctccaaatcttgcagacaggagtgggacagagggaggaggcagctgcagtccttccccaaactgcgcacagcacctcacccatgcgctcagtgctgctcactctggtggccctggcaggtgtggctgggctgctggtggctctggctgtggctctgtgtgtgcggcagcatgcgcggcagcaagacaaggagcgcctggcagccctggggcctgagggggcccatggtgacactacctttgagtaccaggacctgtgccgccagcacatggccacgaagtccttgttcaaccgggcagagggtccaccggagccttcacgggtgagcagtgtgtcctcccagttcagcgacgcagcccaggccagccccagctcccacagcagcaccccgtcctggtgcgaggagccggcccaagccaacatggacatctccacgggacacatgattctggcatacatggaggatcacctgcggaaccgggaccgccttgccaaggagtggcaggccctctgtgcctaccaagcagagccaaacacctgtgccaccgcgcagggggagggcaacatcaaaaagaaccggcatcctgacttcctgccctatgaccatgcccgcataaaactgaaggtggagagcagcccttctcggagcgattacatcaacgccagccccattattgagcatgaccctcggatgccagcctacatagccacgcagggcccgctgtcccataccatcgcagacttctggcagatggtgtgggagagcggctgcaccgtcatcgtcatgctgaccccgctggtggaggatggtgtcaagcagtgtgaccgctactggccagatgagggtgcctccctctaccacgtatatgaggtgaacctggtgtcggagcacatctggtgcgaggactttctggtgcggagcttctacctgaagaacgtgcagacccaggagacgcgcacgctcacgcagttccacttcctcagctggccggcagagggcacaccggcctccacgcggcccctgctggacttccgcaggaaggtgaacaagtgctaccggggccgctcctgccccatcatcgtgcactgcagtgatggtgcggggaggaccggcacctacatcctcatcgacatggtcctgaaccgcatggcaaaaggagtgaaggagattgacatcgctgccaccctggagcatgtccgtgaccagcggcctggccttgtccgctctaaggaccagtttgaatttgccctgacagccgtggcggaggaagtgaatgccatcctcaaggccctgccccagtgagaccctggggccccttggcgggcagcccagcctctgtccctctttgcctgtgtgagcatctctgtgtacccactcctcactgccccaccagccacctcttgggcatgctcagcccttcctagaagagtcaggaagggaaagccagaaggggcacgcctgcccagcctcgcatgccagagcctggggcatcccagagcccagggcatcccatgggggtgctgcagccaggaggagaggaaaggacatgggtagcaattctacccagagccttctcctgcctacattccctggcctggctctcctgtagctctcctggggttctgggagttccctgaacatctgtgtgtgtccccctatgctccagtatggaagaatggggtggagggtcgccacacccggctccccctgcttctcagccccgggcctgcctctgactcacacttgggcgctctgccctccctggcctcacgcccagcctggtcccaccaccctcccaccatgcgctgctcaacctctctccttctggcgcaagagaacatttctagaaaaaactacttttgtaccagtgtgaataaagttagtgtgttgtctgtgcagctg

SEQ ID NO: 2648 - DNA, 2704 bp, Homo sapiens
gcttagtgtaaccagcggcgtatattttttaggcgccttttcgaaaacctagtagttaatattcatttgtttaaatcttattttatttttaagctcaaactgcttaagaataccttaattccttaaagtgaaataattttttgcaaaggggtttcctcgatttggagctttttttttcttccaccgtcatttctaactcttaaaaccaactcagttccatcatggtgatgttcaagaagatcaagtcttttgaggtggtctttaacgaccctgaaaaggtgtacggcagtggcgagagggtggctggccgggtgatagtggaggtgtgtgaagttactcgtgtcaaagccgttaggatcctggcttgcggagtggctaaagtgctttggatgcagggatcccagcagtgcaaacagacttcggagtacctgcgctatgaagacacgcttcttctggaagaccagccaacaggtgagaatgagatggtgatcatgagacctggaaacaaatatgagtacaagttcggctttgagcttcctcaggggcctctgggaacatccttcaaaggaaaatatgggtgtgtagactactgggtgaaggcttttcttgaccgcccgagccagccaactcaagagacaaagaaaaactttgaagtagtggatctggtggatgtcaatacccctgatttaatggcacctgtgtctgctaaaaaagaaaagaaagtttcctgcatgttcattcctgatgggcgggtgtctgtctctgctcgaattgacagaaaaggattctgtgaaggtgatgagatttccatccatgctgactttgagaatacatgttcccgaattgtggtccccaaagctgccattgtggcccgccacacttaccttgccaatggccagaccaaggtgctgactcagaagttgtcatcagtcagaggcaatcatattatctcagggacatgcgcatcatggcgtggcaagagccttcgggttcagaagatcaggccttctatcctgggctgcaacatccttcgagttgaatattccttactgatctatgttagcgttcctggatccaagaaggtcatccttgacctgcccctggtaattggcagcagatcaggtctaagcagcagaacatccagcatggccagccgaaccagctctgagatgagttgggtagatctgaacatccctgataccccagaagctcctccctgctatatggatgtcattcctgaagatcaccgattggagagcccaacaactcctctgctagatgacatggatggctctcaagacagccctatctttatgtatgcccctgagttcaagttcatgccaccaccgacttatactgaggtggatccctgcatcctcaacaacaatgtgcagtgagcatgtggaagaaaagaagcagctttacctacttgtttctttttgtctctcttcctggacactcactttttcagagactcaacagtctcgtcaatggagtgtgggtccaccttagcctctgacttcctaatgtaggaggtggtcagcaggcaatctcctgggccttaaaggatgcggactcatcctcagccagcgcccatgttgtgatacaggggtgtttgttggatgggtttaaaaataactagaaaaactcaggcccatccattttctcagatctccttgaaaattgaggccttttcgatagtttcgggtcaggtaaaaatggcctcctggcgtaagcttttcaaggttttttggaggctttttgtaaattgtgataggaactttggaccttgaacttacgtatcatgtggagaagagccaatttaacaaactaggaagatgaaaagggaaattgtggccaaaactttgggaaaaggaggttcttaaaatcagtgtttcccctttgtgcacttgtagaaaaaaaagaaaaaccttctagagctgatttgatggacaatggagagagctttccctgtgattataaaaaaggaagctagctgctctacggtcatctttgcttagagtatactttaacctggcttttaaagcagtagtaactgccccaccaaaggtcttaaaagccatttttggagcctattgcactgtgttctcctactgcaaatattttcatatgggaggatggttttctcttcatgtaagtccttggaattgattctaaggtgatgttcttagcactttaattcctgtcaaattttttgttctccccttctgccatcttaaatgtaagctgaaactggtctactgtgtctctagggttaagccaaaagacaaaaaaaattttactacttttgagattgccccaatgtacagaattatataattctaacgcttaaatcatgtgaaagggttgctgctgtcagccttgcccactgtgacttcaaacccaaggaggaactcttgatcaagatgcccaaccctgtgatcagaacctccaaatactgccatgagaaactagagggcaggtgttcataaaagccctttgaacccccttcctgccctgtgttaggagatagggatattggcccctcactgcagctgccagcacttggtcagtcactctcagccatagcactttgttcactgtcctgtgtcagagcactgagctccacccttttctgagagttattacagccagaaagtgtgggctgaagatggttggtttcatgtgggggtattatgtaccc

SEQ ID NO: 2649 - DNA, 2234 bp, Homo sapiens
ccccctccgctctgctgcgccgcccggctgggccccgaggccgctccgactgctatgtgaccgcgaggctgcgggaggaaggggacagggaagaagaggctctcccgcgggagcccttgaggaccaagtttgcggccacttctgcaggcgtcccttcttagctctcgcctgcccctttctgcagcctaggcggcccaggttctcttctcttcctcgcgcgcccagccgcctcggttcccggcgaccatggtgacgatggaggagctgcgggagatggactgcagtgtgctcaaaaggctgatgaaccgggacgagaatggcggcggcgcgggcggcagcggcagccacggcaccctggggctgccgagcggcggcaagtgcctgctgctggactgcagaccgttcctggcgcacagcgcgggctacatcctaggttcggtcaacgtgcgctgtaacaccatcgtgcggcggcgggctaagggctccgtgagcctggagcagatcctgcccgccgaggaggaggtacgcgcccgcttgcgctccggcctctactcggcggtcatcgtctacgacgagcgcagcccgcgcgccgagagcctccgcgaggacagcaccgtgtcgctggtggtgcaggcgctgcgccgcaacgccgagcgcaccgacatctgcctgctcaaaggcggctatgagaggttttcctccgagtacccagaattctgttctaaaaccaaggccctggcagccatcccacccccggttccccccagcgccacagagcccttggacctgggctgcagctcctgtgggaccccactacacgaccaggggggtcctgtggagatccttcccttcctctacctcggcagtgcctaccatgctgcccggagagacatgctggacgccctgggcatcacggctctgttgaatgtctcctcggactgcccaaaccactttgaaggacactatcagtacaagtgcatcccagtggaagataaccacaaggccgacatcagctcctggttcatggaagccatagagtacatcgatgccgtgaaggactgccgtgggcgcgtgctggtgcactgccaggcgggcatctcgcggtcggccaccatctgcctggcctacctgatgatgaagaaacgggtgaggctggaggaggccttcgagttcgttaagcagcgccgcagcatcatctcgcccaacttcagcttcatggggcagctgctgcagttcgagtcccaggtgctggccacgtcctgtgctgcggaggctgctagcccctcgggacccctgcgggagcggggcaagacccccgccacccccacctcgcagttcgtcttcagctttccggtctccgtgggcgtgcactcggcccccagcagcctgccctacctgcacagccccatcaccacctctcccagctgttagagccgccctgggggccccagaaccagagctggctcccagcaagggtaggacgggccgcatgcggcagaaagttgggactgagcagctgggagcaggcgaccgagctccttccccatcatttctccttggccaacgacgaggccagccagaatggcaataaggactccgaatacataataaaagcaaacagaacactccaacttagagcaataaccggtgccgcagcagccagggaagaccttggtttggtttatgtgtcagtttcacttttccgatagaaatttcttacctcatttttttaagcagtaaggcttgaagtgatgaaacccacagatcctagcaaatgtgcccaaccagctttactaaagggggaggaagggagggcaaagggatgagaagacaagtttcccagaagtgcctggttctgggtacttgtccctttgttgtcgttgttgtagttaaaggaatttcatttttaaaagaaatcttcgaaggtgtggttttcatttctcagtcaccaacagatgaataattatgcttaataataaagtatttattaagactttcttcagagtatgaaagtacaaaaagtctagttacagtggatttagaatatatttatgttgatgtcaaacagctgagcaccgtagcatgcagatgtcaaggcagttaggaagtaaatggtgtcttgtagatatgtgcaaggtagcatgatgagcaacttgagtttgttgccactgagaagcaggcgggttgggtgggaggaggaagaaagggaagaattaggtttgaattgcttttta

SEQ ID NO: 2650 - DNA, 1863 bp, Homo sapiens
atggccaccaaggagaagctgcagtgtctgaaagatttccacaaggacatcctgaagccctcaccagggaagagcccaggcacgcggcctgaggacgaggctgagggaaaacctccgcagagggagaagtggtctagcaagatcgactttgtgctctctgtggctggcggcttcgtgggcttgggcaacgtctggcgcttcccgtacctctgctacaagaatggtggaggtgcgtttctcataccgtattttattttcctgtttgggagcggcctgcctgtgtttttcttggagatcatcataggccagtacacctctgaagggggcatcacctgctgggaaaagatctgccccttgttctctggtatcggctatgcctccgttgtaattgtgtccctcctgaatgtctactacatcgtcatcctggcctgggccacatactacctgttccagtccttccagaaggagctgccctgggcacactgcaaccacagctggaacacacctcactgcatggaggacaccatgcgcaagaacaagagtgtctggatcaccatcagctccaccaacttcacctcccctgtcatcgagttctgggagcgcaacgtgctgagcttgtcccctggaatcgaccacccaggctctctgaaatgggacctcgctctctgccttcttttagtctggctagtgtgtttcttctgcatctggaagggcgtcaggtccactgggaaggtcgtctacttcacagccacttttccattcgccatgctcctggtgctgctggtccgagggctgacgctgccgggcgcgggcgcaggcatcaagttctatctgtatcctgacatcacccgccttgaggacccacaggtgtggattgacgctgggactcagatattcttctcttatgccatctgcctgggggctatgacctcgctggggagctacaacaagtacaagtataactcgtacagggactgtatgctgctgggatgcctgaacagtggtaccagttttgtgtctggcttcgcaattttttccatcctgggcttcatggcacaagagcaaggggtggacattgctgatgtggctgagtcaggtcctggcctggccttcattgcctacccaaaagctgtgacaatgatgccgctgcccacattttggtccattcttttttttattatgcttctcttgcttggactggatagccagtttgttgaagttgaaggacagatcacatccttggttgatctttacccatccttcctaaggaagggttatcgtcgggaaatcttcatcgccttcgtgtgtagcatcagctacctgctggggctgacgatggtgacggagggtggcatgtatgtgtttcagctctttgactactatgcagctagcggtgtatgccttttgtgggttgcattctttgaatgttttgttattgcctggatatatggaggtgataacctttatgatggtattgaggacatgattggctatcggcccgggccctggatgaagtacagctgggctgtgatcactccagttctctgtgttggatgtttcatcttctcgctcgtcaagtacgtacccctgacctacaacaaaacatacgtgtaccccaactgggccattgggctgggctggagcctggccctttcctccatgctctgcgttcccttggtcatcgtcatccgcctctgccagactgaggggccgttccttgtgagagtcaagtacctgctgaccccaagggaacccaaccgctgggctgtggagcgcgagggagccacaccttacaactctcgcaccgtcatgaacggcgctctcgtgaaaccgacccacatcattgtggagaccatgatgtga

SEQ ID NO: 2651 - DNA, 1860 bp, Homo sapiens
gggacagcctctcctgccgccgctgctgctgccgccgccgccaccgccggctggtcctccttctgcttttacttctcctgcatgacagttgttttcttcatctgagcagacaccagcttcagatgctcgaggtgagaaacatgcctttcagtttgggctactggtttacttaattaatcagccggcagctccgtcgatctattttcgtccctgtcctcttgacgagcccgggatggtttggagtagcatttaaaagaactagaaaagtggcccagaaacagcagcttaaagaattattacgatatactttgattttgtagttgctaggagcttttcttccccccttgcatctttctgaactcttcttgattttaataatggccttggacttggacgatttatcgatttccccctgtaagatgctgtatcatttggttgggggggcctctgcgtggtaatggaccgtgagagcggccaggccttcttctggaggtgagccgatggagatttattccccagacatgtctgaggtcgccgccgagaggtcctccagcccctccactcagctgagtgcagacccatctcttgatgggcttccggcagcagaagacatgccagagccccagactgaagatgggagaacccctggactcgtgggcctggccgtgccctgctgtgcgtgcctagaagctgagcgcctgagaggttgcctcaactcagagaaaatctgcattgtccccatcctggcttgcctggtcagcctctgcctctgcatcgccggcctcaagtgggtatttgtggacaagatctttgaatatgactctcctactcaccttgaccctggggggttaggccaggaccctattatttctctggacgcaactgctgcctcagctgtgtgggtgtcgtctgaggcatacacttcacctgtctctagggctcaatctgaaagtgaggttcaagttacagtgcaaggtgacaaggctgttgtctcctttgaaccatcagcggcaccgacaccgaagaatcgtatttttgccttttctttcttgccgtccactgcgccatccttcccttcacccacccggaaccctgaggtgagaacgcccaagtcagcaactcagccacaaacaacagaaactaatctccaaactgctcctaaactttctacatctacatccaccactgggacaagccatcttgtaaaatgtgcggagaaggagaaaactttctgtgtgaatggaggggagtgcttcatggtgaaagacctttcaaacccctcgagatacttgtgcaagtgcccaaatgagtttactggtgatcgctgccaaaactacgtaatggccagcttctacagtacgtccactccctttctgtctctgcctgaataggagcatgctcagttggtgctgctttcttgttgctgcatctcccctcagattccacctagagctagatgtgtcttaccagatctaatattgactgcctctgcctgtcgcatgagaacattaacaaaagcaattgtattacttcctctgttcgcgactagttggctctgagatactaataggtgtgtgaggctccggatgtttctggaattgatattgaatgatgtgatacaaattgatagtcaatatcaagcagtgaaatatgataataaaggcatttcaaagtctcacttttattgataaaataaaaatcattctactgaacagtccatcttctttatacaatgaccacatcctgaaaagggtgttgctaagctgtaaccgatatgcacttgaaatgatggtaagttaattttgattcagaatgtgttatttgtcacaaataaacataataaaaggaaaaaaaaaaccc

SEQ ID NO: 2652 - DNA, 3127 bp, Homo sapiens
gtagtgagccggctgagaggcatggagacgcaggaacttcggggggccctggctcttctcctcctttgctttttcacatctgccagtcaggatctgcaggtaattgacctgctgactgtgggcgagtctcggcagatggtagctgtggcagagaagatccggacagccttgctcactgctggggacatctacctcttatccaccttccgcctgccccccaagcagggtggtgtcctctttggcctctattctcgccaagacaacactcgatggctggaggcctctgttgtaggcaagatcaacaaagtactggtgcgataccagcgggaggatggcaaagtccacgccgtgaacctacagcaagcgggcctggctgatgggcgcacacacacagttctcctgcgactccgaggtccctccagacccagccctgccctacatctctacgtggactgcaaactgggtgaccaacatgcaggccttccagcactggcccccattcctccagcggaggtcgatgggctggagattaggactggacagaaggcgtatttgaggatgcagggctttgtggaatctatgaaaattattctgggtgggtccatggcccgggtaggagccctgagtgagtgtccattccaaggggacgagtccatccacagtgcagtgaccaatgcactgcactccattctaggggagcagaccaaggcgctggtcacccaactcaccctcttcaaccagatcctggtggagctgcgggatgatatacgagaccaggtaaaggaaatgtccctgatccgaaacaccattatggagtgtcaggtgtgcggcttccatgagcagcgttcccactgcagccccaatccctgcttccgaggtgtggactgcatggaagtgtacgagtacccaggctaccgctgtgggccctgcccccctggcctgcagggcaacggcacccactgcagtgacatcaatgagtgtgctcacgctgacccctgtttcccgggctccagctgcatcaacaccatgcccggcttccactgtgaggcctgtcctcgagggtacaagggcacacaggtgtctggtgtgggcattgactatgcccgggccagcaaacaggtctgcaatgacatcgatgaatgcaacgatggcaacaatggtggctgtgacccaaactccatctgcaccaacactgtgggctctttcaagtgtggtccctgccgcctgggtttcctgggcaaccagagccagggctgcctcccagcccggacctgccacagcccagcccacagcccctgccacatccatgctcactgtctctttgaacgcaatggtgcagtgtcctgccagtgtaacgtgggctgggctgggaatgggaacgtgtgtgggactgacacagacatcgatggctacccagaccaagcactgccctgcatggacaacaacaaacactgcaaacaggacaactgccttttgacacccaactctgggcaggaagatgctgataatgatggtgtgggggaccagtgtgatgatgatgctgatggggatgggatcaagaatgttgaggacaactgccggctgttccccaacaaagaccagcagaactcagatacagattcatttggtgatgcctgtgacaattgccccaacgttcccaacaatgaccagaaggacacagatggcaatggggaaggagatgcctgtgacaacgacgtggatggggatggcatccccaatggattggacaattgccctaaagtccccaacccactacagacagacagggatgaggacggggtgggagatgcttgcgacagctgccctgaaatgagcaatcctacccagacagatgcagacagcgacctggtgggggatgtctgtgatactaatgaagacagcgatggggatgggcatcaggacaccaaggacaactgcccacagctgccaaatagctcccagctggactctgataacgatggacttggagatgagtgtgatggggatgatgacaatgatggcatcccagattatgtgcctcctggtcccgataactgccgcctggtacccaatcccaatcagaaggactcagatggcaatggcgttggtgatgtgtgtgaggatgactttgacaatgatgctgtggtcgaccccctggatgtgtgtcctgaaagtgcagaggtaacgcttacggattttcgggcctatcagaccgtcgtcctggatcctgagggtgatgctcagattgacccaaactgggttgtgctcaaccagggcatggaaatcgttcagaccatgaacagtgaccctggcttggcagttggatacacggccttcaatggtgtggactttgaaggcaccttccatgtgaacacagtgactgatgatgactacgcaggctttctcttcagttatcaagacagtggccgcttctacgtagtcatgtggaagcagaccgagcagacctactggcaggctacacccttccgggcggttgcccagcccgggctgcagctcaaggcagtgacatcagtgtctggcccaggtgagcacctccgaaatgccctgtggcatactggccacacccctgatcaggtacgactcctgtggacagacccacgaaatgtgggctggcgggacaagacctcctatcgctggcagcttctgcaccggcctcaagttggctacattcgggtgaagctctatgagggaccccagcttgtggcggattctggggtgatcattgacacatccatgcgaggggggcgtcttggtgtattctgcttctcccaagaaaacataatttggtccaatctccagtatcgatgcaatgacacagtgcctgaggactttgagccattccggaggcagctgctccagggaagggtgtgaggaggaggccaccagattcagaattcagaattttagaccctttggccttggggtccatcctggagaccctgaggtctaagctacagcccctcagccaaccacagacccttctctggctcccaaaaggagttcagtcccagaggggtggtcaccccacccttcaggggatgagaagttttcaaggggtattactcaggcactaaccccaggttagatgacagcacattgccataaa

SEQ ID NO: 2653 - DNA, 3567 bp, Homo sapiens
cgccatcccgcgctctgcggactgggaggcccgggccaggacgcgagtctgcgcagccgaggttccccagcgccccctgcagccgcgcgtaggcagagacggagcccggccctgcgcctccgcaccacgcccgggaccccacccagcggcccgtacccggagaagcagcgcgagcacccgaagctcccggctcggcggcagaaaccgggagtggggccgggcgagtgcgcggcatcccaggccggcccgaacgtccgcccgcggtgggccgacttcccctcctcttccctctctccttcctttagcccgctggcgccggacacgctgcgcctcatctcttggggcgttcttccccgttggccaaccgtcgcatcccgtgcaactttggggtagtggccgcttagtgttgaatgttccccaccgagagcgcatggcttgggaagcgaggcgcgaacccgggccccgaagccgccgtccgggagacggtgatgctgttgctgtgcctgggggtcccgaccggccgcccctacaacgtggacactgagagcgcgctgctttaccagggcccccacaacacgctgttcggctactcggtcgtgctgcacagccacggggcgaaccgatggctcctagtgggtgcgcccactgccaactggctcgccaacgcttcagtgatcaatcccggggcgatttacagatgcaggatcggaaagaatcccggccagacgtgcgaacagctccagctgggtagccctaatggagaaccttgtggaaagacttgtttggaagagagagacaatcagtggttgggggtcacactttccagacagccaggagaaaatggatccatcgtgacttgtgggcatagatggaaaaatatattttacataaagaatgaaaataagctccccactggtggttgctatggagtgccccctgatttacgaacagaactgagtaaaagaatagctccgtgttatcaagattatgtgaaaaaatttggagaaaattttgcatcatgtcaagctggaatatccagtttttacacaaaggatttaattgtgatgggggccccaggatcatcttactggactggctctctttttgtctacaatataactacaaataaatacaaggcttttttagacaaacaaaatcaagtaaaatttggaagttatttaggatattcagtcggagctggtcattttcggagccagcatactaccgaagtagtcggaggagctcctcaacatgagcagattggtaaggcatatatattcagcattgatgaaaaagaactaaatatcttacatgaaatgaaaggtaaaaagcttggatcgtactttggagcttctgtctgtgctgtggacctcaatgcagatggcttctcagatctgctcgtgggagcacccatgcagagcaccatcagagaggaaggaagagtgtttgtgtacatcaactctggctcgggagcagtaatgaatgcaatggaaacaaacctcgttggaagtgacaaatatgctgcaagatttggggaatctatagttaatcttggcgacattgacaatgatggctttgaagatgttgctatcggagctccacaagaagatgacttgcaaggtgctatttatatttacaatggccgtgcagatgggatctcgtcaaccttctcacagagaattgaaggacttcagatcagcaaatcgttaagtatgtttggacagtctatatcaggacaaattgatgcagataataatggctatgtagatgtagcagttggtgcttttcggtctgattctgctgtcttgctaaggacaagacctgtagtaattgttgacgcttctttaagccaccctgagtcagtaaatagaacgaaatttgactgtgttgaaaatggatggccttctgtgtgcatagatctaacactttgtttctcatataagggcaaggaagttccaggttacattgttttgttttataacatgagtttggatgtgaacagaaaggcagagtctccaccaagattctatttctcttctaatggaacttctgacgtgattacaggaagcatacaggtgtccagcagagaagctaactgtagaacacatcaagcatttatgcggaaagatgtgcgggacatcctcaccccaattcagattgaagctgcttaccaccttggtcctcatgtcatcagtaaacgaagtacagaggaattcccaccacttcagccaattcttcagcagaagaaagaaaaagacataatgaaaaaaacaataaactttgcaaggttttgtgcccatgaaaattgttctgctgatttacaggtttctgcaaagattgggtttttgaagccccatgaaaataaaacatatcttgctgttgggagtatgaagacattgatgttgaatgtgtccttgtttaatgctggagatgatgcatatgaaacgactctacatgtcaaactacccgtgggtctttatttcattaagattttagagctggaagagaagcaaataaactgtgaagtcacagataactctggcgtggtacaacttgactgcagtattggctatatatatgtagatcatctctcaaggatagatattagctttctcctggatgtgagctcactcagcagagcggaagaggacctcagtatcacagtgcatgctacctgtgaaaatgaagaggaaatggacaatctaaagcacagcagagtgactgtagcaatacctttaaaatatgaggttaagctgactgttcatgggtttgtaaacccaacttcatttgtgtatggatcaaatgatgaaaatgagcctgaaacgtgcatggtggagaaaatgaacttaactttccatgttatcaacactggcaatagtatggctcccaatgttagtgtggaaataatggtaccaaattcttttagcccccaaactgataagctgttcaacattttggatgtccagactactactggagaatgccactttgaaaattatcaaagagtgtgtgcattagagcagcaaaagagtgcaatgcagaccttgaaaggcatagtccagttcttgtccaagactgataagaggctattgtactgcataaaagctgatccacattgtttaaatttcttgtgtaattttgggaaaatggaaagtggaaaagaagccagtgttcatatccaactggaaggccggccatccattttagaaatggatgagacttcagcactcaagtttgaaataagagcaacaggttttccagagccaaatccaagagtaattgaactaaacaaggatgagaatgttgcgcatgttctactggaaggactacatcatcaaagacccaaacgttatttcaccatagtgattatttcaagtagcttgctacttggacttattgtacttctgttgatctcatatgttatgtggaaggctggcttctttaaaagacaatacaaatctatcctacaagaagaaaacagaagagacagttggagttatatcaacagtaaaagcaatgatgattaaggacttctttcaaattgagagaatggaaaacagcccgccc

SEQ ID NO: 2654 - DNA, 3460 bp, Homo sapiens
tgaataaattattcggcatttagcttatcattctgaatttcactttttgctttttggtgctctgaaacttgcagagagaggtggagtgctaaggggagggtaggggttgtgatactttgcacacacatccctgtcattgttctgcctaaagagacagggctgggttcaaggccacatgtgctcctgtcatcctccacatttctgctccaagtgcaatccggagtgtcagctctccatctgtctctgcctggcaggcgcacgcgcccagcaccctgcctccggcgatgccgccccagcccctctgatggccctcctctctgctgccactcattccagaacaggaggcatgagcccggaacgcgcttgcttttaggagacagccactttctgtgtggtacgctggattcaaggatgcctgatcgtactgagaagcactccacaatgccagactcacctgtggatgtgaagacgcaatctaggctgactcctccaacaatgccacctcccccaactactcaaggagctccaagaaccagttcatttacaccgacaacgttaactaatggcacgagccattctcctacagccttgaatggcgccccctcaccacccaatggcttcagcaatgggccttcctcttcttcctcctcctctctggctaatcaacagctgcccccagcctgtggtgccaggcaactcagcaagctgaaaaggttccttactaccctgcagcagtttggcaatgacatttcacccgagataggagaaagagttcgcaccctcgttctgggactagtgaactccactttgacaattgaagaatttcattccaaactgcaagaagctactaacttcccactgagaccttttgtcatcccatttttgaaggccaacttgcccctgctgcagcgtgagctcctccactgcgcaagactggccaaacagaaccctgcccagtacctcgcccagcatgaacagctgcttctggatgccagcaccacctcacctgttgactcctcagagctgcttctcgatgtgaacgaaaacgggaagaggcgaactccagacagaaccaaagaaaatggctttgacagagagcctttgcactcagaacatccaagcaagcgaccatgcactattagcccaggccagcggtacagtccaaataacggcttatcctaccagcccaatggcctgcctcaccctaccccacctccacctcagcattaccgtttggatgatatggccattgcccaccactacagggactcctatcgacaccccagccacagggacctcagggacagaaacagacctatggggttgcatggcacacgtcaagaagaaatgattgatcacagactaacagacagagaatgggcagaagagtggaaacatcttgaccatctgttaaactgcataatggacatggtagaaaaaacaaggcgatctctcaccgtactaaggcggtgtcaagaagcagaccgggaagaattgaattactggatccggcggtacagtgacgccgaggacttaaaaaaaggtggcggcagtagcagcagccactctaggcagcagagtcccgtcaacccagacccagttgcactagacgcgcatcgggaattccttcacaggcctgcgtctggatacgtgccagaggagatctggaagaaagctgaggaggccgtcaatgaggtgaagcgccaggcgatgacggagctgcagaaggccgtgtctgaggcggagcggaaagcccacgacatgatcacaacagagagggccaagatggagcgcacggtcgccgaggccaaacggcaggcggcggaggacgcactggcagttatcaatcagcaggaggattcaagcgagagttgctggaattgtggccgtaaagcgagtgaaacctgcagtggctgtaacacagcccgatactgtggctcattttgccagcacaaagactgggagaagcaccatcacatctgtggacagaccctgcaggcccagcagcagggagacacacctgcagtcagctcctctgtcacgcccaacagcggggctgggagcccgatggacacaccaccagcagccactccgaggtcaaccaccccgggaaccccttccaccatagagacaacccctcgctagacgtgaactcagaactgtcggaggaaagacaacacaaccaacgcgaaaccaattcctcatcctcagatgctcaaagttgttttttttgtttgtttgtttattagatgaattatcctatttcagtacttcagcaagagagaacctaactgtatcttgaggtggtagtaaaacacagagggccagtaacgggtcgtaatgacttattgtggataacaaagatatcttttctttagagaactgaaaagagagcagagaatataacatgaaatgatagatttgacctcctccctgttattttcaagtagctgggattttaaactagatgacctcattaaccgatgctttaccaaacagcaaaccaagagattgctaattgctgttgaaagcaaaaatgctaatattaaaagtcacaatgttctttatatacaataatggaaaaaaaaaaaagaggaaaaccctcaagggcatgagcattggatacagcagtagacattttaacaagaagatgaatggcgtccgtgggttgctaactgaactttgaagacccgctacaaaacgcgcagatgtgcagcagattggaaggagacacagatgttcggtttttttcctgtttctgaaaagaaataataatatccaggtcaacagaatgaaaaatgaaagatgatttgcaatgggatgtatgaatacagcagcaagaaaaaaaaatgccataatacaaaaggctccatatatatatatatatatatatatatacacacacacacacacgcacatatatacacacacacacacacacacacacacacacacacacacacacacacagaagtaagagactcagcctgcagttaattagcattctggcagttttgacatcagccagctgccctaaataacccttcaacgtttcttcacttttgcaagttccacagagtaagacattgggtctattccagctcattcattttatattgaaaaaaataattttaaaaatggtggcttcagctccagcccctttccaaaatttttcaaccccaccctgtttggatttttaattaaaaactagtagttctcttggtgttaaaacacttctgtcctgtgaggtttcccaatggtgtttttcttgtaaatgtgttggacaaatgtgaagatgcattgtagtttaaccatatgcccacatttagtctctttattcctagttggtgagaaacctgtatctttctatgctgcttttatatctgtatgtattagtgatatttctctagtagttaaaaaaaaaaaaaggaaaaaaagactctttttggttgtcctcaag

SEQ ID NO: 2655 - DNA, 4398 bp, Homo sapiens
ggccaaaggtcaagatacttctctgggaaatgttgctgctgatgctgctttacaaagtcatacaatgagtgtttggtttaagaaagattttcatacttaaaagattttcatcttggaaatacatcaagtgaaaattaaattcttttgggaaacattttccttctgatatattatacttgtaatgggcgacatggcaaacaactcagttgcttacagtggtgtgaaaaactctttgaaggaagctaatcatgatggagactttggaattacgctcgcagagctgcgggctctcatggagctcaggtccacagatgcattacgaaaaatacaggaaagctatggagatgtctatggaatttgcaccaaattgaaaacatctcccaatgaaggtttaagtggaaaccctgcagatttagaaagaagagaagcagtgtttggaaagaattttatacctcctaaaaagccaaaaacctttcttcaattagtatgggaagcattacaagatgtcactttaattatattagaaattgcagccatagtatcattgggcctttctttttatcagcctccagaaggggataatgcactttgtggagaagtttctgttggggaggaagaaggtgaaggtgaaactgggtggattgaaggagctgcaatcctcttgtctgtagtgtgtgtggtgttagtaacagctttcaatgactggagtaaggagaaacagtttagaggtttgcagagccgaattgaacaagaacagaagttcactgtcatcaggggtggtcaggtcattcagatacctgtagctgacattactgttggagatattgctcaagtgaaatatggtgatcttcttccagctgacggcatacttattcaaggcaacgatcttaaaattgatgaaagctcattgactggtgaatcagatcatgttaaaaagtctttagataaggatcccttacttctatcaggtactcatgtaagggaaggctctggaagaatggtagttacagctgtaggtgtaaattctcaaactggaattatctttaccttacttggagctggaggtgaagaggaagagaagaaagatgagaagaaaaaggaaaagaaaaataagaaacaagatggagctattgagaatcgcaacaaagcaaaagcccaggatggtgcagccatggaaatgcagccattgaagagtgaagaaggtggagatggtgatgaaaaagataaaaagaaagcaaatttgccaaaaaaggaaaaatctgttttacaagggaaacttacaaaactggctgttcagattggcaaagcaggtctgttgatgtctgccatcacagttatcattctagtattatattttgtcattgacaccttctgggttcagaaaagaccatggcttgctgagtgcacaccaatttatatacaatactttgtgaagttcttcattattggagttacagttttagtggtcgcagtgccagaaggtcttccacttgcagtcacgatctcactggcttattcagtcaaaaaaatgatgaaagataataacttagtaaggcatctggatgcttgtgaaaccatgggaaatgctacagctatttgttcagataaaacaggaactttgacaatgaacagaatgacagtcgttcaagcttacataaatgaaaaacattataaaaaggttcctgaaccagaagctattccaccaaatattttgtcctatcttgtaacaggaatttctgtgaattgtgcttatacatcaaaaatattgccaccagagaaagagggtggattacctcgtcacgttggtaataaaactgaatgtgccttgttgggacttcttttggatttaaaacgggattatcaggatgttagaaatgaaataccagaagaagcactgtacaaagtctacaccttcaattctgttaggaagtccatgagtactgtcctgaaaaattcagatggaagttatcgaatattcagcaagggtgcatctgagataattctgaaaaagtgtttcaaaatcttgagtgctaatggtgaggcaaaagtattcagaccaagggaccgtgatgatattgtaaaaactgtgattgaaccgatggcatcagaaggcttgagaaccatatgtcttgcattcagagattttccagcaggagaaccagaaccagagtgggataatgaaaatgatattgtcaccggccttacatgcattgctgttgtggggattgaagatcctgtgagacctgaggtgccagatgcaattaaaaagtgtcagagggctggaattactgtgcggatggtcactggtgataatattaatactgctcgggccattgctaccaaatgtggtattttacatcctggggaagattttctgtgcctagaaggtaaagattttaacagaagaatacgaaatgaaaaaggagagattgagcaagagaggatagacaagatttggccaaaacttcgagtacttgcaagatcatctcctactgataagcatacactggttaaaggtataattgacagcactgtctcagaccaacgccaggttgtagctgtaactggtgatggtacaaatgatggcccagcactaaagaaagcagatgttggatttgcaatgggtattgctggaactgatgtagctaaagaagcatccgatattattctcacagatgacaactttacaagcattgttaaagcagttatgtggggacgaaatgtctatgacagcatctcaaaattccttcagttccaacttactgttaatgtagtagcagtgattgttgcttttacgggcgcctgcattactcaagactcaccgcttaaggctgtgcagatgctgtgggtaaacctcataatggatacactcgcttccctggctctggcaacggaaccacccactgagtctctcttgcttcggaaaccttatggtagaaataagcctctcatctcacgtacaatgatgaagaatattttgggtcatgcattctatcaacttgtagtagtctttacactcttatttgctggagaaaagttttttgacattgatagtggaagaaatgctcctttgcatgctcctccttcagaacattatactattgtttttaatacctttgtgctgatgcaacttttcaacgaaataaatgcccggaaaattcatggtgaaagaaatgtattcgaaggaatctttaacaatgccatcttctgcacaattgttttaggcacttttgtggtacagataataattgtgcagtttggtggaaaacctttcagttgttcagaactttcaatagaacagtggctatggtcaatattcctaggaatgggaacattactctggggccagcttatttcaacaattccaactagccgtttaaaattcctcaaagaagctggtcatggaacacaaaaggaagaaatacctgaggaggaattagcagaggatgttgaagagattgatcacgctgaaagggagttgcggcgtggccaaatcttgtggtttagaggtctgaacagaatccaaacacagattcgagtggtgaatgcatttcgtagttctttatatgaagggttagaaaaaccggaatcaagaagttcgattcacaactttatgacacatcctgagtttaggatagaagattcagagcctcatatcccccttattgatgacactgatgccgaagatgatgctcctacaaaacgtaactccagtcctccaccctctcccaacaaaaataacaatgctgttgacagtggaattcaccttacaatagaaatgaacaagtctgctacctcttcatccccaggaagcccactacatagtttggaaacatcactctgattgtaagctgaatgttaacacactagctgcattgtaaagaaacaaattgaaactgggtcttttcacatattgtgatggacaagctagtattcttgtctttggacttcaacagaagacacacttgtacgaatgtagatttatttttttaaaaaaaaaaaagcaaagctttctgccagactgagggtgctttttggggggtgggagaaatgaactgacagataaacagtaactcagcgtaagtgacctgtggatcatcagtagtacccaagcatggtcctgaacagtgtattagcagagctttagtttatctcagtcctggatgggagagagagggaggagtaaaactgggcaagacaaagagccctggatcgttgaattgatagtttaatttctgctgttggctgttaataatttggattatttatgtttataaatgatacagatctgtttacaaggtttgtagatactttttttgttcctgttcatagatgggaagcttccttataactgatgcagagaaaaattagtccttcaaatactgctgtattttcagg

SEQ ID NO: 2656 - DNA, 23887 bp, Homo sapiens
cctgatcaggaaatgcctgtttatccacctgccatcatcaccccgcttcaggacactgtcacttctgaagggcagccagcccgttttcaatgccgggtttctggaacagatctaaaagtgtcgtggtacagcaaagacaagaaaatcaagccatctcggttctttagaatgactcaatttgaagacacttatcaactggaaattgccgaagcttatccagaagatgaaggaacttacacgtttgttgctaataatgctgtaggccaagtatcaagcacagccaacctgagtctggaagctcctgaatcaattttgcatgagaggattgaacaagagattgagatggaaatgaaagctgccccagtgatcaagaggaaaatcgaacccctggaagtagcactgggccacctagccaaattcacctgtgagatccaaagtgctcccaatgtccggttccagtggtttaaagctggccgagaaatttatgagagtgacaagtgttctattcgatcttcaaagtatatctccagccttgaaatcctgagaacccaggtggttgactgcggcgagtatacatgcaaagcttccaatgagtatggcagtgtcagctgtacagccacactaactgtgacagaggcatatccaccaacctttctctccagacctaagtcccttacaacttttgtgggtaaggcagccaagttcatctgcacagtgacagggactcctgtgatagaaaccatttggcagaaagatggtgctgcactctcaccttcacctaactggaggatttccgacgcagaaaacaaacacattttagaactctcaaaccttaccattcaagatagaggagtttattcttgtaaggcttctaacaagtttggagcagacatctgccaagcagagttgatcatcattgataagccacatttcattaaagaattagagcctgtgcagtccgctatcaataagaaggtccaccttgagtgccaagtagatgaagacagaaaagtcacagttacgtggagcaaagatgggcaaaaactccccccagggaaagattataagatctgttttgaagataaaatagcaacacttgagattcctttggccaaactgaaagattcaggaacctatgtctgtacagcttcaaatgaggctggaagcagctcctgctcagccacagtcactgtcagagagccaccatccttcgtgaagaaggtggatccctcttatttaatgctcccaggtgaatcagcacgcctccattgcaagctgaaaggctcacctgtgatccaggttacttggtttaaaaataacaaagaactcagtgaaagtaacacagtccgaatgtattttgtcaattctgaggctatacttgatattacggatgtaaaagttgaagacagtgggagttactcatgtgaagcagtgaatgacgtcggcagtgatagctgcagtactgaaatagttatcaaagaacctccttctttcatcaaaactcttgagcctgcagacatagtgagaggaacaaatgctctacttcagtgtgaagtctcaggcactggaccatttgaaattagctggttcaaagacaagaaacaaattcgaagtagtaaaaaatacagattgttttctcagaagtctcttgtgtgtctggagatcttttcgtttaatagtgcagatgttggtgaatatgaatgtgttgttgctaatgaagtcggcaagtgtggctgcatggcaacccacttactcaaagaacctccaacctttgtaaagaaagtagatgatttgattgcactaggaggacaaaccgttaccctgcaagctgctgtgagagggtcagagcccatttctgtcacatggatgaaaggtcaagaggtcatcagagaagacggaaaaatcaaaatgagcttttccaatggtgttgcagtcttgataatccctgatgttcagattagttttggaggcaaatacacgtgcctggctgaaaatgaagctggaagccaaacatctgttggggaattaatagttaaagaacctgccaaaatcattgagcgagcagaactgatccaggtgacagcaggagatcccgccacactggagtacacagtggcaggcacgccagaactgaagcccaaatggtacaaagatgggagacccttggtcgccagtaaaaaataccgaataagttttaaaaacaatgttgcccagctcaaattttattcagctgagctgcacgacagtggccaatacacatttgagatttccaatgaagtgggcagcagctcctgtgagactacattcactgtattagatcgagacattgctccattttttaccaaacccttgcgcaacgtggatagtgttgttaatggtacctgcagactggactgcaaaattgcaggctccctccccatgagggtgtcctggtttaaggatggcaaagaaatagctgcttctgacagatacaggatagcatttgtggaaggcacagcctctttggagatcatcagagtagacatgaatgatgcagggaatttcacttgtcgagccacaaattccgtgggaagcaaagacagcagtggagccctgattgtgcaagaaccacccagttttgtaactaaacccggctcaaaggatgttctgcctggctcagcagtctgcctgaagagcactttccaaggatctactcctctcacaatcagatggtttaagggcaacaaagagctggtttctggtggaagctgctatattaccaaagaagctttagagagttccctggaactctatttagtaaaaacctctgattcgggcacgtacacatgtaaagtcagcaatgtcgctggaggggtggaatgcagtgcaaacttgtttgtaaaagaacctgccacatttgttgaaaagttagagccatcacagctgttaaagaagggagatgccacccagctagcctgcaaagtaactggtacccctccaattaaaataacatggtttgcaaatgatagagaaattaaggagagcagcaaacacagaatgtcttttgtggagtctactgcagttctaagactgacagatgttggcatcgaagacagtggtgaatatatgtgtgaggcccaaaatgaggctggcagtgaccactgcagtagcattgtaatagtcaaagagtcaccttattttaccaaggaatttaagccaattgaagtcttaaaggagtacgatgtcatgttgctggctgaggtggcaggcactcctccctttgagatcacttggttcaaagataacacaatcctgcgaagtggtagaaagtataagactttcattcaggatcatctggttagcctgcagatcctcaagtttgtagctgcagatgctggcgaataccagtgtcgggtgaccaatgaggtgggcagcagcatctgcagtgccagggtgactttaagagaacccccatccttcataaagaagatcgagagtaccagctccctccggggaggcacagctgccttccaggccactctgaagggctccttgccaattacggtgacttggctaaaagacagcgatgaaatcactgaagacgataatataagaatgacctttgagaacaatgtggccagtttgtacctcagtggcattgaagtcaagcatgatgggaaatatgtctgtcaggccaaaaatgatgcaggaatacaaagatgttctgcattactctcagtaaaagaacctgcaacaatcaccgaggaagctgtgtctatagatgtcacccaaggagacccagccactttgcaggttaaattttcagggactaaggagattacagccaaatggtttaaagatggccaagaactgaccctgggctcaaaatataaaatcagtgtcactgatacagtctcaatactgaagattatttctacagaaaagaaagatagtggagaatatactttcgaggtccaaaatgatgttgggaggagcagctgcaaggctagaattaatgtattagatcttatcatacctccttcattcaccaaaaagctgaagaaaatggacagcattaaaggttctttcattgatttagaatgtatagtggctgggtcacatcccataagcatccagtggttcaaagatgaccaagaaatatcagctagtgaaaagtacaaattctcttttcatgacaatactgccttcttggaaatcagccagctggaaggtacagacagtgggacatacacttgttctgccacaaataaggcagggcacaaccaatgcagtgggcatctgacagtcaaagaacccccttactttgtggaaaagccacagtcacaagatgtcaatcccaacacaagggtacagttaaaggctcttgtgggtggcactgcacccatgacaataaagtggtttaaagataacaaagagttacactcaggagcagcccgctcagtttggaaggatgacacctctaccagtctagagctctttgcagccaaagctaccgattctggaacctacatttgccaactaagcaatgatgttggcacagcaaccagcaaagccactctctttgtaaaagaacctcctcaattcattaagaagcccagtccagtcttagtgctgaggaatggacagtcaacaacatttgaatgccaaataacaggcactcctaaaatccgagtgtcttggtatctagacgggaatgaaataacagccattcagaaacatggcatttccttcattgatggtttagccactttccagatttctggtgccagggtagaaaatagtgggacttatgtgtgtgaagctcgaaatgacgcaggcacggcgagctgcagcattgaactcaaagtgaaagaaccccccacctttatcagagagctgaagcctgtggaggtagtaaaatatagtgacgtggagctggagtgtgaagttacgggaacacctccgtttgaagtcacttggctgaagaataacagggaaattcgaagcagcaaaaaatacacattgaccgacagagtgtctgtgtttaacctccatataaccaagtgtgacccttcagacactggggaataccagtgcattgtatccaatgaaggcggcagctgctcatgcagtactagagttgccctgaaagaaccaccatcattcattaagaagatagaaaataccactactgttttgaaaagttctgccacctttcagagtaccgtggcaggttctcctcctatttctataacctggctaaaggatgatcagattcttgatgaagatgataatgtctatatttcatttgtggacagtgtggccacacttcaaatcagaagtgtggataatggacacagtgggagatatacctgtcaagccaagaatgagtcaggagttgagaggtgttatgctttccttttagtacaagaaccagctcaaatcgtagagaaagctaaatcagttgatgttacggagaaagatcccatgaccttggaatgtgttgtggctggaacaccagaactcaaagtgaaatggcttaaagacgggaaacaaatagttcccagtagatacttttcaatgagttttgaaaataacgtggccagttttagaattcagtcagtaatgaagcaggacagcggtcagtacactttcaaggtggaaaatgacttcggaagcagtagctgtgatgcctacttaagagtgctagatcaaaatattcctccatcattcaccaaaaaattaaccaaaatggataaagttctgggctcttctattcatatggagtgcaaggtgtctggttcacttcccattagtgctcagtggtttaaggatggaaaagaaatatctacaagtgcaaaatacagacttgtgtgccatgagagatctgtgtctctggaagttaataatctggaattagaagatactgcaaattacacatgcaaagtgtcaaatgtagcaggagatgatgcatgcagtggcatcttaactgtgaaagaaccaccaagcttcctagtgaaacctgggcgacagcaagccatacctgattctacagtggaatttaaggcaatactaaaaggaacaccaccatttaaaataaaatggtttaaggatgatgtggaacttgtctcaggtcctaaatgtttcattggcttggaagggtcgactagcttcttaaatctctactcagtggatgcttctaagactggacagtatacttgccatgttaccaatgatgttggtagcgactcttgtactacgatgttgcttgtgacagaaccaccaaagtttgtaaagaaattagaagcctccaaaattgtgaaagcaggtgactcttcacgacttgaatgcaagatagctggatccccagaaatcagagttgtgtggttccgaaatgaacatgaacttccagccagtgataagtacagaatgactttcattgactcagtggccgtcatacagatgaacaatctcagtactgaggacagtggagatttcatttgtgaggctcagaatcccgctggcagcacaagctgcagtaccaaggttatagtaaaagagccacctgtttttagcagcttccctcctatagtagaaacccttaaaaatgctgaagtcagtcttgaatgtgaactttcgggaacaccaccgtttgaggtggtatggtacaaagacaagcggcaactcagaagcagcaagaaatacaagattgcatccaaaaacttccacacaagtattcacattctcaatgtggacacttcagacatcggtgaataccactgcaaagcacagaatgaagtgggaagtgatacttgtgtttgtactgtaaaattgaaagaaccaccaagatttgtctccaaactgaacagcctcactgttgtagccggagagcctgctgaattacaagcatccatagaaggcgcccagcctatttttgtccagtggcttaaagagaaggaagaagtgattagagaaagtgaaaacatcaggattacatttgtggaaaatgttgcaactctacagtttgcaaaagcagagccagctaatgctggaaagtatatctgccaaatcaagaatgatggtggaatgagggagaacatggccacactgatggtcttagagcccgcagtcattgttgagaaggcaggaccgatgacggtgactgtaggagaaacgtgcactctggagtgtaaggtggctggcactccggaactctctgttgaatggtacaaggatggaaagctgttgaccagcagccaaaaacacaaatttagcttctacaacaaaatctcttccttaaggattctctcagttgaaaggcaagatgcaggcacatacactttccaggttcaaaataatgttgggaaaagcagctgcacagctgtggttgatgtttcagaccgagcagttcctccctctttcacacgaagactgaaaaatactggtggggtgttaggtgcttcttgcatcttggaatgcaaagtagctggatcatcacctatttcagttgcctggtttcatgagaaaaccaagattgtcagtggagcaaagtaccaaaccacattttcagataatgtctgcacattgcagttgaattctctggattcctcagatatgggcaattacacatgcgtggctgctaatgtcgctgggtctgatgaatgtcgtgcagtgctaactgtacaagaaccaccctcttttgtgaaagaacctgaacctttggaagtactaccaggcaaaaatgtaaccttcacaagcgttattagaggaacccctccattcaaagtcaactggttcagaggtgccagagaactagtgaaaggagaccggtgcaacatctattttgaagacactgtggcagaactggaattatttaatattgacatatctcagagtggggaatacacctgtgtggtttctaacaacgctggccaagcatcttgcactacccgtctctttgtgaaagaaccagctgcatttttgaagagattaagtgatcattctgtagaaccagggaagtccataattctggagagcacctacactggaacacttccaatttctgtcacttggaaaaaggatggttttaacataactacctctgaaaaatgtaacatagtcacaacagagaaaacttgtatcctggaaattctgaatagcacaaaaagagatgcagggcagtattcctgcgagattgaaaatgaggcaggaagggatgtttgtggagctctggtatctacattagaaccgccttattttgttacggaactggaacctctggaggcagcagttggagattcggtttctttacaatgccaagttgctgggacaccagaaattacagtgtcttggtacaaaggagataccaaattacggccaactcctgaatacaggacctactttacaaacaatgtggccacacttgtttttaataaagtgaacatcaatgacagtggagagtacacatgcaaagcagaaaatagtataggaactgcttcttctaagactgtgttcagaattcaagagcgccaactcccaccttcttttgcaagacaattaaaggacattgaacaaactgtggggttacctgttacactcacttgtcgattaaatggctctgcacccatccaagtgtgctggtatagagatggagtacttttaagagaccatgaaaatctacagacttcatttgtagataatgtggcaactttaaaaattttgcaaactgacttgagtcactctggccagtactcttgctcagcttccaacccacttggaacagcatcttctagtgctagactcacagcaagagaacccaagaaatctcccttctttgacatcaagcctgtatctatagatgttattgctggagaaagtgctgattttgagtgtcatgttactggtgctcaaccgatgcgaatcacttggtcaaaagataacaaggagatccgtcctggaggaaactatacaatcacatgtgtgggaaacactcctcatttgagaattcttaaagtaggcaaaggagactctggtcaatatacttgccaagcaaccaatgatgttggcaaagacatgtgctcagctcagctcagtgtaaaagaacctccaaagtttgttaagaaattagaagcttcaaaagttgcaaagcagggagaatccattcaactggaatgtaaaataagtggctccccagaaatcaaagtttcatggttccgaaatgacagcgaacttcatgaaagttggaaatacaacatgtcattcattaattctgtggcattgcttacgatcaatgaagctagtgctgaagacagcggggactacatttgtgaggctcataatggtgttggtgacgccagttgcagcacagcgttgacagtgaaagcacctcctgttttcacccagaagccttctccagtaggagctcttaaaggttctgatgtgattctccaatgtgaaatttcgggaactcccccatttgaagtagtatgggttaaagatcgaaagcaagttagaaacagcaagaaatttaaaatcacttcaaaacattttgatacaaatcttcatatccttaatcttgaagcctccgatgtcggggaatatcactgcaaagctactaatgaggtgggaagtgacacgtgttcttgctctgtcaagttcaaagaacctccacgattcgtgaaaaagctaagtgacacctcaacccttattggggatgctgttgagttacgggccatagtggagggcttccagccaatttctgttgtctggctgaaagatagaggtgaagtcatcagagagagtgaaaataccaggatttcattcattgataacattgcaaccctccagctggggagtccagaagcatctaattctggaaaatatatatgccaaatcaaaaacgatgctggaatgagagaatgctctgcagtcttgactgtactagaaccagcaagaatcatagagaagcccgaacccatgactgtcactactggaaatccttttgcattagagtgtgtagtgactggaacaccagaactctcagccaagtggttcaaagatggaagagaattgtctgcagacagcaaacatcacattacattcatcaataaagtggcttcccttaaaatcccctgtgccgaaatgagtgacaaaggattatatagctttgaagtgaaaaacagtgttggcaaaagtaactgcactgtatccgtccatgtttctgatcggattgtgcctccttccttcatccgcaagctgaaagacgtgaatgccatcctgggggcctcagttgttttggagtgccgagtctctggctcagccccgatttcagttggctggtttcaggatggaaatgagattgttagtgggcccaaatgtcagtccagcttttcggaaaacgtctgtactttgaatctgagcttgttggagccctccgacacaggcatatacacgtgtgtggctgccaatgtagctggttccgatgagtgctcagcagtcctgactgtgcaagaaccaccatcttttgaacaaacccctgattctgtggaagttttgcctggaatgagcctcacattcaccagtgtcatcagaggcacccctcctttcaaggtcaagtggtttaaaggcagcagggaactggtgcctggggagtcatgcaacatctctctggaagattttgtcacagaactggagttgtttgaggtgcagccattagaaagtggagactattcttgcctcgttacaaatgatgctggcagtgcttcctgtaccacacatctttttgtgaaagaaccagccacctttgtgaaaagattggctgatttcagtgttgagacaggaagccccatagttctcgaggccacatacactggcacacctccaatctcagtgagctggataaaggacgagtatcttatttcacaatctgagagatgcagtattactatgacagaaaaatctaccatactggaaattcttgagagcacaatagaggattatgcacagtacagctgcctgatagaaaatgaggctggtcaagatatctgtgaagctctggtgtctgtcttagaaccaccgtactttattgaacctctggaacatgtggaagcagtcattggagaacctgcaactttacagtgtaaagtggatggaactccagaaattagaatttcttggtataaagaacacacaaagctacgatcagctcctgcatataaaatgcaattcaaaaataacgttgcttccttagtaatcaacaaagtggatcacagtgatgtgggagagtattcatgcaaggcagacaacagtgtgggggcagtcgcttcttcagctgtgcttgttatcaaagcgcgcaaacttccacctttctttgcaagaaaactgaaagacgttcatgagactctaggcttcccagttgcatttgaatgccgcatcaatggctcagaacctcttcaagtgtcttggtacaaggatggggttcttttgaaagatgatgctaatttgcagacatcttttgttcataatgtagcaactcttcagattttacaaactgaccagagccacatagggcagtataattgctctgcttctaatcctcttgggactgcttcatccagtgccaagctcattctctcagagcatgaagtgcctcctttctttgatctaaagcctgtatcagtagatcttgctcttggagaaagtggtacttttaaatgtcatgtaactgggactgcaccaatcaaaatcacttgggccaaagataaccgagagattcgccctggaggcaactacaagatgactttggtagaaaatactgccactctgacagttctcaaagtaggcaaaggcgatgccgggcagtacacctgctatgcaagcaacatcgctggaaaagactcttgttctgctcagctgggtgtacaagaaccacccaggttcattaagaagctagaaccttcaagaattgtgaaacaggatgaattcacaaggtatgaatgcaaaatcggtgggtctccagaaatcaaagttttatggtataaggacgagactgaaattcaagagagcagtaaattcagaatgtcattcgttgactcggtggctgtgctggaaatgcacaatctcagtgttgaagacagtggagactacacctgtgaggcccacaatgcagcaggcagtgccagcagcagcacatccttaaaagttaaagaaccacccattttccgcaaaaagcctcatcctatagagacactgaaaggagctgatgttcaccttgaatgtgagcttcagggcactcccccatttcacgtttcttggtataaagacaagagagaacttaggagcggcaagaagtacaagataatgtctgagaacttcctaaccagtatccacatcctgaatgtcgatgctgcagacattggggaatatcagtgtaaagccacaaatgatgtgggaagcgacacttgcgttggttccatcgctctcaaagcaccaccaagatttgtgaagaagctcagtgacatatctactgtcgttggtaaagaagttcagctgcagactaccattgaaggcgctgaacccatttcagtggtgtggttcaaagataagggagaaatcgttagagaaagtgacaacatatggatttcttattcagaaaacattgcaaccttacagttttcaagagtggaaccagccaatgctggaaaatacacttgtcagatcaaaaacgatgctgggatgcaagagtgcttcgccacgctatccgttctcgagcctgcaacaattgtagaaaagccagaatccataaaagttaccacgggagacacctgtaccttggagtgtacagtagctggcacccctgaactcagtactaagtggtttaaggatggaaaagagctaacaagtgacaacaaatacaaaataagcttcttcaacaaagtatccggccttaagatcatcaatgtagcaccgagtgacagtggggtatacagttttgaggtgcagaaccctgttggcaaagacagctgcacagcttcattgcaggtttcagaccgaaccgttcctccttcattcacaagaaaattgaaagagacaaatggtctatccggctcctcagttgtaatggagtgtaaagtctatgggtcacctccaatctctgtctcctggttccatgaaggaaatgagatcagtagtggaaggaaataccagaccaccctgacagataatacttgtgctttaactgtgaacatgctggaagaatcagacagtggtgactacacatgtatagctactaatatggctggttctgatgaatgtagtgctcctttgactgtgagagaaccaccatcttttgttcagaaacctgatcccatggatgttttaactgggaccaatgtaactttcacaagtatcgtaaaaggaacacctcctttcagtgttagctggttcaaaggtagcagtgaactagtaccaggtgacagatgcaacgtgtctttggaggattcagttgctgaactggagttgttcgatgtagatacatcacaaagtggagaatatacttgcatagttagcaatgaagctggcaaggcttcttgtacaacacatctctacataaaagccccagccaaatttgtgaagaggctgaatgattacagcatagagaaaggaaaacccctgatcctagagggtacattcactggaactcctcccatttcggttacctggaagaaaaatggcataaatgtaactccttctcagaggtgtaatataactacgactgaaaaatcgccaatcctggaaattccaagtagcacagtagaggatgcaggacaatacaactgctacattgaaaatgcctctggaaaagattcctgttcagcacaaatactcatactagaaccaccgtattttgtcaagcagttggagccggttaaggtgtctgttggagattctgcctctctacaatgccagcttgctggaacccctgaaattggggtatcctggtataaaggagatacaaaattgagacccactacgacttacaaaatgcattttaggaataatgttgctacactggttttcaaccaggttgatattaatgatagtggagaatatatctgcaaagctgaaaacagcgtgggagaagtttctgcatcaactttccttaccgttcaagagcaaaaacttccaccatcattttctcgacaattgagagatgttcaagaaacagttggactgccagttgtttttgattgtgccataagtggatcagaacctatctccgtgtcttggtataaagacggcaagccattgaaagacagcccaaatgtacaaacatcatttttagacaatacagccacactcaatatttttaaaactgaccggagccttgcaggccagtattcctgcacagctacaaaccctataggctctgcttcttccagtgccaggctcattctcacagaggggaagaacccacccttctttgacatccgtcttgcccctgtggatgctgtggtgggagaaagtgctgactttgagtgccacgtcacgggcacacaaccgataaaggtcagctgggccaaagacagcagagaaatacgaagtggcggaaagtaccagattagttatctggaaaacagcgcccacctgacagtcctcaaagtagacaaaggagattctggacaatatacctgctatgctgtgaatgaagtgggaaaagactcttgcacagctcagctgaatataaaagagcggctcatcccaccaagtttcactaaaagactctcagagacagtagaagaaacagaagggaattctttcaaacttgagggacgtgtggctggttcccaacctataactgttgcctggtacaaaaataatatagagatacaaccaacttctaactgtgaaataacattcaagaacaacacgttagtgctgcaagtcaggaaagcaggcatgaacgacgctggtttgtacacatgcaaagtgtccaatgatgcaggctctgctctgtgcacgtcttcaatcgtcatcaaagaacctaagaagccacctgtatttgatcagcaccttactccagtaacagtgagtgaaggagaatacgtgcagctcagctgccatgtccagggatctgagccaattaggatccagtggttgaaggctggcagggaaataaagccttcagacagatgcagcttcagctttgctagtgggacagctgtactggaactcagagatgtggctaaagcagattcgggagattatgtgtgtaaagcttcaaatgtggctggaagtgacactaccaaatcaaaagtgaccattaaagacaaaccagctgtggccccagcaaccaagaaagctgcggtagatggaagactcttttttgtgtcagaacctcagagtatcagagtcgtagaaaaaaccactgcgaccttcattgcaaaagttggaggtgacccaatcccaaatgttaaatggacaaaagggaagtggagacagctgaaccaaggaggtcgtgttttcatccaccaaaaaggcgatgaagcaaaactggagattagggacaccacaaaaactgattctgggttataccgatgcgtggcatttaacgaacatggtgaaattgaaagtaatgttaacttacaggtggatgaaaggaagaaacaagagaaaattgaaggcgatcttagagcaatgctgaaaaagactccaatcttaaagaaaggagctggagaagaagaggaaattgatatcatggaacttctcaaaaatgttgatcctaaagaatatgaaaaatatgcccgcatgtatggaatcactgacttccgaggtcttcttcaagcatttgaactgctcaagcaaagccaagaagaagagacacatagactggaaattgaggaaatagagaggtcagagagggacgaaaaggaatttgaggaacttgtatcatttattcagcaaagactgtcacagacagagcctgtcactctgatcaaggacattgaaaatcagacagttttgaaagataatgatgctgtctttgaaattgacattaaaattaattatccagaaatcaagctttcgtggtacaaaggaactgaaaaactggaacccagtgataaatttgaaataagcattgatggtgaccgacatacactcagagtcaaaaactgtcaacttaaagaccagggcaattatcgattggtttgtggtccacacatcgctagcgctaaactaactgtaattgagcctgcatgggaacggcatcttcaggatgtgactctgaaagaaggccagacttgcaccatgacagtccaattttctgtaccaaatgtaaaatctgaatggttcagaaatggcagaatccttaaaccccaaggtagacataaaacagaagtggaacacaaagtccataaattgaccattgcagatgttcgagcagaagaccagggtcagtacacctgcaaatatgaagaccttgaaacttcagcagaactcagaatcgaagctgaaccaattcagtttacaaagcgcatacagaacatcgtggtgagtgagcatcagtctgccacctttgagtgtgaagtgtcctttgatgatgccattgtaacatggtacaaaggaccaacagaactgacagagagccagaaatacaacttcaggaatgatggccgctgccattatatgaccatccacaatgtgaccccagacgatgaaggtgtctactcggtcatcgctcggctggagccaagaggtgaagcaagaagcacggcagagctgtacctaacgacgaaagaaatcaaacttgagctgaagcctcctgatattcctgactccagagttccaatcccaaccatgcctatcagagcagtgccaccagaagaaatccctcctgtggttgctcctcctgtcccccttttgctaccaacacccgaagaaaagaaaccaccaccaaaacgtattgaagttaccaaaaaggctgtgaagaaagatgccaaaaaagttgttgcaaagcccaaagagatgacaccacgtgaagagattgtcaagaagcctccacctcctactaccttaattccagcaaaagctcctgaaatcattgatgtatcctctaaagctgaagaagtaaaaataatgactataaccagaaagaaagaggttcagaaagaaaaagaagctgtgtatgagaaaaagcaagcagtccacaaggagaagagagtcttcattgaatctttcgaagaaccttatgacgaactggaggtagaaccatacacagagccatttgaacaaccttattatgaagaaccagatgaagactatgaagagattaaggtagaagctaaaaaagaagttcacgaggaatgggaagaagattttgaagaagggcaagaatactatgaaagggaagaaggctatgacgaaggggaggaagagtgggaagaggcttaccaagaaagggaagtaattcaagttcaaaaggaggtctatgaagaatcacatgagagaaaagttccagccaaagtacctgaaaagaaagcaccaccacctcctaaagttataaagaagccagtaattgaaaaaattgaaaagacttctcgaagaatggaggaagaaaaagttcaagtcaccaaagtacctgaagtttcaaagaagattgttccacaaaaaccttcccggactccagtacaggaagaagttattgaagtgaaagtaccagctgtgcatacaaagaagatggttatttcagaagaaaagatgttctttgcttctcacacagaggaggaggtgtcagtcacagtccccgaggtacaaaaggaaattgttactgaagagaaaattcacgttgccgtttccaaaagggttgaaccaccacctaaagtccctgagctacctgagaaaccagctccagaagaagtggcccctgttcctatccctaaaaaagtggagcccccagcaccaaaagttcctgaggttcccaagaaacccgtgccagaggagaaaaagccagttcctgtgcctaagaaggaacctgctgctcccccaaaagtcccagaggtgccaaagaaacctgtccctgaagaaaagattcccgttcctgttgcaaagaaaaaggaagctcccccagctaaagttcctgaagtacagaagggagttgtgacagaagaaaaaataaccattgtaactcaaagagaggaatctccaccaccagcagtgccagaaataccaaagaagaaagttcctgaagaaaggaaacctgttcctcggaaggaggaagaagttccaccaccaccaaaagtgccagctctgcctaagaaacccgtcccagaggagaaagttgcagtgccagttcctgtcgctaagaaagctcctcctccccgagctgaagtctctaagaaaactgttgtagaagaaaagagatttgttgctgaagaaaaactatccttcgcagttcctcaaagagtggaagtcacgcggcacgaagtatctgcagaggaggaatggagttactcagaagaggaggaaggtgtgtccatttcagtttatagagaagaagaaagagaggaggaggaagaagcagaggttacagaatatgaagtgatggaagagcctgaggaatatgttgtggaagaaaagctgcacattatttctaagagagtggaagctgagccagctgaagtgacagagaggcaggagaagaaaattgtactgaaaccaaaaattcctgctaaaatagaggagcctccaccggctaaagttcctgaagcacctaagaaaattgtgccagaaaagaaagttcctgctccagttcctaaaaaggaaaaggtgcccccacctaaagtgccagaagagccaaagaaaccagttccagaaaaaaaggttcctccaaaagtcattaagatggaagaacctctcccagccaaagtgactgagaagcacatgcaaattacccaggaagaaaaagttcttgttgctgtaactaaaaaagaggcgcctccaaaagcaagagtgccagaggaaccgaagagagctgtcccagaagaaaaagttctgaaactcaaacctaaaagagaggaggaaccaccagctaaagtgactgaattcagaaaaagagtggttaaagaagaaaaagtatcaattgaagctccaaaaagagaacctcaacccatcaaagaagtaactataatggaagagaaagaaagggcttataccctagaagaagaagctgtttcagtacaacgggaagaagaatatgaggaatatgaagaatatgattataaagaatttgaggagtatgaaccaacagaagaatatgaccaatatgaagaatacgaggagcgggagtatgaacgatatgaagagcatgaagaatacatcacagaaccagagaagcctatccctgtaaagcctgtcccagaagaaccagttcccacaaaaccaaaggccccaccggctaaagtgctgaagaaagctgtccctgaagaaaaagtaccagtgcccattcctaagaaactcaaacctccaccacccaaagtgcctgaagaaccaaagaaagtttttgaggaaaaaatacatatttcaattaccaaacgtgaaaaagagcaggtgactgaacccgctgctaaagtgcccatgaagcccaagagggttgtcgcagaagaaaaagtacctgtccctagaaaagaagtagcaccacctgttagagtgccagaagtgcctaaagaacttgaaccagaagaggttgcctttgaagaggaagttgtaacccatgtagaagaatatcttgtagaagaagaagaagagtacattcatgaagaagaggagttcataactgaggaagaagtggtgccagtgataccagtcaaagtgcctgaggtacccaggaaacctgttccagaagagaagaaacctgttcctgttcccaagaagaaggaagctccaccggcaaaagtgcctgaggttcctaagaagccagaggagaaagttcctgtgcttattcctaaaaaggagaagcctccgccagcaaaagttcctgaagtgcccaagaaacctgtgccagaggagaaagtaccagtaccagttcctaaaaaggtggaagctccacctgccaaagtgccagaggtacccaagaagcctgtgcctgagaagaaggtgccagttcctgctcctaagaaagtggaggctccacctgcaaaagtgccagaggtgcccaagaagctcatcccagaagaaaagaaaccaacacctgttccgaaaaaagtggaagcaccaccacccaaagtgccaaagaaacgtgaaccagttccagttcctgtagctctacctcaggaagaggaagttctatttgaagaagaaattgttcctgaagaggaagttctacctgaggaagaggaagttctacctgaggaagaggaagttctacctgaagaagaggaagttctacctgaagaagaggaaattccacctgaggaagaggaagttcctcccgaagaagaatatgtacctgaggaagaagaatttgtacctgaagaagaagtccttccagaagttaaacctaaggtgccagtacctgcaccagtgcctgaaattaagaagaaagtgacagagaagaaagtggtcattcccaagaaagaggaggctccccctgccaaagttcctgaggtgcctaagaaggtggaagaaaaacgaatcattctccctaaagaagaggaagttctaccagttgaagtgactgaggagcctgaagaagagcctatttcagaagaagaaatcccagaagaaccacctagcatagaggaagttgaagaggtggcaccacctagagtgcctgaagtgattaagaaagcagtacctgaagcacctactcctgttcctaaaaaagtggaggcaccaccagctaaagtgtcaaagaaaattcctgaggaaaaagtacctgttcctgttcagaaaaaagaggcacccccagccaaagtgcctgaagtaccaaagaaagtcccagaaaagaaagtccttgtgcctaaaaaggaagctgttcccccagctaaagggagaactgtccttgaagaaaaagtatcagttgccttccgccaagaagtagtagtaaaagaaagactagaattagaagtagtagaagcagaagtggaagaaattccggaagaagaagagttccatgaagttgaagaatattttgaagaaggcgagtttcatgaagtagaagaattcatcaaattagaacaacatagagttgaagaagaacacagagttgaaaaagttcatagggtaatagaagtttttgaggctgaagaagtggaagtatttgaaaaaccaaaagctccacctaaagggcctgagatatctgagaaaatcatccctccaaaaaaaccgcccactaaagttgttcctcgaaaagagccaccagctaaagtaccggaggtgcctaagaaaattgtggtagaagaaaaagtacgtgttcctgaagagcccagagttccaccaactaaagtgcctgaagtgctgccaccgaaggaagtggtcccagaaaagaaagtaccggtgcctcctgccaaaaagccagaagctccacctcctaaagtgcctgaggctcccaaagaagttgttcctgaaaagaaagtgccagtgcctcctcctaaaaagcctgaagtgccacccacaaaagtcccagaggtgccaaaggcagctgtcccagaaaagaaggtgcctgaagctattcctcccaaaccggaaagtcctccccctgaagtgttcgaggagcctgaagaaagtccctcggctcctcctaaaaagcctgaagtcccacctgttagagtgccagaggtcccgaaagaagttgttcctgaaaagaaagtgccagcggctcctcctaaaaagcctgaagtcacacctgttaaagtgcctgaggctcccaaagaagttgttcctgaaaagaaagtgccagtgcctcctcctaaaaagcctgaagtgccacccacaaaagtcccagaggtgccaaaggtagctgtcccagaaaagaaggtgcctgaagctattcctcccaaaccggaaagtcctccccctgaagtgttcgaggagcctgaggaagttgccctagaagagcctcctgctgaagttgtggaagagccagagccagcggcgcctccacaagtgaccgtaccacctaagaaccctgtcccagaaaagaaagcacctgctgtcgttgccaaaaaacctgaactaccaccagtgaaagtgcccgaggtgcccaaggaggttgttcctgaaaagaaggtgcctctggtggttcccaaaaagccagaagccccacctgctaaagtgcctgaagttccaaaagaagttgttccagaaaagaaagtagctgttcccaaaaagccagaagtcccaccagcaaaagtgccagaagtgccaaagaaacctgtcttggaagagaaaccagctgttcctgttccagaaagagcggagtctcctcccccagaagtatatgaagaacctgaggaaattgctcctgaagaggaaattgctcctgaagaggaaaagccagtccctgttgcagaagaggaggaaccagaggttccacctccagcagtgcctgaagagcccaagaagatcatcccagagaagaaagttcctgtcatcaaaaaaccagaagcaccgcctcctaaagaacctgaacctgaaaaggttattgagaagccaaaactcaaaccaagacccccacctcctccacctgctccacctaaggaagatgtgaaggagaaaatattccaacttaaagctattccaaagaagaaagttcctgaaaaccctcaggttccagaaaaagtggagcttacacctctgaaagtgcctggaggtgaaaagaaagttcgcaaattacttccggaacgtaaacctgaaccaaaggaagaagttgttctgaaaagcgttctaagaaaaagacctgaagaagaagaacctaaagtagaacctaaaaaactagaaaaagttaaaaaacctgcagtaccagaaccaccacctccaaaacctgttgaagaggttgaagtacctactgttacaaaaagggaaaggaagattcctgaaccaacaaaagtgcctgaaatcaagccagcaatacctctccctgcacctgaaccgaaaccaaagcccgaagcagaagtgaaaacaatcaaaccacctcctgtggaacctgaaccaacccccatcgctgccccagtaacagtgccagtggttggaaagaaagcagaagccaaagcacctaaggaagaggctgccaagccaaaaggtcctatcaaaggtgtacccaaaaagactccttcaccaatagaagccgaaaggagaaagttaaggccaggaagtggtggagagaaacctcctgatgaagccccgttcacctaccagctaaaggctgtgccactgaagtttgtgaaagaaatcaaagacatcatcttgacagaatcagagttcgttggctcttcagcaatctttgaatgtttggtctccccttccactgcaattacaacctggatgaaagacggtagcaatatccgtgagagtcccaagcacaggtttattgcagatggtaaagacagaaagctgcacatcattgatgttcaactttccgatgctggtgaatacacctgtgttttacgtttgggaaacaaagaaaagacctccacggctaaacttgttgtagaagaacttcctgtgcgttttgtaaaaacactggaagaggaagtcacagtggtcaaaggacagccattgtacttgagctgcgagttaaacaaagagcgtgacgtggtctggaggaaggatggcaagattgtggtggagaaacctggccgaattgtgccaggcgtcattggcttgatgcgggctctgaccatcaacgatgcagatg

SEQ ID NO: 2657 - DNA, 1574 bp, Homo sapiens
gcttctctccatcttgtgattcctttttcctcctgaaccctccagtgggggtgcgagtttgtctttatcaccccccatcccaccgccttcttttcttctcgctctcctacccctccccagcttggtgggcgcctctttcctttctcgccccctttcatttttatttattcatatttatttggcgcccgctctctctctgtccctttgcctgcctccctccctccggatccccgctctctccccggagtggcgcgtcgggggctccgccgctggccaggcgtgatgttgcacgtggagatgttgacgctggtgtttctggtgctctggatgtgtgtgttcagccaggacccgggctccaaggccgtcgccgaccgctacgctgtctactggaacagcagcaaccccagattccagaggggtgactaccatattgatgtctgtatcaatgactacctggatgttttctgccctcactatgaggactccgtcccagaagataagactgagcgctatgtcctctacatggtgaactttgatggctacagtgcctgcgaccacacttccaaagggttcaagagatgggaatgtaaccggcctcactctccaaatggaccgctgaagttctctgaaaaattccagctcttcactcccttttctctaggatttgaattcaggccaggccgagaatatttctacatctcctctgcaatcccagataatggaagaaggtcctgtctaaagctcaaagtctttgtgagaccaacaaatagctgtatgaaaactataggtgttcatgatcgtgttttcgatgttaacgacaaagtagaaaattcattagaaccagcagatgacaccgtacatgagtcagccgagccatcccgcggcgagaacgcggcacaaacaccaaggatacccagccgccttttggcaatcctactgttcctcctggcgatgcttttgacattatagcacagtctcctcccatcacttgtcacagaaaacatcagggtcttggaacaccagagatccacctaactgctcatcctaagaagggacttgttattgggttttggcagatgtcagatttttgttttctttctttcagcctgaattctaagcaacaacttcaggttgggggcctaaacttgttcctgcctccctcaccccaccccgccccacccccagccctggcccttggcttctctcacccctcccaaattaaatggactccagatgaaaatgccaaattgtcatagtgacaccagtggttcgtcagctcctgtgcattctcctctaagaactcacctccgttagcgcactgtgtcagcgggctatggacaaggaagaatagtggcagatgcagccagcgctggctagggctgggagggttttgctctcctatgcaatatttatgccttctcattcagaactgtaagatgatcgcgcagggcatcatgtcaccatgtcaggtccggaggggaggtattaagaatagatacgatattacaccatttcctataggagtatgtaaatgaacaggcttctaaaaggttgagacactggttttttttttt

SEQ ID NO: 2658 - DNA, 1603 bp, Homo sapiens
acccccatgcattggttgcaccctcagatagtacccatgagcttcactgttcagcctcggggcccaggcgcttcctggaatctctccttggccggggttaaaatgcagttcccgctcaaaatgcttcataggttgatagaagtccagatcctgaggaaatctccagctaaatgctcaaaatataaaaactgaagctcacatttgcgaagagcagcagcatggatggattttatgaccagcaagtgccttacatggtcaccaatagtcagcgtgggagaaattgtaacgagaaaccaacaaatgtcaggaaaagaaaattcattaacagagatgtggctcatgattcagaagaactctttcaagatctaagtcaattacaggaaacatggcttgcagaagtggcttttcatggcctgccactgaaaatcaagaaagaaccccacagtccatgttcagaaatcagctctgcctgcagtcaagaacagccctttaaattcagctatggagaaaagtgcctgtacaatgtcagtgcctatgatcagaagccacaagtgggaatgaggccctccaacccccccacaccatccagcacgccagtgtccccactgcatcatgcatctccaaactcaactcatacaccgaaacctgaccgggccttcccagctcacctccctccatcgcagtccataccagatagcagctaccccatggaccacagatttcgccgccagctttctgaaccctgtaactcctttcctcctttgccgacgatgccaagggaaggacgtcctatgtaccaacgccagatgtctgagccaaacatccccttcccaccacaaggctttaagcaggagtaccacgacccagtgtatgaacacaacaccatggttggcagtgcggccagccaaagcttccctcctttgatgattaaacaggaacccagagattttgcatatgactcagaagtgcctagctgccactccatttatatgaggcaagaaggcttcctggctcatcccagcagaacagaaggctgtatgtttgaaaagggccccaggcagttttatgatgacacctgtgttgtcccagaaaaattcgatggagacatcaaacaagagccaggaatgtatcgggaaggacccacataccaacggcgaggatcacttcagctctggcagtttttggtagctcttctggatgacccggcaaattctcattttattgcctggactggtcgaggcatggaatttaaactgattgagcctgaagaggtggcccgacgttggggcattcagaaaaacaggccagctatgaactatgataaacttagccgttcactccgctattactatgagaaaggaattatgcaaaaggtggctggagagagatatgtctacaagtttgtgtgtgatccagaagcccttttctccatggcctttccagataatcagcgtccactgctgaagacagacatggaacgtcacatcaacgaggaggacacagtgcctctttctcactttgatgagagcatggcctacatgccggaagggggctgctgcaacccccacccctacaacgaaggctacgtgtattaacacaagtg

SEQ ID NO: 2659 - DNA, 3173 bp, Homo sapiens
tgatgtgatatggctgcaagtgcctttgacccttttgtctcccttccataaactgaaatacctaagctgctccaacctcctttttgtcttttgtttcataaatcctttcccattgcacatcaactcctgtctctctttgtactgtcactctcatctgttgctttccattcacactgcctttagccactcatcattttgtgcctacaccacagaaacctctgaatgtaatggatgttcctaccagaggacaagtcgtacaatggtggaggaataggttcttcaaataggatcatggacttcttggaggagccaatccctggtgtagggacctatgatgatttcaatacaattgattgggtgagagagaagtctcgagaccgggataggcaccgagagattaccaataaaagcaaagagtcaacatgggccttaattcacagtgtgagtgatgctttttccggctggttgttgatgctccttattgggcttttatcaggttcgttagctggtttgatagacatctctgctcattggatgacagacttaaaagaaggtatatgcacagggggattctggtttaaccatgaacattgttgctggaactctgagcatgtcacctttgaagagagagacaaatgtccagagtggaatagttggtcccagcttatcatcagcacagatgagggagcctttgcctacatagtcaattatttcatgtacgtcctctgggctctcctatttgccttccttgccgtatctcttgtcaaggtgtttgcgccttatgcctgtggctctggaatccctgagataaaaactatcttgagtggtttcattattaggggctatttgggtaagtggactctggttatcaaaaccatcaccttggtgctggcagtgtcgtctggcttgagcctgggcaaagagggccctctagtgcacgtggcttgctgctgtgggaacatcctgtgccactgcttcaacaaatacaggaagaatgaagccaagcgcagagaggtcttgtcggctgcagcagcagctggtgtatctgtagcctttggagcacctataggtggagtattattcagccttgaagaggtcagctactattttcccctcaaaacattgtggcgttcattctttgctgccttggtggcagcattcactctacgctccatcaatccatttgggaacagccgcctggtactattttatgtggagtttcacaccccatggcatctctttgagctcgtgccattcattctgctgggcatatttggtggtctgtggggagcactgtttatccgcacaaacattgcctggtgtcggaagcgaaagaccacccagttgggcaagtatcctgttatagaggtactcgtcgtgacagccatcactgccatcctggctttccccaatgaatacactcggatgagcacaagtgagctcatttctgagctgtttaatgactgtggccttctggactcctccaagctctgtgattatgagaaccgtttcaacacaagcaaagggggtgaactgcctgacagaccggctggcgtgggagtctacagtgcaatgtggcagctggctttaacactcatactgaaaattgtcattactatattcacctttggcatgaagatcccttctggcctctttatccctagcatggctgttggtgctatagcaggtcgacttctaggagtaggaatggaacagctggcttattaccaccaggaatggaccgtcttcaatagctggtgtagtcagggagctgattgcatcacccccggcctttatgcaatggttggggctgcagcctgcttaggtggggtgactcggatgactgtttctcttgttgtcataatgtttgaactgactggtggcttagaatacatcgtgcctctgatggctgcagccatgacaagcaagtgggtggcagatgctcttgggcgggagggcatctatgatgcccacatccgtctcaatggatacccctttcttgaagccaaagaagagtttgctcataagaccctggcaatggatgtgatgaaaccccggagaaatgatcctttgttgactgtccttactcaggacagtatgactgtggaagatgtagagaccataatcagtgaaaccacttacagtggcttcccagtggtggtatcccgggagtcccaaagacttgtgggctttgtcctccgaagagatctcattatttcaattgaaaatgctcgaaagaaacaggatggggttgttagcacttccatcatttatttcacggagcattctcctccattgccaccatacactccacccactctaaagcttcggaacatcctcgatctcagccccttcactgtgactgaccttacacccatggagatcgtagtggatattttccgaaagctgggactgcggcagtgcctggttacacacaacgggcgattgcttggaatcattaccaaaaaggatgtgttaaagcatatagcacagatggcgaaccaagatcctgattccattctcttcaactagaatcatagagttctggatgtaaagcgggaaggacattacagaccatggatatgttgtttaacggtacccaaaacacattttccatatttggatggtgaagtcacattagtgtgttgtctctttcctacaagttaaccagttgcactacataatctctggaaattaattttctctttaggagaaattatagttaggcttccatgatgttacattaggaagatatcatgaaagaataaataagattgctatggtttaattatatttgctttttaaaagatttttttaacttaaaaagtagttagccaatatgcaatcactgaaaactatgcaagagaaattccaaccgtcctgacctataacctgtaggaaaccgacgaaaaagtcactcttttgggatctaactgttgttactggaagacgaaggtaaactaaggggctttgcttttcaaaccagagaaaggaaagccagaaggaaaagagtaatggtattttctagactgtgaagattcagttcaaatgttatccttgttcctgttacaatatttagcattattagtttgttatgtgtgtatgtttatgttaattttaatttctgattataagacaatgctgctttggttaatctcttctaaaggaattta

SEQ ID NO: 2660 - DNA, 1297 bp, Homo sapiens
cctgccccgcgcccagggatcctccagctcctttcgcccgcgccctccgttcgctccggacaccatggacaagttttggtggcacgcagcctggggactctgcctcgtgccgctgagcctggcgcagatcgatttgaatatgacctgccgctttgcaggtgtattccacgtggagaaaaatggtcgctacagcatctctcggacggaggccgctgacctctgcaaggctttcaatagcaccttgcccacaatggcccagatggagaaagctctgagcatcggatttgagacctgcaggtatgggttcatagaagggcacgtggtgattccccggatccaccccaactccatctgtgcagcaaacaacacaggggtgtacatcctcacatccaacacctcccagtatgacacatattgcttcaatgcttcagctccacctgaagaagattgtacatcagtcacagacctgcccaatgcctttgatggaccaattaccataactattgttaaccgtgatggcacccgctatgtccagaaaggagaatacagaacgaatcctgaagacatctaccccagcaaccctactgatgatgacgtgagcagcggctcctccagtgaaaggagcagcacttcaggaggttacatcttttacaccttttctactgtacaccccatcccagacgaagacagtccctggatcaccgacagcacagacagaatccctgctaccagagaccaagacacattccaccccagtggggggtcccataccactcatggatctgaatcagatggacactcacatgggagtcaagaaggtggagcaaacacaacctctggtcctataaggacaccccaaattccagaatggctgatcatcttggcatccctcttggccttggctttgattcttgcagtttgcattgcagtcaacagtcgaagaaggtgtgggcagaagaaaaagctagtgatcaacagtggcaatggagctgtggaggacagaaagccaagtggactcaacggagaggccagcaagtctcaggaaatggtgcatttggtgaacaaggagtcgtcagaaactccagaccagtttatgacagctgatgagacaaggaacctgcagaatgtggacatgaagattggggtgtaacacctacaccattatcttggaaagaaacaaccgttggaaacataaccattacagggagctgggacacttaacagatgcaatgtgctactgattgtttcattgcgaatcttttttagataaaatttttactttaaaaaaaaaaaaaaa

SEQ ID NO: 2661 - DNA, 1759 bp, Homo sapiens
gtgaggagaaagagcgctacgttcacttgatctccagcttccaacttaagcagaacttgagagcatccgaactcctggatttcaggacaagtgaagaagattctttgggctataaagatgaagagtctacttcttctggtgctgatttcaatctgctgggctgatcatctttcagacaactatactctggatcatgacagagctattcacatccaagcagaaaatggcccccatctacttgtggaagcagagcaagccaaggtgttttcacacagaggtggcaatgttacactgccatgtaaattttatcgagaccctacagcatttggctcaggaatccataaaatccgaattaagtggaccaagctaacttcggattacctcaaggaagtggatgtttttgtttccatgggataccacaaaaaaacctatggaggctaccagggtagagtgtttctgaagggaggcagtgatagtgatgcttctctggtcatcacagacctcactctggaagattatgggagatataagtgtgaggtgattgaaggattagaagatgatactgttgtggtagcactggacttacaaggtgtggtattcccttactttccacgactggggcgctacaatctcaattttcacgaggcgcagcaggcgtgtctggaccaggatgctgtgatcgcctccttcgaccagctgtacgacgcctggcggggcgggctggactggtgcaatgccggctggctcagtgatggctctgtgcaatatcccatcacaaagcccagagagccctgtgggggccagaacacagtgcccggagtcaggaactacggattttgggataaagataaaagcagatatgatgttttctgttttacatccaatttcaatggccgtttttactatctgatccaccccaccaaactgacctatgatgaagcggtgcaagcttgtctcaatgatggtgctcagattgcaaaagtgggccagatatttgctgcctggaaaattctcggatatgaccgctgtgatgcgggctggttggcggatggcagcgtccgctaccccatctctaggccaagaaggcgctgcagtcctactgaggctgcagtgcgcttcgtgggtttcccagataaaaagcataagctgtatggtgtctactgcttcagagcatacaactgaatgtgcccttagagcgcatcagttttaaagtcattaagaacatgtgaaaggtgttttttttttccaatatgaactcatgcaagttaccaaaactgtgataacccttttttacttactgtaaagagtcattttcataagatcaattcattgatttgttttttgtaaagctatcattcaatatatattataaattaatataaatttaagggaagctctatgtaaggagacttagagccaaactgtttaagctgtatcatcccaacaaagtatcctttcatgaacggggcatgcaatagcttaagaattgctaggattaaattaaggaaagtaaagctactcagagcaacaggttccacaagcacaaactttacacatttgtacaattttgaaatgcactacaataaacaaattagagcaacacatttgaaatacaggcttctttacataaactgagaggttatacaaaactcagtttcacaagggaacaatctatacctttctaaaagttaatatttcaagtctctaataggcagaatattttactctttaaaatcctgcctttctgaccaaaaaaaaa

SEQ ID NO: 2662 - DNA, 2412 bp, Homo sapiens
ccagcagtggctgcaccatgcacgtgaacggcaaagtggcgctggtgaccggcgcggctcagggcataggcagagcctttgcagaggcgctgctgcttaagggcgccaaggtagcgctggtggattggaatcttgaagcaggtgtacagtgtaaagctgccctgcatgagcaatttgaacctcagaagactctgttcatccagtgcgatgtggctgaccagcaacaactgagagacacttttagaaaagttgtagaccactttggaagactggacattttggtcaataatgctggagtgaataatgagaaaaactgggaaaaaactctgcaaattaatttggtttctgttatcagtggaacctatcttggtttggattacatgagtaagcaaaatggaggtgaaggcggcatcattatcaatatgtcatctttagcaggactcatgcccgttgcacagcagccggtttattgtgcttcaaagcatggcatagttggattcacacgctcagcagcgttggctgctaatcttatgaacagtggtgtgagactgaatgccatttgtccaggctttgttaacacagccatccttgaatcaattgaaaaagaagaaaacatgggacaatatatagaatataaggatcatatcaaggatatgattaaatactatggaattttggacccaccattgattgccaatggattgataacactcattgaagatgatgctttaaatggtgctattatgaagatcacaacttctaagggaattcattttcaagactatgatacaactccatttcaagcaaaaacccaatgaacagcttatgtgttagccatagctgaaaataagcacaaatagcttatattcagatcctatcttcatttgaatatagcttttaaatgaaatgttacagtttgaagttttccttcatgcacttggtgataaacgttttctaaatttttagttaagtatatggataaaaagttatgaactattaaaaatgtgatgtggaccaaaggctaggttgtaatcttgatagtctaaaaaatgatcaaaacaaatgattttcaaggaatattcaatattctgcctttcagaaagtgtatttatatctgtgcttcataaatattaatgttcttcagaacatcattttaaaggagatacttgaattgttatttaaatcaaaccagatgtaaaacactcacatacaagttcatactttaaaagaggaaagctacttaacaatgacaaatatttcacaataataatttttacttatataccatctttcaactgaacatttcagttcttccaagagcttcttagagtagtatattttgggggcagtcaaggaataaactacagtgtaaacatatcccagatgaaaactgctgtatggaaaaatgacagaaagtaactgattgacactgttgattcacagttcagcctcctatctgggaaagacatttctttcctctgctcactttaagaacttttaccgactccaaaaatctcaggaattaaacttttaacagttacagcaataaagaatagttagtactccaaaaatattatatttaagatgctcaacaagaaaaaaatgcaaatgtaatatttttttcaaattacttctttattgacttgtccaaatttcaaaagtgcctacccttcaataaaacttttttattctgatctccataaattacttagtcttctatgtatagctatcaaggaaataaaaccaattttgccacagccacaactgtaaatgtttttgtacccatgctgaaactcataacaacacagacataaaaatagctgtgaggttttgctttttttgttgtcagctatcttaagaatcattaaatacacctgctttgggtaaaactctttgcaagcagtaattaacactagtaacagtgaaagcacaagatttccaaatcagtcgttttctcaaaaaaatatcgtataagtgactcatcctgtctgctaactccagacctcccagcttgaagccaaatctttccatgtgagattgatatggatttcctagaagtactggaatgttgtcatatcttgccctattttaattctgctatagaaaacaattgccttcacttttaaggagtaatttgaatattaataactctggtctagattttcatataatgtattaaagacaaagtagtgaacatcaatgaacatctgatagagataaactgtaatcaggcataagcttgtttgtatgttctggcagtgactaatcagtaaatgatgtcggtttgcccagtatcacttatcttctgtatttaatacattatatgaaaatctagaccagagttattaatattcaaattactccttaaaagtgaaggcaattgttttctatagcagaattaaaataggcaag

SEQ ID NO: 2663 - DNA, 2518 bp, Homo sapiens
ccagcagtggctgcaccatgcacgtgaacggcaaagtggcgctggtgaccggcgcggctcagggcataggcagagcctttgcagaggcgctgctgcttaagggcgccaaggtagcgctggtggattggaatcttgaagcaggtgtacagtgtaaagctgccctgcatgagcaatttgaacctcagaagactctgttcatccagtgcgatgtggctgaccagcaacaactgagagacacttttagaaaagttgtagaccactttggaagactggacattttggtcaataatgctggagtgaataatgagaaaaactgggaaaaaactctgcaaattaatttggtttctgttatcagtggaacctatcttggtttggattacatgagtaagcaaaatggaggtgaaggcggcatcattatcaatatgtcatctttagcaggactcatgcccgttgcacagcagccggtttattgtgcttcaaagcatggcatagttggattcacacgctcagcagcgttggctgctaatcttatgaacagtggtgtgagactgaatgccatttgtccaggctttgttaacacagccatccttgaatcaattgaaaaagaagaaaacatgggacaatatatagaatataaggatcatatcaaggatatgattaaatactatggaattttggacccaccattgattgccaatggattgataacactcattgaagatgatgctttaaatggtgctattatgaagatcacaacttctaagggaattcattttcaagactatgatacaactccatttcaagcaaaaacccaatgaacagcttatgtgttagccatagctgaaaataagcacaaatagcttatattcagatcctatcttcatttgaatatagcttttaaatgaaatgttacagtttgaagttttccttcatgcacttggtgataaacgttttctaaatttttagttaagtatatggataaaaagttatgaactattaaaaatgtgatgtggaccaaaggctaggttgtaatcttgatagtctaaaaaatgatcaaaacaaatgattttcaaggaatattcaatattctgcctttcagaaagtgtatttatatctgtgcttcataaatattaatgttcttcagaacatcattttaaaggagatacttgaattgttatttaaatcaaaccagatgtaaaacactcacatacaagttcatactttaaaagaggaaagctacttaacaatgacaaatatttcacaataataatttttacttatataccatctttcaactgaacatttcagttcttccaagagcttcttagagtagtatattttgggggcagtcaaggaataaactacagtgtaaacatatcccagatgaaaactgctgtatggaaaaatgacagaaagtaactgattgacactgttgattcacagttcagcctcctatctgggaaagacatttctttcctctgctcactttaagaacttttaccgactccaaaaatctcaggaattaaacttttaacagttacagcaataaagaatagttagtactccaaaaatattatatttaagatgctcaacaagaaaaaaatgcaaatgtaatatttttttcaaattacttctttattgacttgtccaaatttcaaaagtgcctacccttcaataaaacttttttattctgatctccataaattacttagtcttctatgtatagctatcaaggaaataaaaccaattttgccacagccacaactgtaaatgtttttgtacccatgctgaaactcataacaacacagacataaaaatagctgtgaggttttgctttttttgttgtcagctatcttaagaatcattaaatacacctgctttgggtaaaactctttgcaagcagtaattaacactagtaacagtgaaagcacaagatttccaaatcagtcgttttctcaaaaaaatatcgtataagtgactcatcctgtctgctaactccagacctcccagcttgaagccaaatctttccatgtgagattgatatggatttcctagaagtactggaatgttgtcatatcttgccctattttaattctgctatagaaaacaattgccttcacttttaaggagtaatttgaatattaataactctggtctagattttcatataatgtattaaagacaaagtagtgaacatcaatgaacatctgatagagataaactgtaatcaggcataagcttgtttgtatgttctggcagtgactaatcagtaaatgatgtcggtttgcccagtatcacttatcttctgtatttttcctctgtcgtgtaaatagtataaccttttcatttatggacaattttttggactagtagccttcaatatacattctgctttgaattaattttttcaaatcaataaattatgtagacatttaaaatcaaatatcaagtagaattgaaaaatgtgagttacataagttaaaaacttactttaaatcttaccttctataggtagctc

SEQ ID NO: 2664 - DNA, 2289 bp, Homo sapiens
gcagagagggcactgggaggaggcagtgggagggcggagggcgggggccttcggggtgggcgcccagggtagggcaggtggccgcggcgtggaggcagggagaatgcgactctccaaaaccctcgtcgacatggacatggccgactacagtgctgcactggacccagcctacaccaccctggaatttgagaatgtgcaggtgttgacgatgggcaatgatttgttgccgctgcgtctcgccagattgaggcatcccctccgacatcactggagcatatctggaggggtggacagttctccacagggagacacgtccccatcagaaggcaccaacctcaacgcgcccaacagcctgggtgtcagcgccctgtgtgccatctgcggggaccgggccacgggcaaacactacggtgcctcgagctgtgacggctgcaagggcttcttccggaggagcgtgcggaagaaccacatgtactcctgcagatttagccggcagtgcgtggtggacaaagacaagaggaaccagtgccgctactgcaggctcaagaaatgcttccgggctggcatgaagaaggaagccgtccagaatgagcgggaccggatcagcactcgaaggtcaagctatgaggacagcagcctgccctccatcaatgcgctcctgcaggcggaggtcctgtcccgacagatcacctcccccgtctccgggatcaacggcgacattcgggcgaagaagattgccagcatcgcagatgtgtgtgagtccatgaaggagcagctgctggttctcgttgagtgggccaagtacatcccagctttctgcgagctccccctggacgaccaggtggccctgctcagagcccatgctggcgagcacctgctgctcggagccaccaagagatccatggtgttcaaggacgtgctgctcctaggcaatgactacattgtccctcggcactgcccggagctggcggagatgagccgggtgtccatacgcatccttgacgagctggtgctgcccttccaggagctgcagatcgatgacaatgagtatgcctacctcaaagccatcatcttctttgacccagatgccaaggggctgagcgatccagggaagatcaagcggctgcgttcccaggtgcaggtgagcttggaggactacatcaacgaccgccagtatgactcgcgtggccgctttggagagctgctgctgctgctgcccaccttgcagagcatcacgtggcagatgatcgagcagatccagttcatcaagctcttcggcatggccaagattgacaacctgttgcaggagatgctgctgggagggtcccccagcgatgcaccccatgcccaccaccccctgcaccctcacctgatgcaggaacatatgggaaccaacgtcatcgttgccaacacaatgcccactcacctcagcaacggacagatgtgtgagtggccccgacccaggggacaggcagccacccctgagaccccacagccctcaccgccaggtggctcagggtctgagccctataagctcctgccgggagccgtcgccacaatcgtcaagcccctctctgccatcccccagccgaccatcaccaagcaggaagttatctagcaagccgctggggcttgggggctccactggctccccccagccccctaagagagcacctggtgatcacgtggtcacggcaaaggaagacgtgatgccaggaccagtcccagagcaggaatgggaaggatgaagggcccgagaacatggcctaaggcacatcccactgcaccctgacgccctgctctgataacaagactttgacttggggagaccctctactgccttggacaactttctcatgttgaagccactgccttcaccttcaccttcatccatgtccaacccccgacttcatcccaaaggacagccgcctggagatgacttgagccttacttaaacccagctcccttcttccctagcctggtgcttctcctctcctagccccggtcatggtgtccagacagagccctgtgaggctgggtccaattgtggcacttggggcaccttgctcctccttctgctgctgcccccacctctgctgcctccctctgctgtcaccttgctcagccatcccgtcttctccaacaccacctctacagaggccaaggaggccttggaaacgattcccccagtcattctgggaacatgttgtaagcactgactgggaccaggcaccaggcagggtctagaaggctgtggtgagggaagacgcctttctcctccaacccaac

SEQ ID NO: 2665 - DNA, 3524 bp, Homo sapiens
tctccgtcagccgcattgcccgctcggcgtccggcccccgacccgtgctcgtccgcccgcccgcccgcccgcccgcgccatgaacgccaaggtcgtggtcgtgctggtcctcgtgctgaccgcgctctgcctcagcgacgggaagcccgtcagcctgagctacagatgcccatgccgattcttcgaaagccatgttgccagagccaacgtcaagcatctcaaaattctcaacactccaaactgtgcccttcagattgtagcccggctgaagaacaacaacagacaagtgtgcattgacccgaagctaaagtggattcaggagtacctggagaaagctttaaacaagaggttcaagatgtgagagggtcagacgcctgaggaacccttacagtaggagcccagctctgaaaccagtgttagggaagggcctgccacagcctcccctgccagggcagggccccaggcattgccaagggctttgttttgcacactttgccatattttcaccatttgattatgtagcaaaatacatgacatttatttttcatttagtttgattattcagtgtcactggcgacacgtagcagcttagactaaggccattattgtacttgccttattagagtgtctttccacggagccactcctctgactcagggctcctgggttttgtattctctgagctgtgcaggtggggagactgggctgagggagcctggccccatggtcagccctagggtggagagccaccaagagggacgcctgggggtgccaggaccagtcaacctgggcaaagcctagtgaaggcttctctctgtgggatgggatggtggagggccacatgggaggctcacccccttctccatccacatgggagccgggtctgcctcttctgggagggcagcagggctaccctgagctgaggcagcagtgtgaggccagggcagagtgagacccagccctcatcccgagcacctccacatcctccacgttctgctcatcattctctgtctcatccatcatcatgtgtgtccacgactgtctccatggccccgcaaaaggactctcaggaccaaagctttcatgtaaactgtgcaccaagcaggaaatgaaaatgtcttgtgttacctgaaaacactgtgcacatctgtgtcttgtgtggaatattgtccattgtccaatcctatgtttttgttcaaagccagcgtcctcctctgtgaccaatgtcttgatgcatgcactgttccccctgtgcagccgctgagcgaggagatgctccttgggccctttgagtgcagtcctgatcagagccgtggtcctttggggtgaactaccttggttcccccactgatcacaaaaacatggtgggtccatgggcagagcccaagggaattcggtgtgcaccagggttgaccccagaggattgctgccccatcagtgctccctcacatgtcagtaccttcaaactagggccaagcccagcactgcttgaggaaaacaagcattcacaacttgtttttggtttttaaaacccagtccacaaaataaccaatcctggacatgaagattctttcccaattcacatctaacctcatcttcttcaccatttggcaatgccatcatctcctgccttcctcctgggccctctctgctctgcgtgtcacctgtgcttcgggcccttcccacaggacatttctctaagagaacaatgtgctatgtgaagagtaagtcaacctgcctgacatttggagtgttcccctcccactgagggcagtcgatagagctgtattaagccacttaaaatgttcacttttgacaaaggcaagcacttgtgggtttttgttttgtttttcattcagtcttacgaatacttttgccctttgattaaagactccagttaaaaaaaattttaatgaagaaagtggaaaacaaggaagtcaaagcaaggaaactatgtaacatgtaggaagtaggaagtaaattatagtgatgtaatcttgaattgtaactgttcgtgaatttaataatctgtagggtaattagtaacatgtgttaagtattttcataagtatttcaaattggagcttcatggcagaaggcaaacccatcaacaaaaattgtcccttaaacaaaaattaaaatcctcaatccagctatgttatattgaaaaaatagagcctgagggatctttactagttataaagatacagaactctttcaaaaccttttgaaattaacctctcactataccagtataattgagttttcagtggggcagtcattatccaggtaatccaagatattttaaaatctgtcacgtagaacttggatgtacctgcccccaatccatgaaccaagaccattgaattcttggttgaggaaacaaacatgaccctaaatcttgactacagtcaggaaaggaatcatttctatttctcctccatgggagaaaatagataagagtagaaactgcagggaaaattatttgcataacaattcctctactaacaatcagctccttcctggagactgcccagctaaagcaatatgcatttaaatacagtcttccatttgcaagggaaaagtctcttgtaatccgaatctctttttgctttcgaactgctagtcaagtgcgtccacgagctgtttactagggatccctcatctgtccctccgggacctggtgctgcctctacctgacactcccttgggctccctgtaacctcttcagaggccctcgctgccagctctgtatcaggacccagaggaaggggccagaggctcgttgactggctgtgtgttgggattgagtctgtgccacgtgtatgtgctgtggtgtgtccccctctgtccaggcactgagataccagcgaggaggctccagagggcactctgcttgttattagagattacctcctgagaaaaaagcttccgcttggagcagaggggctgaatagcagaaggttgcacctcccccaaccttagatgttctaagtctttccattggatctcattggacccttccatggtgtgatcgtctgactggtgttatcaccgtgggctccctgactgggagttgatcgcctttcccaggtgctacacccttttccagctggatgagaatttgagtgctctgatccctctacagagcttccctgactcattctgaaggagccccattcctgggaaatattccctagaaacttccaaatcccctaagcagaccactgataaaaccatgtagaaaatttgttattttgcaacctcgctggactctcagtctctgagcagtgaatgattcagtgttaaatgtgatgaatactgtattttgtattgtttcaagtgcatctcccagataatgtgaaaatggtccaggagaaggccaattcctatacgcagcgtgctttaaaaaataaataagaaacaactctttgagaaacaacaatttctactttgaagtcataccaatgaaaaaatgtatatgcacttataattttcctaataaagttctgtactcaaatgta

SEQ ID NO: 2666 - DNA, 2002 bp, Homo sapiens
tataacgtgagggctgaatgcagcccattctctggagaacttcctcacacaccgcagcaaagagaagactgaaagacaaacctgggtgcagccagagaggtccagatagatgagcttgtggcatccattccccaagttcagcctagggactccacgtaccccagctgggtctcattgttccagaactgcattagttaagattacccagacttggatttcaaaggaatactttcattgttccgtctgtaacacgaagtaattggggccagctggatgtcaggatgcgtgtggttaccattgtaatcttgctctgcttttgcaaagcggctgagctgcgcaaagcaagcccaggcagtgtgagaagccgagtgaatcatggccgggcgggtggaggccggagaggctccaacccggtcaaacgctacgcaccaggcctcccgtgtgacgtgtacacatatctccatgagaaatacttagattgtcaagaaagaaaattagtttatgtgctgcctggttggcctcaggatttgctgcacatgctgctagcaagaaacaagatccgcacattgaagaacaacatgttttccaagtttaaaaagctgaaaagcctggatctgcagcagaatgagatctctaaaattgagagtgaggcgttctttggtttaaacaaactcaccaccctcttactgcagcacaaccagatcaaagtcttgacggaggaagtgttcatttacacacctctcttgagctacctgcgtctttatgacaacccctggcactgtacttgtgagatagaaacgcttatttcaatgttgcagattcccaggaaccggaatttggcgaactacgccaagtgtgaaagtccacaagaacaaaaaaataaaaaactgcggcagataaaatctgaacagttgtgtaatgaagaagaaaaggaacaattggacccgaaaccccaagtgtcagggagacccccagtcatcaagcctgaggtggactcaactttttgccacaattatgtgtttcccatacaaacactggactgcaaaaggaaagagttgaaaaaagtgccaaacaacatccctccagatattgttaaacttgacttgtcatacaataaaatcaaccaacttcgacccaaggaatttgaagatgttcatgagctgaagaaattaaacctcagcagcaatggcattgaattcatcgatcctgggtctttgagatgaaaccctgcaagtagacttacgtgaatgatttttgctgtgccgcttttttagggctcacacatttagaagaattagatttatcaaacaacagtctgcaaaactttgactatggcgtattagaagacttgtattttttgaaactcttgtggctcagagataacccttggagatgtgactacaacattcactacctctactactggttaaagcaccactacaatgtccattttaatggcctggaatgcaaaacgcctgaagaatacaaaggatggtctgtgggaaaatatattagaagttactatgaagaatgccccaaagacaagttaccagcatatcctgagtcatttgaccaagacacagaagatgatgaatgggaaaaaaaacatagagatcacaccgcaaagaagcaaagcgtaataattactatagtaggataaggtagaaattgttctgattgtaattagttttgtattttctatactggtgttagaaaacatatgtttacatttgattaactgtgttgcctatttatgcagggtaatccagctaaaggaagctttctttaattataagtattattgtgactattatagtaatcaagagaatgctatcatcctgcttgcctgtccatttgtggaacagcatctggtgatatgcaattccacactggtaacctgcagcagttgggtcctaatgatggcattagactttcataatgtcctgtataaatgtttttactgcttttagaaaataaagaaaaaaaacttggttcatgttta

SEQ ID NO: 2667 - DNA, 2861 bp, Homo sapiens
ctccgtcccaggggagaaggagaggcgtctgcagggggcagagaccgcagctacctgccgggtgcgccccccacccaggagcgctcgcttcgccccctttcctccccccgcccccacctccttattggtgctagtttgcagcgcccagctcctgcgccttcgcttcgcgtttgaatctggctcgccccttcgtattatgtctgcactccgaaggaaatttggggacgattatcaggtagtgaccacatcgtccagcggctcgggcttgcagccccaggggccaggccaggaccctcagcagcagcttgtgcccaagaagaagcggcagcggttcgtggacaagaacggccggtgcaatgtacagcacggcaacctgggcagcgagacaagccgctacctctcggacctcttcaccacgctggtggacctcaagtggcgctggaacctcttcatcttcattctcacctacaccgtggcctggcttttcatggcgtccatgtggtgggtgatcgcctacactcggggcgacctgaacaaagcccacgtcggtaactacacgccttgcgtggccaatgtctataacttcccttctgccttcctcttcttcatcgagacggaggccaccatcggctatggctaccgatacatcacagacaagtgccccgagggcatcatcctcttcctcttccagtccatcctgggctccatcgtggacgccttcctcatcggctgcatgttcatcaagatgtcccagcccaagaagcgcgccgagaccctcatgttcagcgagcacgcggtgatctccatgagggacggaaaactcacgcttatgttccgggtgggcaacctgcgcaacagccacatggtctccgcgcagattcgctgcaagctgctcaaatctcggcagacacctgagggtgagttccttccccttgaccaacttgaactggatgtaggttttagtacaggggcagatcaactttttcttgtgtcccccctcacaatttgccacgtgatcgatgccaaaagccccttttatgacctatcccagcgaagcatgcaaactgaacagttcgagattgtcgtcatcctagaaggcattgtggaaacaactgggatgacttgtcaagctcgaacatcatatactgaagatgaagttctttggggtcatcgtttttttcctgtaatttccttagaagagggattctttaaagttgattactcccagttccacgcaacatttgaagtccccaccccaccttacagtgtgaaagagcaggaggaaatgcttctcatgtcgtcccctttaatagcaccagccataactaacagcaaagaaagacataattctgtggaatgcttagatggactagatgatattactacaaaactaccatctaagctgcagaaaattactggaagagaagactttcccaaaaaactcttgaggatgagttctacaacttcagaaaaagcctacagcttgggagacttgcccatgaaacttcaacgaataagttcagttccgggcaactcagaagaaaaactggtatctaaaaccaccaagatgttatctgatcccatgagccagtctgtggctgatttgccaccaaagcttcaaaagatggctggaggagcagctaggatggaagggaaccttccagccaaattaagaaaaatgaactctgatcgcttcacataacaaagcactcccttaggcattatttaatgtttgatttagtaatagtccaatatttggcgatgaggtaattctccctaaggaatctgaaagtatattttcctcccagttctacagcatatttcgagaacccttcctttcccaagtattgcgaatgtgcagaaagcaacagttacggagggaggacatcataaggaagttattaacgggcatgtattatcacatcaagcatgcaataatgtgcaaattttgcatttagttttatggcatgatttatatatggcatatttatattgtatattctggaaaaaaaaatatatatatatatttaaaggggagatactctccctgacatttctaacatatgtattaagccaaacatgagtgaatagctttcagggcgataaaactaaatatatgtctgtgtgtgtgtgtgtatgtatacacacatatacatatatatatacacatacatacacatacatacatacatacatatatatctgataaaattgtgatgttttgttcaaagttgtagttcttgtgcatgtttactttattagagtaggaaggctactggcattaattattaataccaaatattttagccttaaatttttgtcattttaaaatctgatttaatgttttctgctgtttaaggtcttgggaggctttcaattgtattttatatgagagaatcacacaagtttgtgctatctatggccctgcaaaaatataaccattacatgtttaaattgtaaattttagagcataccagtactcagtatagcattgaacatttcttatgatttttaaaagttgctagtactggggagaaataattgttgattaatttgagaattattcctttcctagactaattaaaatctggaaatctgttttgtatatgatctaatacaaagatgagctctgaacaaacactgaatcatgttaatagacagtagccaagttatattgaatatatcagaatctgtgtgaagttacacaattaattgtccctgtttcaaactgagtaaattggaaacattttctttctttttctggaaattttgtccattttaaaaaccaatcattttaagaagacatgacaatgcaatgaaacagatgataaatatttatgcttaaaataaaaaaaaaaaaa

SEQ ID NO: 2668 - DNA, 1110 bp, Homo sapiens
gctcggccaggctgctggtacctgcgtccgcccggcgagcaggacaggctgctttggtttgtgacctccaggcaggacggccatcctctccagaatgaagatcttcttgccagtgctgctggctgcccttctgggtgtggagcgagccagctcgctgatgtgcttctcctgcttgaaccagaagagcaatctgtactgcctgaagccgaccatctgctccgaccaggacaactactgcgtgactgtgtctgctagtgccggcattgggaatctcgtgacatttggccacagcctgagcaagacctgttccccggcctgccccatcccagaaggcgtcaatgttggtgtggcttccatgggcatcagctgctgccagagctttctgtgcaatttcagtgcggccgatggcgggctgcgggcaagcgtcaccctgctgggtgccgggctgctgctgagcctgctgccggccctgctgcggtttggcccctgaccgcccagaccctgtcccccgatcccccagctcaggaaggaaagcccagccctttctggatcccacagtgtatgggagcccctgactcctcacgtgcctgatctgtgcccttggtcccaggtcaggcccaccccctgcacctccacctgccccagcccctgcctctgccccaagtggggccagctgccctcacttctggggtggatgatgtgaccttccttgggggactgcggaagggacgagggttccctggagtcttacggtccaacatcaggaccaagtcccatggacatgctgacagggtccccagggagaccgtgtcagtagggatgtgtgcctggctgtgtacgtgggtgtgcagtgcacgtgagagcacgtggcggcttctgggggccatgtttggggagggaggtgtgccagcagcctggagagcctcagtccctgtagccccctgccctggcacagctgcatgcacttcaagggcagcctttgggggttggggtttctgccacttccgggtctaggccctgccccaaatccagccagtcctgccccagcccacccccacattggagccctcctgctgctttggtgcctcaaataaatacagatgtccccca

SEQ ID NO: 2669 - DNA, 1939 bp, Homo sapiens
tgtttgctgtctggacctggctgctgatcctgagcctgctgggagatcttaacgatccccaggagcaacatggggcccaccctagcggttcccaccccctatggctgtattggctgtaagctaccccagccagaatacccaccggctctaatcatctttatgttctgcgcgatggttatcaccatcgttgtagacctaatcggcaactccatggtcattttggctgtgacgaagaacaagaagctccggaattctggcaacatcttcgtggtcagtctctctgtggccgatatgctggtggccatctacccataccctttgatgctgcatgccatgtccattgggggctgggatctgagccagttacagtgccagatggtcgggttcatcacagggctgagtgtggtcggctccatcttcaacatcgtggcaatcgctatcaaccgttactgctacatctgccacagcctccagtacgaacggatcttcagtgtgcgcaatacctgcatctacctggtcatcacctggatcatgaccgtcctggctgtcctgcccaacatgtacattggcaccatcgagtacgatcctcgcacctacacctgcatcttcaactatctgaacaaccctgtcttcactgttaccatcgtctgcatccacttcgtcctccctctcctcatcgtgggtttctgctacgtgaggatctggaccaaagtgctggcggcccgtgaccctgcagggcagaatcctgacaaccaacttgctgaggttcgcaattttctaaccatgtttgtgatcttcctcctctttgcagtgtgctggtgccctatcaacgtgctcactgtcttggtggctgtcagtccgaaggagatggcaggcaagatccccaactggctttatcttgcagcctacttcatagcctacttcaacagctgcctcaacgctgtgatctacgggctcctcaatgagaatttccgaagagaatactggaccatcttccatgctatgcggcaccctatcatattcttccctggcctcatcagtgatattcgtgagatgcaggaggcccgtaccctggcccgcgcccgtgcccatgctcgcgaccaagctcgtgaacaagaccgtgcccatgcctgtcctgctgtggaggaaaccccgatgaatgtccggaatgttccattacctggtgatgctgcagctggccaccccgaccgtgcctctggccaccctaagccccattccagatcctcctctgcctatcgcaaatctgcctctacccaccacaagtctgtctttagccactccaaggctgcctctggtcacctcaagcctgtctctggccactccaagcctgcctctggtcaccccaagtctgccactgtctaccctaagcctgcctctgtccatttcaagggtgactctgtccatttcaagggtgactctgtccatttcaagcctgactctgttcatttcaagcctgcttccagcaaccccaagcccatcactggccaccatgtctctgctggcagccactccaagtctgccttcagtgctgccaccagccaccctaaacccatcaagccagctaccagccatgctgagcccaccactgctgactatcccaagcctgccactaccagccaccctaagcccgctgctgctgacaaccctgagctctctgcctcccattgccccgagatccctgccattgcccaccctgtgtctgacgacagtgacctccctgagtcggcctctagccctgccgctgggcccaccaagcctgctgccagccagctggagtctgacaccatcgctgaccttcctgaccctactgtagtcactaccagtaccaatgattaccatgatgtcgtggttgttgatgttgaagatgatcctgatgaaatggctgtgtgaaaaatgctctcgtaggtggccaggcagt

SEQ ID NO: 2670 - DNA, 4085 bp, Homo sapiens
ccgggcctcgagccgaggcagcagtgggaacgactcatcctttttccagccctggggcgtggctggggtcggggtcggggtcggggccggtgggggccccgcccccgtctcctggcctgcccccttcatgggccgcgatgatggcggccctgtacccgagcacggacctctcgggcgcctcctcctcctccctgccttcctctccatcctcttcctcgccgaacgaggtgatggcgctgaaggatgtgcgggaggtgaaggaggagaatacgctgaatgagaagcttttcttgctggcgtgcgacaagggtgactattatatggttaaaaagattttggaggaaaacagttcaggtgacttgaacataaattgcgtagatgtgcttgggagaaatgctgttaccataactattgaaaacgaaaacttggatatactgcagcttcttttggactacggttgtcagaaactaatggaacgaattcagaatcctgagtattcaacaactatggatgttgcacctgtcattttagctgctcatcgtaacaactatgaaattcttacaatgctcttaaaacaggatgtatctctacccaagccccatgcagttggctgtgaatgcacattgtgttctgcaaaaaacaaaaaggatagcctccggcattccaggtttcgtcttgatatatatcgatgtttggccagtccagctctaataatgttaacagaggaggatccaattctgagagcatttgaacttagtgctgatttaaaagaactaagtcttgtggaggtggaattcaggaatgattatgaggaactagcccggcaatgtaaaatgtttgctaaggatttacttgcacaagcccggaattctcgtgaattggaagttattctaaaccatacgtctagtgacgagcctcttgacaaacggggattattagaagaaagaatgaatttaagtcgtctaaaacttgctatcaaatataaccagaaagagtttgtctcccagtctaactgccagcagttcctgaacactgtttggtttggacagatgtcrggttaccgacgcaagcccacctgtaagaagataatgactgttttgacagtaggcatcttttggccagttttgtcactttgttatttgatagctcccaaatctcagtttggcagaatcattcacacaccttttatgaaatttatcattcatggagcatcatatttcacatttctgctgttgcttaatctatactctcttgtctacaatgaggataagaaaaacacaatggggccagcccttgaaagaatagactatcttcttattctgtggattattgggatgatttggtcagacattaaaagactctggtatgaagggttggaagactttttagaagaatctcgtaatcaactcagttttgtcatgaattctctttatttggcaacctttgccctcaaagtggttgctcacaacaagtttcatgattttgctgatcggaaggattgggatgcattccatcctacactggtggcagaagggctttttgcatttgcaaatgttctaagttatcttcgtctcttttttatgtatacaaccagctctatcttgggtccattacagatttcaatgggacagatgttacaagattttggaaaatttcttgggatgtttcttcttgttttgttttctttcacaattggactgacacaactgtatgataaaggatatacttcaaaggagcagaaggactgtgtaggcatcttctgtgaacagcaaagcaatgataccttccattcgttcattggcacctgctttgctttgttctggtatattttctccttagcgcatgtggcaatctttgtcacaagatttagctatggagaagaactgcagtcctttgtgggagctgtcattgttggtacatacaatgtcgtggttgtgattgtgcttaccaaactgctggtggcaatgcttcataaaagctttcagttgatagcaaatcatgaagacaaagaatggaagtttgctcgagcaaaattatggcttagctactttgatgacaaatgtacgttacctccacctttcaacatcattccctcaccaaagactatctgctatatgattagtagcctcagtaagtggatttgctctcatacatcaaaaggcaaggtcaaacggcaaaacagtttaaaggaatggagaaatttgaaacagaagagagatgaaaactatcaaaaagtgatgtgctgcctagtgcatcgttacttgacttccatgagacagaagatgcaaagtacagatcaggcaactgtggaaaatctaaacgaactgcgccaagatctgtcaaaattccgaaatgaaataagggatttacttggctttcggacttctaaatatgctatgttttatccaagaaattaaccattttctaaatcatggagcgaataattttcaataacagatccaaaagactatattgcataacttgcaatgaaattaatgagatatatattgaaataaagaattatgtaaaagccattctttaaaatatttatagcataaatatatgttatgtaaagtgtgtatatagaattagttttttaaaccttctgttagtggctttttgcagaagcaaaacagattaagtagatagattttgttagcatgctgcttggttttcttacttagtgctttaaaatgtttttttttatgtttaagaggggcagttataaatggacacattgcccagaatgttttgtaaaatgaagaccagcaaatgtaggctgatctccttcacaggatacacttgaaatatagaagttatgttttaaatatctctgttttaggagttcacatatagttcagcatttattgtttaggagtataattttattttatctaaaataatagtctattttttcttttgtattttgttataatcttaagcaacaaagaaaaaaccctaatatttgaatctatttatgtctttcaatttaaattcacttcagtttttgttattgtaatatatttacttttacatggttataatcactttatatttttaatgtttttttcacttaatattttatatatacatttccatgtattgatgtagttagtccacatttaaatttttatagaattatatagtttttgaaaaatacagtcagtagatgttttattttttagctattcagttatgtttataagtttgcatagctacttctcgacatttggtttgttttaatttttttgtatcataatagtcctatttttttttcaagttggagtgaatgtttttagttttaagatagataggagacacttttttatcacatgtagtcacaacctgttttgtttttgtaaaacataggaagtctctttaatgcaatgatttgttttatatttggactaaggttcttgagcttatctcccaaggtactttccataatttaacacagcttctataaaagtgacttcatgcttacttgtggatcattcttgctgcttaagatgaaaagcattggttttttaaaattagagaataaaatatgtatttaaatttttggtgtgttcacataaagggatgtagctaaaatgttttcataggctattatatattctcgcagcatttccagttaagaggatattaggtatataattctcttcttaaccgaatgtcagatggtcttacgccacagggtgcaggtaacccttggtctgtaagcaccaccgatccagggatcattgtctaaataggttactattgtttgtttcatcttgcttttgcatttttattttttaatttccaaattttaagtgttccctctttggggcaaattcttataaaaatgtttattgtaaagttatatattttgtctacgatgggattatgcacttcccaattgggattttacatctggatttttagtcattctaaaaaacacctaattattaaaacatttatagagtgcctactgtatgcatgagttgagttgcttctgaggtacattttgaatgacagcatattgtaagaaaaaaaaaggtgaataaaatttgacattagattataaaaaaaaaaaggaattc

SEQ ID NO: 2671 - DNA, 2272 bp, Homo sapiens
aatgcacagcggtattgatgagtagatccttggattcagaggttggctgaaacgcaccatgcctgcttccatcttttgctctgtaaagttgtgaattgctcatgcctatagggaggaaggatggcacatgggattccttctcaaggcaaagttaccataacggtggatgagtacagctcaaaccccacccaggcattcacgcactacaacatcaaccagagcagattccagcctccacatgtacatatggtcgaccccatcccatatgacactccaaaaccagcgggccacacgcggtttgtctgcatctcagacacacactccagaacagatggtatccagatgccttatggggacatccttctccacacaggcgatttcaccgagctgggactgccctcagaggttaagaagtttaatgactggttaggaaacctgccatatgaatataaaatagtgattgctgggaatcatgaactgacatttgataaggaattcatggcagaccttgttaaacaggactactaccgtttcccctctgtgtccaaattgaaaccagaggactttgacaatgttcagtccctcctgacaaacagtatttacttacaagattcggaggtaacagtgaagggattcaggatatacggtgcaccttggaccccgtggtttaatggatggggctttaacctacccagaggtcagtctctgctggacaagtggaacctcatccctgagggcattgacatactcatgacacatggacctcctctaggttttcgagactgggttccaaaggagcttcaaagagtgggctgtgtggagctgttaaacacggttcagaggcgagtccggcccaagctccatgtgtttggtggaatccatgaaggttatggcatcatgaccgacggttacacaacgtacatcaatgcctcgacgtgtacagtcagctttcaaccgaccaaccctccaattatatttgaccttccaaacccacagggttcctgaagctctaaatgccctattggaatgtgagggaaggtctataaactgccatttttctaattataaacttacattctcttacttatttacaaaccctgtgagttctttttgtaaattgttggaacacaaatgatgctagaggttgtgcttcttattttattttattttaaatggggcatccatttgaaatcagaggaacattgtgaatttgtaaaatgacttctgttttctcaaaggccatgccattgtaaattgttagtgttcgccaaaggacagccaagctttcttttaaaaagtgataaaagtcttattttaatatgctttaagctgaaagaaaaaaaaataagaaacaggcagtgttttaaaaaccaacacagatttgcacaactgtttaagagtattgtttgaaatattttaattttcaatgttttgttgttgttgttttcttggtaatgcttcttttttgcagatgtggtcccaatttatagcaatcttctcaacagaagtaggcatggaaaagacttcttttcatactctcactataaagaaagctgcattgagaagaaaatggctgtcatttaaaggatggtttaactagtgagattcctattgtggttatacaaggtctcattgtttgtttgtttcttttaaattatttcagctttaaaaatacagaaatggaatctgtcaagagcaggtatttcatacggttaaaaaaatgaacatgcagactccttttcaatatgggtttatatatataagtattttttgtgtattatgactacgttaggagtttaatattgtcaaggacagtacaactgcaaagggatgctgtatagcagcacatcagaagtcggaaggaactgacacattctctcagagctcaaggtcttaaagagcttgagttaaatctaggtacagttacaggcatgtatagacttaaatggatgcaatggaagctaactaaaataaggcttagttgtcctttctatttaaataccccaagttgtcttcttacttcctctcccctctcccattttgcactgtgtgtcgatgcaatcttcgctagcacaaaatattgtcgctaatagtcatttctgttttcccattgtaaatgctgttgagctttattctattttatgttactttgttaatgaaatttaggaaagcagttgtttctttaaatttattgtgatattctatatctagcggcctttatatgcaaataaaattgcaagatttttaaaaaaaaaaaaaaaaaaaaaaaaaa

SEQ ID NO: 2672 - DNA, 2336 bp, Homo sapiens
ggcacgaggaagaatcaggagcttaggatgtattaacaccaactcattaatatactaaccggacaatgttctacaaacaattctacattgtaaaggactggattggcacaaaataaaataattttattttattcagcttataatatgactcgatggaggaaaatttgataagcatgagagaagaccattcttttcatgttcgttacagaatggaagcttcttgcctagagctggccttggaaggggaacgtctatgtaaatcaggagactgccgcgctggcgtgtcattctttgaagctgcagttcaagttggaactgaagacctaaaaacacttagcgctatttacagccagttgggcaatgcttatttctatttgcatgattatgccaaagcattagaatatcaccatcatgatttaacccttgcaaggactattggagaccagctgggggaagcgaaagctagtggtaatctgggaaacaccttaaaagttcttgggaattttgacgaagccatagtttgttgtcagcgacacctagatatttccagagagcttaatgacaaggtgggagaagcaagagcactttacaatcttgggaatgtgtatcatgccaaagggaaaagttttggttgccctggtccccaggatgtaggagaatttccagaagaagtgagagatgctctgcaggcagccgtggatttttatgaggaaaacctatcattagtgactgctttgggtgaccgagcggcacaaggacgtgcctttggaaatcttggaaacacacattacctccttggcaacttcagggatgcagttatagctcatgagcagcgtctccttattgcaaaagaatttggagataaagcagctgaaagaagagcatatagcaaccttggaaatgcatatatatttcttggtgaatttgaaactgcctcggaatactacaagaagacactactgttggcccgacagcttaaagaccgagctgtagaagcacagtcttgttacagtcttggaaatacatatactttacttcaagactatgaaaaggccattgattatcatctgaagcacttagcaattgctcaagagctgaatgatagaattggtgaaggaagagcatgttggagcttaggaaatgcatacacagcactaggaaatcatgatcaagcaatgcattttgctgaaaagcacttggaaatttcaagagaggttggggataaaagtggtgaactaacagcacgacttaatctctcagaccttcaaatggttcttggtctgagctacagcacaaataactccataatgtctgaaaatactgaaattgatagcagtttgaatggtgtactccccaagttgggacgccggcatagtatggaaaatatggaacttatgaagttaacaccagaaaaggtacagaactggaacagtgaaattcttgctaagcaaaaacctcttattgccaaaccttctgcaaagctactctttgtcaacagactgaaggggaaaaaatacaaaacgaattcctccactaaagttctccaagatgccagtaattctattgaccaccgaattccaaattctcagaggaaaatcagtgcagatactattggagatgaagggttctttgacttattaagccgatttcaaagcaataggatggatgatcagagatgttgcttacaagaaaagaactgccatacagcttcaacaacaacttcttccactccccctaaaatgatgctaaaaacatcatctgttcctgtggtatcccccaacacggatgagtttttagatcttcttgccagctcacagagtcgccgtctggatgaccagagggctagtttcagtaatttgccagggcttcgtctaacacaaaacagccagtcggtacttagccacctgatgactaatgacaacaaagaggctgatgaagatttctttgacatccttgtaaaatgtcaaggatccagattagatgatcaaagatgtgctccaccacctgctaccacaaagggtccgacagtaccagatgaagactttttcagccttattttacggtcccagggaaagagaatggatgaacagagagttcttttacaaagagatcaaaacagagacactgactttgggctaaaggactttttgcaaaataatgctttgttggagtttaaaaattcagggaaaaaatcggcagaccattagttactatggatttattttttttcctttcaaacacggtaaggaaacaatctattacttttttccttaaaaggagaatttatagcactgtaatacagcttaaaatatttttagaatgatgtaaatagttaa

SEQ ID NO: 2673 - DNA, 1506 bp, Homo sapiens
aggcggacaaagcccgattgttcctgggccctttccccatcgcgcctgggcctgctccccagcccggggcaggggcgggggccagtgtggtgacacacgctgtagctgtctccccggctggctggctcgctctctcctggggacacagaggtcggcaggcagcacacagagggacctacgggcagctgttccttcccccgactcaagaatccccggaggcccggaggcctgcagcaggagcggccatgaagaagctgatggtggtgctgagtctgattgctgcagcctgggcagaggagcagaataagttggtgcatggcggaccctgcgacaagacatctcacccctaccaagctgccctctacacctcgggccacttgctctgtggtggggtccttatccatccactgtgggtcctcacagctgcccactgcaaaaaaccgaatcttcaggtcttcctggggaagcataaccttcggcaaagggagagttcccaggagcagagttctgttgtccgggctgtgatccaccctgactatgatgccgccagccatgaccaggacatcatgctgttgcgcctggcacgcccagccaaactctctgaactcatccagccccttcccctggagagggactgctcagccaacaccaccagctgccacatcctgggctggggcaagacagcagatggtgatttccctgacaccatccagtgtgcatacatccacctggtgtcccgtgaggagtgtgagcatgcctaccctggccagatcacccagaacatgttgtgtgctggggatgagaagtacgggaaggattcctgccagggtgattctgggggtccgctggtatgtggagaccacctccgaggccttgtgtcatggggtaacatcccctgtggatcaaaggagaagccaggagtctacaccaacgtctgcagatacacgaactggatccaaaaaaccattcaggccaagtgaccctgacatgtgacatctacctcccgacctaccaccccactggctggttccagaacgtctctcacctagaccttgcctcccctcctctcctgcccagctctgaccctgatgcttaataaacgcagcgacgtgagggtcctgattctccctggttttaccccagctccatccttgcatcactggggaggacgtgatgagtgaggacttgggtcctcggtcttacccccaccactaagagaatacaggaaaatcccttctaggcatctcctctccccaacccttccacacgtttgatttcttcctgcagaggcccagccacgtgtctggaatcccagctccgctgcttactgtcggtgtccccttgggatgtacctttcttcactgcagatttctcacctgtaagatgaagataaggatgatacagtctccatcaggcagtggctgttggaaagatttaagatttcacacctatgacatacatgggatagcacctgggccgccatgcactcaataaagaatgtatttt

SEQ ID NO: 2674 - DNA, 3337 bp, Homo sapiens
gtcgagcctctagcccgcccgggtttccttcgcagtcgcgcaccgacgctcaaacgcgcgctccaacccgcagcctcctcctgcctcaccgcccgaagatggcggctctcaaactcctctcctccgggcttcggctctgcgcctctgcccgcggatctggggcaacctggtacaagggatgtgtttgttccttttccaccagtgctcatcgccataccaagttttatacagatccagtagaagctgtaaaagacatccctgatggtgccacggttttggttggtggttttgggctatgtggaattccagagaatcttatagatgctttactgaaaactggagtaaaaggactaactgcagtcagcaacaatgcaggggttgacaattttggtttggggcttttgcttcggtcgaagcagataaaacgcatggtctcttcatatgtgggagaaaatgcagaatttgaacgacagtacttatctggtgaattagaagtggagctgacaccacagggcacacttgcagagaggatccgtgcaggcggggctggagttcctgcattttacaccccaacagggtatgggaccctggtacaagaaggaggatcgcccatcaaatacaacaaagatggcagtgttgccattgccagtaagccaagagaggtgagggagttcaatggtcagcactttattttggaggaagcaattacaggggattttgctttggtgaaagcctggaaggcggaccgagcaggaaacgtgattttcaggaaaagtgcaaggaatttcaacttgccaatgtgcaaagctgcagaaaccacagtggtagaggttgaagaaattgtggatattggagcatttgctccagaagacatccatattcctcagatttatgtacatcgccttataaagggagaaaaatatgagaaaagaattgagcgtttatcaatccggaaagagggagatggggaagccaaatctgctaaacctggagatgacgtaagggaacgaatcatcaagagggccgctcttgagtttgaggatggcatgtatgctaatttgggcataggaatccctctcctggccagcaattttatcagcccaaatataactgttcatcttcaaagtgaaaatggagttctgggtttgggtccatatccacgacaacatgaagctgatgcagatctcatcaatgcaggcaaggaaacagttactattcttccaggagcctcttttttctccagcgatgaatcatttgcaatgattagaggtggacacgtcgatctgacaatgctaggagcgatgcaggtttccaaatatggtgacctggctaactggatgatacctgggaagatggtgaaaggaatgggaggtgctatggatttagtgtccagtgcgaaaaccaaagtggtggtcaccatggagcattctgcaaagggaaatgcacataaaatcatggagaaatgtacattaccattgactggaaagcaatgtgtcaaccgcattattactgaaaaggctgtgtttgatgtggacaagaagaaagggttgactctgattgagctctgggaaggcctgacagtggatgacgtacaaaagagtactgggtgtgattttgcagtttcaccaaaactcatgccaatgcagcagatcgcaaattgaaatatggatatttgtaccaggctgcgtgtttttcattttaaacacacaagatttaattgaaaggacatcaataatcataattgtgtatttaacaggtggttttttattagttttcttgtgtttcagactttatgcagccatataaactgttctctaggcatgctgtgacattttaataaaaagcaaaaggagcatttataattatctcatttgttaaggctgagaaggttgtttttataataggtaattatattgaatgcattttcactgaatatggtatgtatgctaaattatatgaacctttccccaagaagggccctagaaattgatgtggctttcctcttaaatattaattattagtcctgaaagaaagataacatatgtgatttttgtggttaggagagttgctgtcatgattgttttttcttcagcctcctctgacttttcttttggggcttcagattttatgattacatcttgtccccctagaacatcccccttcctcccatactgcttttaaacagatgcccaagaaggcaagcaggaatgcctcttgtgggggagggcagggagaaataactagttcaaaccaactatctatctatgctttgcaaagactaaggcgtattataggaagagggctagaaacctaactgattcttctcagttttctcattttaaaacagcccagtattcctttgtatcctcaagggtccttgagaatacttctgttattgaaaccctgtgggctacttgtactgtacctcctctcaagccaagaagggctgtgggataatttaccatgaatccttagtagcaatgacagcagagttaaaaaataaaaggtgttttactttcaggctcttgttttggttcagaggagattttaaatattgaatgacacttctacagaacaacggtttttcttctgccaaggctacttcctttaacgaagtgcctttaattcagccttatccaactagggaaaataatgttggacaagtctaggatttgaagagtcagtgaacttttagtgtcagggaataaacatggtgggtagattaggtttgaaaaaaacttccttagaggtatttattctcaatacctgacaggggcccatgggaatgacttcagaagcatcccggataatagatgggtaaaaagtctaggcaccctgaagaacaggtgagacagctggcctctggacagaggtaggcatagtacagtacgatatatcattcctctggtcctaaatatacaaacttattcatgtttttaggtgatgatggtcattgaaactcacttcttttcaggtgtagctacaattgtgtaatgtacaatattagagaaaggacaggctttttatgagtaacacacaccatatataaaacagcctttctggctgaccacatggttaaatgcataccttcccagtactggggggaaaatgacccttcttagaatgtgcaagttccatagagtaatatattgatatgattttgaaaagaattgttgatagttacatcttcaaacttatcattccagtatgcatctttaagataatgtgattctaagtagatgactttatattcttgattaaagagtgctatacatgttaagaaatgcattaaggaatacaataaatattctaaactgatgaaaaaaaaaaaaaaaaa

SEQ ID NO: 2675 - DNA, 2805 bp, Homo sapiens
cgggtctgatagtccctacctgtcaggactggtgttaggatgagataatgtttgtgaactgtaaacatatataaacgtgtgctactgtgagaactggaacaaagaagagagggagtgagagaaatcaagggagggctggggctgggaaagaacgaaaagggagtcgcgtatagaggagaggcgacagtcgcgagccacactttgcaatgaaactctttagactttctgccgggagagcggcccagacgcgccaggtctgtagcaggaggccgcgagggcgggtccccagaagcctacaggtgagtatcggttctccccttcccggctttcggtccggaggaggcgggagcagcttccctgttctgatcctatcgcgggcggcgcagggccggcttggccttccgtgggacggggaggggggcgggatgtgtcacccaaataccagtggggacggtcggtggtggaaccagccgggcaggtcgggtagagtataagagccggagggagcggccggggcgcagacgcctgcagaccatcccagacgccggagcccgagccccgacgagtccccgcgcctcatccgcccgcgtccggtccgcgttcctccgccccaccatggctcggggccccggcctcgcgccgccaccgctgcggctgccgctgctgctgctggtgctggcggcggtgaccggccacacggccgcgcaggacaactgcacgtgtcccaccaacaagatgaccgtgtgcagccccgacggccccggcggccgctgccagtgccgcgcgctgggctcgggcatggcggtcgactgctccacgctgacctccaagtgtctgctgctcaaggcgcgcatgagcgcccccaagaacgcccgcacgctggtgcggccgagtgagcacgcgctcgtggacaacgatggcctctacgaccccgactgcgaccccgagggccgcttcaaggcgcgccagtgcaaccagacgtcggtgtgctggtgcgtgaactcggtgggcgtgcgccgcacggacaagggcgacctgagcctacgctgcgatgagctggtgcgcacccaccacatcctcattgacctgcgccaccgccccaccgccggcgccttcaaccactcagacctggacgccgagctgaggcggctcttccgcgagcgctatcggctgcaccccaagttcgtggcggccgtgcactacgagcagcccaccatccagatcgagctgcggcagaacacgtctcagaaggccgccggtgaagtggatatcggcgatgccgcctactacttcgagagggacatcaagggcgagtctctattccagggccgcggcggcctggacttgcgcgtgcgcggagaacccctgcaggtggagcgcacgctcatctattacctggacgagattcccccgaagttctccatgaagcgcctcaccgccggcctcatcgccgtcatcgtggtggtcgtggtggccctcgtcgccggcatggccgtcctggtgatcaccaaccggagaaagtcggggaagtacaagaaggtggagatcaaggaactgggggagttgagaaaggaaccgagcttgtaggtacccggcggggcaggggatggggtggggtaccggatttcggtatcgtcccagacccaagtgagtcacgcttcctgattcctcggcgcaaaggagacgtttatcctttcaaattcctgccttccccctcccttttgcgcacacaccaggtttaatagatcctggcctcagggtctcctttctttctcacttctgtcttgagggaagcatttctaaaatgtatcccctttcggtccaacaacaggaaacctgactggggcagtgaaggaagggatggcacagcgttatgtgtaaaaaacaagtatctgtatgacaacccgggatcgtttgcaagtaactgaatccattgcgacattgtgaaggcttaaatgagtttagatgggaaatagcgttgttatcgccttgggtttaaattatttgatgagttccacttgtatcatggcctacccgaggagaagaggagtttgttaactgggcctatgtagtagcctcatttaccatcgtttgtattactgaccacatatgcttgtcactgggaaagaagcctgtttcagctgcctgaacgcagtttggatgtctttgaggacagacattgcccggaaactcagtctatttattcttcagcttgcccttactgccactgatattggtaatgttcttttttgtaaaatgtttgtacatatgttgtctttgataatgttgctgtaattttttaaaataaaacacgaatttaataaaatatgggaaaggcacaaaccagaagtcggcatttgtgaaaagtccctccagatttctatcactttggtctctaatttcccaagacttgtattttttttttatttcaaattataacacttttttttcccccagaagtgggtgtttcatgttgctactctggtgtgtcccaagatatcctaactggccagtgtaaatgctattctttctaaataagattatttggaaacttccttcaaactgcaggagggcgagctctgagggcacgagaagctaaaactagctgcttttgatgaaaaagagtgccagtctttggtcatctctaaacaaggcttatcaccaatggagacagaaaactctagttcaagagctgtacctcctttgaatcccagccctactcgaaataagtggtactatttccatttagcctttgagcaaatcacttaactcaaaggcgttgtggctctaagattaaacgacttt

SEQ ID NO: 2676 - DNA, 3003 bp, Homo sapiens
cgaagtcaagacgtctggaaagaattacccagtcctggcttcgagcagcccattgaaccagagacttgaaacagccccagccaaagacttttctcccaattctgcgcttcctgggttctgctgagtcttccacaggctttttttttttttttttttttttaagacgaaaaagagattttctgttatcgggggcagaaagactgaagcacaaaaaaaaaaaaaaagaaaagaaaagaaaagaaaaaagaaaagttaatttatttttaaagcataatttttttaagaattagactgaagtgcaacggaaacataaagagaatattagtgaaattattttttaaagtggggaagaatcaaacatttaagactcccctatcctttttaaatgttgtttttaaatttcttattttttttggccggtcgtctcaaattcatctgatctcttattacctcaattttggaaactgcccgccaccgaccctccgggaccacacagacaggctgaggacgactttatgaccaagagctgaacaagatgcattgtgagaggtttctatgtatcctgagaataattggaaccacactctttggagtctctctcctccttggaatcacagctgcttatattgttggctaccagtttatccaaacggataattactatttctcttttggactgtatggtgcctttttggcatcacacctcatcatccaaagcctgtttgcctttttggagcaccgaaaaatgaaaaaatccctagaaacccccataaagttgaacaaaacagttgccctttgcatcgctgcctatcaagaagatccagactacttaaggaaatgtttgcaatctgtgaaaaggctaacctaccctgggattaaagttgtcatggtcatagatgggaactcagaagatgacctttacatgatggacatcttcagtgaagtcatgggcagagacaaatcagccacttatatctggaagaacaacttccacgaaaagggtcccggtgagacagatgagtcacataaagaaagctcgcaacacgtaacgcaattggtcttgtccaacaaaagtatctgcatcatgcaaaaatggggtggaaaaagagaagtcatgtacacagccttcagagcactgggacgaagtgtggattatgtacaggtttgtgattcagacactatgcttgacccagcctcatctgtggagatggtaaaagttttagaagaagatcccatggttggaggtgttgggggagatgtccagattttaaacaagtacgattcctggatctcattcctcagcagtgtaagatattggatggcttttaatatagaaagggcctgtcagtcttattttgggtgtgttcagtgcattagtggacctctgggaatgtacagaaactccttgttgcatgagtttgtggaagattggtacaatcaagaatttatgggcaaccaatgtagctttggtgatgacaggcatctcacgaaccgggtgctgagcctgggctatgcaacaaaatacacagctcgatctaagtgccttactgaaacacctatagagtatctcagatggctaaaccagcagacccgttggagcaagtcctacttccgagaatggctgtacaatgcaatgtggtttcacaaacatcacttgtggatgacctacgaagcgattatcactggattctttcctttctttctcattgccacagtaatccagctcttctaccggggtaaaatttggaacattctcctcttcttgttaactgtccagctagtaggtctcataaaatcatcttttgccagctgccttagaggaaatatcgtcatggtcttcatgtctctctactcagtgttatacatgtcgagtttacttcccgccaagatgtttgcaattgcaacaataaacaaagctgggtggggcacatcaggaaggaaaaccattgttgttaatttcataggactcattccagtatcagtttggtttacaatcctcctgggtggtgtgattttcaccatttataaggagtctaaaaggccattttcagaatccaaacagacagttctaattgttggaacgttgctctatgcatgctattgggtcatgcttttgacgctgtatgtagttctcatcaataagtgtggcaggcggaagaagggacaacaatatgacatggtgcttgatgtatgatcttccatgttttgacgtttgcagtcacacacaacaccttagttcctctaggggctgtacagtattgtggcatcagataatgccaccaaaggagacatatcactgctgctgggacttgaacaaagacatttatatgggtttattttcattctgccaaagtaaaacaatacatcaacaagaagaaactcagatttaacctgttatttctatgaaaatgggatgaattctttgtttatgcactttttccttactgtgcatccgcctgaaagtgttttggcctatatacctcactagccatgctttatgtgggttatcatggaagaaaaggattttggaaactcaaggaaaagttctttcaacctatacaacctaacttatggactgtttgatagatgataattttttttttttaggaaggattttctttttaactttaccaaatgaaatgccaaaggaagttttaaaggccgtggctgtgctgtatttgatataattgtactgtgtttttaaattgtgtatgccaatcttaaagacaaattttgcatattctctattttacttttctgccaaaataaacctgttcttccttttttaaaataaaataagttcttaaaaaatttatacttaaaaaatcctgcccaaaatgtgaagcttggttgactgatgttcatgatagaaagaataaaatgtttctctctctctaccttttaaaattgaatagtttatttctgtgaaagaagtatttaaactttcaatattttaactttttgtttttatttcttttagaaaaggccaatatacctatcgcg

SEQ ID NO: 2677 - DNA, 1614 bp, Homo sapiens
ggggaagaggcagtgggagggggggcggagggcgggggcttcggggtgggcgcccagggtagggcaggtggccgccgcgtggaggcagggagaatgcactctccaaaaccctccgtcgacatggacatggccgactacagtgctgcactggacccagcctacaccaccctggaatttgagaatgtgcaggtgttgacgatgggcaatgacacgtccccatcagaaggcaccaacctcaacgcgcccaacagcctgggtgtcagcgccctgtgtgccatctgcggggaccgggccacgggcaaacactacggtgcctcgagctgtgacggctgcaagggcttcttccggaggagcgtgcggaagaaccacatgtactcctgcagatttagccggcagtgcgtggtggacaaagacaagaggaaccagtgccgctactgcaggctcaagaaatgcttccgggctggcatgaagaaggaagccgtccagaatgagcgggaccggatcagcactcgaaggtcaagctatgaggacagcagcctgccctccatcaatgcgctcctgcaggcggaggtcctgtcccgacagatcacctcccccgtctccgggatcaacggcgacattcgggcgaagaagattgccagcatcgcagatgtgtgtgagtccatgaaggagcagctgctggttctcgttgagtgggccaagtacatcccagctttctgcgagctccccctggacgaccaggtggccctgctcagagcccatgctggcgagcacctgctgctcggagccaccaagagatccatggtgttcaaggacgtgctgctcctaggcaatgactacattgtccctcggcactgcccggagctggcggagatgagccgggtgtccatacgcatccttgacgagctggtgctgcccttccaggagctgcagatcgatgacaatgagtatgcctacctcaaagccatcatcttctttgacccagatgccaaggggctgagcgatccagggaagatcaagcggctgcgttcccaggtgcaggtgagcttggaggactacatcaacgaccgccagtatgactcgcgtggccgctttggagagctgctgctgctgctgcccaccttgcagagcatcacctggcagatgatcgagcagatccagttcatcaagctcttcggcatggccaagattgacaacctgttgcaggagatgctgctgggaggtccgtgccaagcccaggaggggcggggttggagtggggactccccaggagacaggcctcacacagtgagctcacccctcagctccttggcttccccactgtgccgctttgggcaagttgcttaacctgtctgtgcctcagtttcctcaccagaaaaatgggaacaaggcaatggtctatttgttcaggcaccgagaacctagcacgtgccagtcactgttctaatgctggcaattcagcaaagaacaagatctttgccctcggggaggctgtgtgtgtgtgagtatgtatggatgcgtggatatctgtgtatatgcccgtatgtgcgtgcatgtgtatataagcctcacattttatgattttgaaataaacaggtaatacgaaaaaaaccc

SEQ ID NO: 2678 - DNA, 2770 bp, Homo sapiens
aaacacggtgaaaagaaaccgcccattacacaccccagtacaccagcagaggaaacttataacctcgggaggcaggtccttcccctcagtgcggtcacatacttccagaagagcggaccagggctgctgccagcacctgccactcagagcgcctctgtcgctgggacccttcagaactctctttgctcacaagttaccaaaaaaaaaagagccaacatgttggtattgctggctggtatctttgtggtccacatcgctactgttattatgctatttgttagcaccattgccaatgtctggttggtttccaatacggtagatgcatcagtaggtctttggaaaaactgtaccaacattagctgcagtgacagcctgtcatatgccagtgaagatgccctcaagacagtgcaggccttcatgattctctctatcatcttctgtgtcattgccctcctggtcttcgtgttccagctcttcaccatggagaagggaaaccggttcttcctctcaggggccaccacactggtgtgctggctgtgcattcttgtgggggtgtccatctacactagtcattatgcgaatcgtgatggaacgcagtatcaccacggctattcctacatcctgggctggatctgcttctgcttcagcttcatcatcggcgttctctatctggtcctgagaaagaaataaggccggacgagttcatggggatctggggggtggggaggaggaagccgttgaatctgggagggaagtggaggttgctgtacaggaaaaaccgagataggggaggggggagggggaagcaaaggggggaggtcaaatcccaaaccattactgaggggattctctactgccaagcccctgccctggggagaaagtagttggctagtactttgatgctcccttgatggggtccagagagcctccctgcagccaccagacttggcctccagctgttcttagtgacacacactgtctggggccccatcagctgccacaacaccagccccacttctgggtcatgcactgaggtccacagacctactgcactgagttaaaatagcggtacaagttctggcaagagcagatactgtctttgtgctgaatacgctaagcctggaagccatcctgcccttctgacccaaagcaaaacatcacattccagtctgaagtgcctactggggggctttggcctgtgagccattgtccctctttggaacagatatttagctctgtggaattcagtgacaaaatgggaggaggaaagagagtttgtaaggtcatgctggtgggttagctaaaccaagaaggagaccttttcacaatggaaaacctgggggatggtcagagcccagtcgagacctcacacacggctgtccctcatggagacctcatgccatggtctttgctaggcctcttgctgaaagccaaggcagctcttctggagtttctctaaagtcactagtgaacaattcggtggtaaaagtaccacacaaactatgggatccaaggggcagtcttgcaacagtgccatgttagggttatgtttttaggattcccctcaatgcagtcagtgtttcttttaagtatacaacaggagagagatggacatggctcattgtagcacaatcctattactcttcctctaacatttttgaggaagttttgtctaattatcaatattgaggatcagggctcctaggctcagtggtagctctggcttagacaccacctggagtgatcacctcttggggaccctgcctatcccacttcacaggtgaggcatggcaattctggaagctgattaaaacacacataaaccaaaaccaaacaacaggcccttgggtgaaaggtgctatataattgtgaagtattaagcctaccgtatttcagccatgataagaacagagtgcctgcattcccaggaaaatacgaaaatcccatgagataaataaaaatataggtgatgggcagatcttttctttaaaataaaaaagcaaaaactcttgtggtacctagtcagatggtagacgagctgtctgctgccgcaggagcacctctatacaggacttagaagtagtatgttattcctggttaagcaggcattgctttgccctggagcagctattttaagccatctcagattctgtctaaaggggttttttgggaagacgttttctttatcgccctgagaagatctaccccagggagaatctgagacatcttgcctacttttctttattagctttctcctcatccatttcttttatacctttcctttttggggagttgttatgccatgatttttggtatttatgtaaaaggattattactaattctatttctctatgtttattctagttaaggaaatgttgagggcaagccaccaaattacctaggctgaggttagagagattggccagcaaaaactgtgggaagatgaactttgtcattatgatttcattatcacatgattatagaaggctgtcttagtgcaaaaaacatacttacatttcagacatatccaaagggaatactcacattttgttaagaagttgaactatgactggagtaaaccatgtattcccttatcttttactttttttctgtgacatttatgtctcatgtaatttgcattactctggtggattgttctagtactgtattgggcttcttcgttaatagattatttcatatactataattgtaaatattttgatacaaatgtttataactctagggatataaaaacagattctgattccca

SEQ ID NO: 2679 - DNA, 1893 bp, Homo sapiens
ggcggagcgggccttttggcgtccactgcgcggctgcaccctgccccatctgccgggatcatggtctgcggcagcccgggagggatgctgctgctgcgggccgggctgcttgccctggctgctctctgcctgctccgggtgcccggggctcgggctgcagcctgtgagcccgtccgcatccccctgtgcaagtccctgccctggaacatgactaagatgcccaaccacctgcaccacagcactcaggccaacgccatcctggccatcgagcagttcgaaggtctgctgggcacccactgcagccccgatctgctcttcttcctctgtgccatgtacgcgcccatctgcaccattgacttccagcacgagcccatcaagccctgtaagtctgtgtgcgagcgggcccggcagggctgtgagcccatactcatcaagtaccgccactcgtggccggagaacctggcctgcgaggagctgccagtgtacgacaggggcgtgtgcatctctcccgaggccatcgttactgcggacggagctgattttcctatggattctagtaacggaaactgtagaggggcaagcagtgaacgctgtaaatgtaagcctattagagctacacagaagacctatttccggaacaattacaactatgtcattcgggctaaagttaaagagataaagactaagtgccatgatgtgactgcagtagtggaggtgaaggagattctaaagtcctctctggtaaacattccacgggacactgtcaacctctataccagctctggctgcctctgccctccacttaatgttaatgaggaatatatcatcatgggctatgaagatgaggaacgttccagattactcttggtggaaggctctatagctgagaagtggaaggatcgactcggtaaaaaagttaagcgctgggatatgaagcttcgtcatcttggactcagtaaaagtgattctagcaatagtgattccactcagagtcagaagtctggcaggaactcgaacccccggcaagcacgcaactaaatcccgaaatacaaaaagtaacacagtggacttcctattaagacttacttgcattgctggactagcaaaggaaaattgcactattgcacatcatattctattgtttactataaaaatcatgtgataactgattattacttctgtttctcttttggtttctgcttctctcttctctcaacccctttgtaatggtttgggggcagactcttaagtatattgtgagttttctatttcactaatcatgagaaaaactgttcttttgcaataataataaattaaacatgctgttaccagagcctctttgctgagtctccagatgttaatttactttctgcaccccaattgggaatgcaatattggatgaaaagagaggtttctggtattcacagaaagctagatatgccttaaaacatactctgccgatctaattacagccttatttttgtatgccttttgggcattctcctcatgcttagaaagttccaaatgtttataaaggtaaaatggcagtttgaagtcaaatgtcacataggcaaagcaatcaagcaccaggaagtgtttatgaggaaacaacacccaagatgaattatttttgagactgtcaggaagtaaaataaataggagcttaagaaagaacattttgcctgattgagaagcacaactgaaaccagtagccgctggggtgttaatggtagcattcttcttttggcaatacatttgatttgttcatgaatatattaatcagcattagagaaatgaattataactagacatctgctgttatcaccatagttttgtttaatttgcttccttttaaataaacccattggtgaaagtcaaaaaaaaaaaaaaaaa

SEQ ID NO: 2680 - DNA, 2717 bp, Homo sapiens
cagggtaacgctgtcttgtggacccgcacttcccacccgagacctctcactgagcccgagccgcgcgcgacatgagccacgggaagggaaccgacatgctcccggagatcgccgccgccgtgggcttcctctccagcctcctgaggacccggggctgcgtgagcgagcagaggcttaaggtcttcagcggggcgctccaggaggcactcacagagcactacaaacaccactggtttcccgaaaagccgtccaagggctccggctaccgctgcattcgcatcaaccacaagatggaccccatcatcagcagggtggccagccagatcggactcagccagccccagctgcaccagctgctgcccagcgagctgaccctgtgggtggacccctatgaggtgtcctaccgcattggggaggacggctccatctgcgtcttgtacgaggaggccccactggccgcctcctgtgggctcctcacctgcaagaaccaagtgctgctgggccggagcagcccctccaagaactacgtgatggcagtctccagctaggcccttccgcccccgccctgggcgccgccgtgctcatgctgccgtgacaacaggccaccacatacctcaacctggggaactgtatttttaaatgaagagctatttatatatattatttttttttaagaaaggaggaaaagaaaccaaaagttttttttaagaaaaaaaatccttcaagggagctgcttggaagtggcctccccaggtgcctttggagagaactgttgcgtgcttgagtctgtgagccagtgtctgcctataggagggggagctgttagggggtagacctagccaaggagaagtgggagacgtttggctagcaccccaggaagatgtgagagggagcaagcaaggttagcaactgtgaacagagaggtcgggatttgccctgggggaggaagagaggccaagttcagagctctctgtctcccccagccagacacctgcatccctggctcctctattactcaggggcattcatgcctggacttaaacaatactatgttatcttttcttttatttttctaatgaggtcctgggcagagagtgaaaaggcctctcctgattcctactgtcctaagctgcttttcttgaaatcatgacttgtttctaattctaccctcaggggcctgtagatgttgctttccagccaggaatctaaagctttgggttttctgagggggggaggagggaactggaggttattggggttaggatggaagggaactctgcacaaaacctttgctttgctagtgctgctttgtgtgtatgtgtggcaaataatttgggggtgatttgcaatgaaattttgggacccaaagagtatccactggggatgttttttggccaaaactcttccttttggaaccacatgaaagtcttgatgctgctgccatgatccctttgagaggtggctcaaaagctacagggaactccaggtcctttattactgccttcttttcaaaagcacaactctcctctaaccctcccctcccccttcccttctggtcgggtcatagagctaccgtattttctaggacaagagttctcagtcactgtgcaatatgccccctgggtcccaggagggtctggaggaaaactggctatcagaacctcctgatgccctggtgggcttagggaaccatctctcctgctctccttgggatgatggctggctagtcagccttgcatgtattccttggctgaatgggagagtgccccatgttctgcaagactacttggtattcttgtagggccgacactaaataaaagccaaaccttgggcactgttttttctccctggtgctcagagcacctgtgggaaaggttgctgtctgtctcagtacaatccaaatttgtcgtagacttgtgcaatatatactgttgtgggttggagaaaagtggaaagctacactgggaagaaactcccttccttcaatttctcagtgacattgatgaggggtcctcaaaagacctcgagtttcccaaaccgaatcaccttaagaaggacagggctagggcatttggccaggatggccaccctcctgctgttgccccttagtgaggaatcttcaccccacttcctctacccccaggttctcctccccacagccagtcccctttcctggatttctaaactgctcaattttgactcaaaggtgctatttaccaaacactctccctacccattcctgccagctctgcctccttttcaactctccacattttgtattgccttcccagacctgcttccagtctttattgctttaaagttcactttgggcccacagacccaagagctaattttctggtttgtgggttgaaacaaagctgtgaatcactgcaggctgtgttcttgcatcttgtctgcaaacaggtccctgcctttttagaagcagcctcatggtctcatgcttaatcttgtctctcttctcttctttatgatgttcactttaaaaacaacaaaacccctgagctggactgttgagcaggcctgtctctcctattaagtaaaaataaatagtagtagtatgtttgtaagctattctgacagaaaagacaaaggttactaattgtatgatagtgtttttatatggaagaatgtacagcttatggacaaatgtacacctttttgttactttaataaaaatgtagtaggataaaaaaaaa

SEQ ID NO: 2681 - DNA, 1730 bp, Homo sapiens
gtgcccctgacaggcttttaaaaggcccggatgccaatgcacattccaacactatccacaaaaaggagactgagcagtgctcttccctgcattgggcaaggagactctccctccctgcctaaccacttgcctgccctgttttgtgggagaattacaagtaaatgctacagaggcagtggagaaaaaagggtgttttaattcctctccagagtttcctttatttgatgtatgttgcatcctttaaacaagttgtgcaaaatggctgcagggtagattggctctcccttttaaagctctccatccggctgggtttatttgtaaatactgcatctatccttcttagtgttttaggactggctggaaagactcttcttcctgtaggttgggtcagtgtgagagatctaaaaaatcattttcccttaaaattactgtattttaataaaaggatgtggcaggggctggaatgagagaaaactggtccttcaaaatgtaaaactgtcatacttaaaccagtttacaaaatatgcgtttaattatgtggtgggatgtgtgtaggtgtatgatgagagaggcaaccaacatggctatttggggtgcaaggatgtgggaacaggcaagtaattttcacattggactttcatcctagggagctgggttctagtcacagctctgagctgtgtgaccttgggtaggtctcatctccccggggttttgtttcaccagttgaacagtatgaggatgagtcacagctaacatttgttccatgatatttacccagcaccatacaagtgttatttctgtcctcccagttaacactgacgtgggtagtattatatgcccattttacagatgaggaaactgaagcctgaagaagttaaatacttatcccagaacacacagctggtaagtggcagacctggaattggaatctagttcagtttgattccccaacccatgctcttgaccactatactgttttttcaagtccagatctgaaatctcattttctgtgtggctgtgtgtttgggacaggggtaaccaattcctgactactctatatgctgcatagaacctggagaggatttttcaaagtaaatgaatctcgaaagctggattgcagagcaaacgagtgcagtcaattcagccaggggcttgcaagagggagaaagagaaaaagactgtggaatggaaagtttcccaacccaagcctttcccaaggggtagccattctctgttctacagtttagggcttgcatgtgctttttctggagtggaaaaatacataagttataaggaatttaacagacagaaaggcgcacagaggaatttaaagtgtgggctggggcgaggcggtgggcgggaggcgagcgggcgcaggcggaacaccgttttccaagctaagccgccgcaaataaaaaggcgtaaagggagagaagttggtgctcaacgtgagccaggagcagcgtcccggctcctcccctgctcattttaaaagcacttcttgtattgtttttaaggtgagaaataggaaagaaaacgccggcttgtgcgctcgctgcctgcctctctggctgtctgcttttgcagggctgctgggagtttttaagctctgtgagaatcctgggagttggtgatgtcagactagttgggtcatttgaaggttagcagcccgggtagggttcaccgaaagttcactcgcatatattaggcaattcaatctttcattctgt

SEQ ID NO: 2682 - DNA, 4868 bp, Homo sapiens
gcggccgcgtctttgttccagacgcagtccaggaatcatgctggagaagttctgcaactctactttttggaattcctcattcctggacagtccggaggcagacctgccactttgttttgagcaaactgttctggtgtggattcccttgggcttcctatggctcctggccccctggcagcttctccacgtgtataaatccaggaccaagagatcctctaccaccaaactctatcttgctaagcaggtattcgttggttttcttcttattctagcagccatagagctggcccttgtactcacagaagactctggacaagccacagtccctgctgttcgatataccaatccaagcctctacctaggcacatggctcctggttttgctgatccaatacagcagacaatggtgtgtacagaaaaactcctggttcctgtccctattctggattctctcgatactctgtggcactttccaatttcagactctgatccggacactcttacagggtgacaattctaatctagcctactcctgcctgttcttcatctcctacggattccagatcctgatcctgatcttttcagcattttcagaaaataatgagtcatcaaataatccatcatccatagcttcattcctgagtagcattacctacagctggtatgacagcatcattctgaaaggctacaagcgtcctctgacactcgaggatgtctgggaagttgatgaagagatgaaaaccaagacattagtgagcaagtttgaaacgcacatgaagagagagctgcagaaagccaggcgggcactccagagacggcaggagaagagctcccagcagaactctggagccaggctgcctggcttgaacaagaatcagagtcaaagccaagatgcccttgtcctggaagatgttgaaaagaaaaaaaagaagtctgggaccaaaaaagatgttccaaaatcctggttgatgaaggctctgttcaaaactttctacatggtgctcctgaaatcattcctactgaagctagtgaatgacatcttcacgtttgtgagtcctcagctgctgaaattgctgatctcctttgcaagtgaccgtgacacatatttgtggattggatatctctgtgcaatcctcttattcactgcggctctcattcagtctttctgccttcagtgttatttccaactgtgcttcaagctgggtgtaaaagtacggacagctatcatggcttctgtatataagaaggcattgaccctatccaacttggccaggaaggagtacaccgttggagaaacagtgaacctgatgtctgtggatgcccagaagctcatggatgtgaccaacttcatgcacatgctgtggtcaagtgttctacagattgtcttatctatcttcttcctatggagagagttgggaccctcagtcttagcaggtgttggggtgatggtgcttgtaatcccaattaatgcgatactgtccaccaagagtaagaccattcaggtcaaaaatatgaagaataaagacaaacgtttaaagatcatgaatgagattcttagtggaatcaagatcctgaaatattttgcctgggaaccttcattcagagaccaagtacaaaacctccggaagaaagagctcaagaacctgctggcctttagtcaactacagtgtgtagtaatattcgtcttccagttaactccagtcctggtatctgtggtcacattttctgtttatgtcctggtggatagcaacaatattttggatgcacaaaaggccttcacctccattaccctcttcaatatcctgcgctttcccctgagcatgcttcccatgatgatctcctccatgctccaggccagtgtttccacagagcggctagagaagtacttgggaggggatgacttggacacatctgccattcgacatgactgcaattttgacaaagccatgcagttttctgaggcctcctttacctgggaacatgattcggaagccacagtccgagatgtgaacctggacattatggcaggccaacttgtggctgtgataggccctgtcggctctgggaaatcctccttgatatcagccatgctgggagaaatggaaaatgtccacgggcacatcaccatcaagggcaccactgcctatgtcccacagcagtcctggattcagaatggcaccataaaggacaacatcctttttggaacagagtttaatgaaaagaggtaccagcaagtactggaggcctgtgctctcctcccagacttggaaatgctgcctggaggagatttggctgagattggagagaagggtataaatcttagtgggggtcagaagcagcggatcagcctggccagagctacctaccaaaatttagacatctatcttctagatgaccccctgtctgcagtggatgctcatgtaggaaaacatatttttaataaggtcttgggccccaatggcctgttgaaaggcaagactcgactcttggttacacatagcatgcactttcttcctcaagtggatgagattgtagttctggggaatggaacaattgtagagaaaggatcctacagtgctctcctggccaaaaaaggagagtttgctaagaatctgaagacatttctaagacatacaggccctgaagaggaagccacagtccatgatggcagtgaagaagaagacgatgactatgggctgatatccagtgtggaagagatccccgaagatgcagcctccataaccatgagaagagagaacagctttcgtcgaacacttagccgcagttctaggtccaatggcaggcatctgaagtccctgagaaactccttgaaaactcggaatgtgaatagcctgaaggaagacgaagaactagtgaaaggacaaaaactaattaagaaggaattcatagaaactggaaaggtgaagttctccatctacctggagtacctacaagcaataggattgttttcgatattcttcatcatccttgcgtttgtgatgaattctgtggcttttattggatccaacctctggctcagtgcttggaccagtgactctaaaatcttcaatagcaccgactatccagcatctcagagggacatgagagttggagtctacggagctctgggattagcccaaggtatatttgtgttcatagcacatttctggagtgcctttggtttcgtccatgcatcaaatatcttgcacaagcaactgctgaacaatatccttcgagcacctatgagattttttgacacaacacccacaggccggattgtgaacaggtttgccggcgatatttccacagtggatgacaccctgcctcagtccttgcgcagctggattacatgcttcctggggataatcagcacccttgtcatgatctgcatggccactcctgtcttcaccatcatcgtcattcctcttggcattatttatgtatctgttcagatgttttatgtgtctacctcccgccagctgaggcgtctggactctgtcaccaggtccccaatctactctcacttcagcgagaccgtatcaggtttgccagttatccgtgcctttgagcaccagcagcgatttctgaaacacaatgaggtgaggattgacaccaaccagaaatgtgtcttttcctggatcacctccaacaggtggcttgcaattcgcctggagctggttgggaacctgactgtcttcttttcagccttgatgatggttatttatagagataccctaagtggggacactgttggctttgttctgtccaatgcactcaatatcacacaaaccctgaactggctggtgaggatgacatcagaaatagagaccaacattgtggctgttgagcgaataactgagtacacaaaagtggaaaatgaggcaccctgggtgactgataagaggcctccgccagattggcccagcaaaggcaagatccagtttaacaactaccaagtgcggtaccgacctgagctggatctggtcctcagagggatcacttgtgacatcggtagcatggagaagattggtgtggtgggcaggacaggagctggaaagtcatccctcacaaactgcctcttcagaatcttagaggctgccggtggtcagattatcattgatggagtagatattgcttccattgggctccacgacctccgagagaagctgaccatcatcccccaggaccccatcctgttctctggaagcctgaggatgaatctcgaccctttcaacaactactcagatgaggagatttggaaggccttggagctggctcacctcaagtcttttgtggccagcctgcaacttgggttatcccacgaagtgacagaggctggtggcaacctgagcataggccagaggcagctgctgtgcctgggcagggctctgcttcggaaatccaagatcctggtcctggatgaggccactgctgcggtggatctagagacagacaacctcattcagacgaccatccaaaacgagttcgcccactgcacagtgatcaccatcgcccacaggctgcacaccatcatggacagtgacaaggtaatggtcctagacaacgggaagattatagagtgcggcagccctgaagaactgctacaaatccctggacccttttactttatggctaaggaagctggcattgagaatgtgaacagcacaaaattctagcagaaggccccatgggttagaaaaggactataagaataatttcttatttaattttattttttataaaatacagaatacatacaaaagtgtgtataaaatgtacgttttaaaaaaggataagtgaacacccatgaacctactacccaggttaagaaaataaatgtcaccaggtacttgagaaacccctcgattg

SEQ ID NO: 2683 - DNA, 4039 bp, Homo sapiens
tgccaaggctccagcccggccgggctccgaggcgagaggctgcatggagtggccggcgcggctctgcgggctgtgggcgctgctgctctgcgccggcggcgggggcgggggcgggggcgccgcgcctacggaaactcagccacctgtgacaaatttgagtgtctctgttgaaaacctctgcacagtaatatggacatggaatccacccgagggagccagctcaaattgtagtctatggtattttagtcattttggcgacaaacaagataagaaaatagctccggaaactcgtcgttcaatagaagtacccctgaatgagaggatttgtctgcaagtggggtcccagtgtagcaccaatgagagtgagaagcctagcattttggttgaaaaatgcatctcacccccagaaggtgatcctgagtctgctgtgactgagcttcaatgcatttggcacaacctgagctacatgaagtgttcttggctccctggaaggaataccagtcccgacactaactatactctctactattggcacagaagcctggaaaaaattcatcaatgtgaaaacatctttagagaaggccaatactttggttgttcctttgatctgaccaaagtgaaggattccagttttgaacaacacagtgtccaaataatggtcaaggataatgcaggaaaaattaaaccatccttcaatatagtgcctttaacttcccgtgtgaaacctgatcctccacatattaaaaacctctccttccacaatgatgacctatatgtgcaatgggagaatccacagaattttattagcagatgcctattttatgaagtagaagtcaataacagccaaactgagacacataatgttttctacgtccaagaggctaaatgtgagaatccagaatttgagagaaatgtggagaatacatcttgtttcatggtccctggtgttcttcctgatactttgaacacagtcagaataagagtcaaaacaaataagttatgctatgaggatgacaaactctggagtaattggagccaagaaatgagtataggtaagaagcgcaattccacactctacataaccatgttactcattgttccagtcatcgtcgcaggtgcaatcatagtactcctgctttacctaaaaaggctcaagattattatattccctccaattcctgatcctggcaagatttttaaagaaatgtttggagaccagaatgatgatactctgcactggaagaagtacgacatctatgagaagcaaaccaaggaggaaaccgactctgtagtgctgatagaaaacctgaagaaagcctctcagtgatggagataatttatttttaccttcactgtgaccttgagaagattcttcccattctccatttgttatctgggaacttattaaatggaaactgaaactactgcaccatttaaaaacaggcagctcataagagccacaggtctttatgttgagtcgcgcaccgaaaaactaaaaataatgggcgctttggagaagagtgtggagtcattctcattgaattataaaagccagcaggcttcaaactaggggacaaagcaaaaagtgatgatagtggtggagttaatcttatcaagagttgtgacaacttcctgagggatctatacttgctttgtgttctttgtgtcaacatgaacaaattttatttgtaggggaactcatttggggtgcaaatgctaatgtcaaacttgagtcacaaagaacatgtagaaaacaaaatggataaaatctgatatgtattgtttgggatcctattgaaccatgtttgtggctattaaaactcttttaacagtctgggctgggtccggtggctcacgcctgtaatcccagcaatttgggagtccgaggcgggcggatcactcgaggtcaggagttccagaccagcctgaccaaaatggtgaaacctcctctctactaaaactacaaaaattaactgggtgtggtggcgcgtgcctgtaatcccagctactcgggaagctgaggcaggtgaattgtttgaacctgggaggtggaggttgcagtgagcagagatcacaccactgcactctagcctgggtgacagagcaagactctgtctaaaaaacaaaacaaaacaaaacaaaacaaaaaaacctcttaatattctggagtcatcattcccttcgacagcattttcctctgctttgaaagccccagaaatcagtgttggccatgatgacaactacagaaaaaccagaggcagcttctttgccaagacctttcaaagccattttaggctgttaggggcagtggaggtagaatgactccttgggtattagagtttcaaccatgaagtctctaacaatgtattttcttcacctctgctactcaagtagcatttactgtgtctttggtttgtgctaggcccccgggtgtgaagcacagaccccttccaggggtttacagtctatttgagactcctcagttcttgccacttttttttttaatctccaccagtcatttttcagaccttttaactcctcaattccaacactgatttccccttttgcattctccctccttcccttccttgtagccttttgactttcattggaaattaggatgtaaatctgctcaggagacctggaggagcagaggataattagcatctcaggttaagtgtgagtaatctgagaaacaatgactaattcttgcatattttgtaacttccatgtgagggttttcagcattgatatttgtgcattttctaaacagagatgaggtggtatcttcacgtagaacattggtattcgcttgagaaaaaaagaatagttgaacctatttctctttctttacaagatgggtccaggattcctcttttctctgccataaatgattaattaaatagcttttgtgtcttacattggtagccagccagccaaggctctgtttatgcttttggggggcatatattgggttccattctcacctatccacacaacatatccgtatatatcccctctactcttacttcccccaaatttaaagaagtatgggaaatgagaggcatttcccccaccccatttctctcctcacacacagactcatattactggtaggaacttgagaactttatttccaagttgttcaaacatttaccaatcatattaatacaatgatgctatttgcaattcctgctcctaggggaggggagataagaaaccctcactctctacaggtttgggtacaagtggcaacctgcttccatggccgtgtagaagcatggtgccctggcttctctgaggaagctggggttcatgacaatggcagatgtaaagttattcttgaagtcagattgaggctgggagacagccgtagtagatgttctactttgttctgctgttctctagaaagaatatttggttttcctgtataggaatgagattaattcctttccaggtattttataattctgggaagcaaaacccatgcctccccctagccatttttactgttatcctatttagatggccatgaagaggatgctgtgaaattcccaacaaacattgatgctgacagtcatgcagtctgggagtggggaagtgatcttttgttcccatcctcttcttttagcagtaaaatagctgagggaaaagggagggaaaaggaagttatgggaatacctgtggtggttgtgatccctaggtcttgggagctcttggaggtgtctgtatcagtggatttcccatcccctgtgggaaattagtaggctcatttactgttttaggtctagcctatgtggattttttcctaacatacctaagcaaacccagtgtcaggatggtaattcttattctttcgttcagttaagtttttcccttcatctgggcactgaagggatatgtgaaacaatgttaacatttttggtagtcttcaaccagggattgtttctgtttaacttcttataggaaagcttgagtaaaataaatattgtctttttgtatgtcaagcgggccgccaccgcggtggaaactccagctt

SEQ ID NO: 2684 - DNA, 14392 bp, Homo sapiens
gcagacctaaaggagcgttcgctagcagaggcgctgccggtgcggtgtgctacgcgcgcccacctcccggggaaggaacggcgaggccggggaccgtcgcggagatggatcgcgggccggcagcagtggcgtgcacgctgctcctggctctcgtcgcctgcctagcgccggccagtggccaagaatgtgacagtgcgcattttcgctgtggaagtgggcattgcatccctgcagactggaggtgtgatgggaccaaagactgttcagatgacgcggatgaaattggctgcgctgttgtgacctgccagcagggctatttcaagtgccagagtgagggacaatgcatccccagctcctgggtgtgtgaccaagatcaagactgtgatgatggctcagatgaacgtcaagattgctcacaaagtacatgctcaagtcatcagataacatgctccaatggtcagtgtatcccaagtgaatacaggtgcgaccacgtcagagactgccccgatggagctgatgagaatgactgccagtacccaacatgtgagcagcttacttgtgacaatggggcctgctataacaccagtcagaagtgtgattggaaagttgattgcagggactcctcagatgaaatcaactgcactgagatatgcttgcacaatgagttttcatgtggcaatggagagtgtatccctcgtgcttatgtctgtgaccatgacaatgattgccaagacggcagtgatgaacatgcttgcaactatccgacctgcggtggttaccagttcacttgccccagtggccgatgcatttatcaaaactgggtttgtgatggagaagatgactgtaaagataatggagatgaagatggatgtgaaagcggtcctcatgatgttcataaatgttccccaagagaatggtcttgcccagagtcgggacgatgcatctccatttataaagtttgtgatgggattttagattgcccaggaagagaagatgaaaacaacactagtaccggaaaatactgtagtatgactctgtgctctgccttgaactgccagtaccagtgccatgagacgccgtatggaggagcgtgtttttgtcccccaggttatatcatcaaccacaatgacagccgtacctgtgttgagtttgatgattgccagatatggggaatttgtgaccagaagtgtgaaagccgacctggccgtcacctgtgccactgtgaagaagggtatatcttggagcgtggacagtattgcaaagctaatgattcctttggcgaggcctccattatcttctccaatggtcgggatttgttaattggtgatattcatggaaggagcttccggatcctagtggagtctcagaatcgtggagtggccgtgggtgtggctttccactatcacctgcaaagagttttttggacagacaccgtgcaaaataaggttttttcagttgacattaatggtttaaatatccaagaggttctcaatgtttctgttgaaaccccagagaacctggctgtggactgggttaataataaaatctatctagtggaaaccaaggtcaaccgcatagatatggtaaatttggatggaagctatcgggttacccttataactgaaaacttggggcatcctagaggaattgccgtggacccaactgttggttatttatttttctcagattgggagagcctttctggggaacctaagctggaaagggcattcatggatggcagcaaccgtaaagacttggtgaaaacaaagctgggatggcctgctggggtaactctggatatgatatcgaagcgtgtttactgggttgactctcggtttgattacattgaaactgtaacttatgatggaattcaaaggaagactgtagttcatggaggctccctcattcctcatccctttggagtaagcttatttgaaggtcaggtgttctttacagattggacaaagatggccgtgctgaaggcaaacaagttcacagagaccaacccacaagtgtactaccaggcttccctgaggccctatggagtgactgtttaccattccctcagacagccctatgctaccaatccgtgtaaagataacaatgggggctgtgagcaggtctgtgttctcagccacagaacagataatgatggtttgggtttccgttgcaagtgcacattcggcttccaactggatacagatgagcgccactgcattgctgttcagaatttcctcattttttcatcccaagttgctattcgtgggatcccgttcaccttgtctacccaggaagatgtcatggttccagtttcggggaatccttctttctttgtcgggattgattttgacgcccaggacagcactatctttttttcagatatgtcaaaacacatgatttttaagcaaaagattgatggcacaggaagagaaattctcgcagctaacagggtggaaaatgttgaaagtttggcttttgattggatttcaaagaatctctattggacagactctcattacaagagtatcagtgtcatgaggctagctgataaaacgagacgcacagtagttcagtatttaaataacccacggtcggtggtagttcatccttttgccgggtatctattcttcactgattggttccgtcctgctaaaattatgagagcatggagtgacggatctcacctcttgcctgtaataaacactactcttggatggcccaatggcttggccatcgattgggctgcttcacgattgtactgggtagatgcctattttgataaaattgagcacagcacctttgatggtttagacagaagaagactgggccatatagagcagatgacacatccgtttggacttgccatctttggagagcatttattttttactgactggagactgggtgccattattcgagtcaggaaagcagatggtggagaaatgacagttatccgaagtggcattgcttacatactgcatttgaaatcgtatgatgtcaacatccagactggttctaacgcctgtaatcaacccacgcatcctaacggtgactgcagccacttctgcttcccggtgccaaatttccagcgagtgtgtgggtgcccttatggaatgaggctggcttccaatcacttgacatgcgagggggacccaaccaatgaaccacccacggagcagtgtggcttattttccttcccctgtaaaaatggcagatgtgtgcccaattactatctctgtgatggagtcgatgattgtcatgataacagtgatgagcaactatgtggcacacttaataatacctgttcatcttcggcgttcacctgtggccatggggagtgcattcctgcacactggcgctgtgacaaacgcaacgactgtgtggatggcagtgatgagcacaactgccccacccacgcacctgcttcctgccttgacacccaatacacctgtgataatcaccagtgtatctcaaagaactgggtctgtgacacagacaatgattgtggggatggatctgatgaaaagaactgcaattcgacagagacatgccaacctagtcagtttaattgccccaatcatcgatgtattgacctatcgtttgtctgtgatggtgacaaggattgtgttgatggatctgatgaggttggttgtgtattaaactgtactgcttctcaattcaagtgtgccagtggggataaatgtattggcgtcacaaatcgttgtgatggtgtttttgattgcagtgacaactcggatgaagcgggctgtccaaccaggcctcctggtatgtgccactcagatgaatttcagtgccaagaagatggtatctgcatcccgaacttctgggaatgtgatgggcatccagactgcctctatggatctgatgagcacaatgcctgtgtccccaagacttgcccttcatcatatttccactgtgacaacggaaactgcatccacagggcatggctctgtgatcgggacaatgactgcggggatatgagtgatgagaaggactgccctactcagccctttcgctgtcctagttggcaatggcagtgtcttggccataacatctgtgtgaatctgagtgtagtgtgtgatggcatctttgactgccccaatgggacagatgagtccccactttgcaatgggaacagctgctcagatttcaatggtggttgtactcacgagtgtgttcaagagccctttggggctaaatgcctatgtccattgggattcttacttgccaatgattctaagacctgtgaagacatagatgaatgtgatattctaggctcttgtagccagcactgttacaatatgagaggttctttccggtgctcgtgtgatacaggctacatgttagaaagtgatgggaggacttgcaaagttacagcatctgagagtctgctgttacttgtggcaagtcagaacaaaattattgccgacagtgtcacctcccaggtccacaatatctattcattggtcgagaatggttcttacattgtagctgttgattttgattcaattagtggtcgtatcttttggtctgatgcaactcagggtaaaacctggagtgcgtttcaaaatggaacggacagaagagtggtatttgacagtagcatcatcttgactgaaactattgcaatagattgggtaggtcgtaatctttactggacagactatgctctggaaacaattgaagtctccaaaattgatgggagccacaggactgtgctgattagtaaaaacctaacaaatccaagaggactagcattagatcccagaatgaatgagcatctactgttctggtctgactggggccaccaccctcgcatcgagcgagccagcatggacggcagcatgcgcactgtcattgtccaggacaagatcttctggccctgcggcttaactattgactaccccaacagactgctctacttcatggactcctatcttgattacatggacttttgcgattataatggacaccatcggagacaggtgatagccagtgatttgattatacggcacccctatgccctaactctctttgaagactctgtgtactggactgaccgtgctactcgtcgggttatgcgagccaacaagtggcatggagggaaccagtcagttgtaatgtataatattcaatggccccttgggattgttgcggttcatccttcgaaacaaccaaattccgtgaatccatgtgccttttcccgctgcagccatctctgcctgctttcctcacaggggcctcatttttactcctgtgtttgtccttcaggatggagtctgtctcctgatctcctgaattgcttgagagatgatcaacctttcttaataactgtaaggcaacatataatttttggaatctcccttaatcctgaggtgaagagcaatgatgctatggtccccatagcagggatacagaatggtttagatgttgaatttgatgatgctgagcaatacatctattgggttgaaaatccaggtgaaattcacagagtgaagacagatggcaccaacaggacagtatttgcttctatatctatggtggggccttctatgaacctggccttagattggatttcaagaaacctttattctaccaatcctagaactcagtcaatcgaggttttgacactccacggagatatcagatacagaaaaacattgattgccaatgatgggacagctcttggagttggctttccaattggcataactgttgatcctgctcgtgggaagctgtactggtcagaccaaggaactgacagtggggttcctgccaagatcgccagtgctaacatggatggcacatctgtgaaaactctctttactgggaacctcgaacacctggagtgtgtcactcttgacatcgaagagcagaaactctactgggcagtcactggaagaggagtgattgaaagaggaaacgtggatggaacagatcggatgatcctggtacaccagctttcccacccctggggaattgcagtccatgattctttcctttattatactgatgaacagtatgaggtcattgaaagagttgataaggccactggggccaacaaaatagtcttgagagataatgttccaaatctgaggggtcttcaagtttatcacagacgcaatgccgccgaatcctcaaatggctgtagcaacaacatgaatgcctgtcagcagatttgcctgcctgtaccaggaggattgttttcctgcgcctgtgccactggatttaaactcaatcctgataatcggtcctgctctccatataactctttcattgttgtttcaatgctgtctgcaatcagaggctttagcttggaattgtcagatcattcagaaaccatggtgccggtggcaggccaaggacgaaacgcactgcatgtggatgtggatgtgtcctctggctttatttattggtgtgattttagcagctcagtggcatctgataatgcgatccgtagaattaaaccagatggatcttctctgatgaacattgtgacacatggaataggagaaaatggagtccggggtattgcagtggattgggtagcaggaaatctttatttcaccaatgcctttgtttctgaaacactgatagaagttctgcggatcaatactacttaccgccgtgttcttcttaaagtcacagtggacatgcctaggcatattgttgtagatcccaagaacagatacctcttctgggctgactatgggcagagaccaaagattgagcgttctttccttgactgtaccaatcgaacagtgcttgtgtcagagggcattgtcacaccacggggcttggcagtggaccgaagtgatggctacgtttattgggttgatgattctttagatataattgcaaggattcgtatcaatggagagaactctgaagtgattcgttatggcagtcgttacccaactccttatggcatcactgtttttgaaaattctatcatatgggtagataggaatttgaaaaagatcttccaagccagcaaggaaccagagaacacagagccacccacagtgataagagacaatatcaactggctaagagatgtgaccatctttgacaagcaagtccagccccggtcaccagcagaggtcaacaacaacccttgcttggaaaacaatggtgggtgctctcatctctgctttgctctgcctggattgcacaccccaaaatgtgactgtgcctttgggaccctgcaaagtgatggcaagaattgtgccatttcaacagaaaatttcctcatctttgccttgtctaattccttgagaagcttacacttggaccctgaaaaccatagcccacctttccaaacaataaatgtggaaagaactgtcatgtctctagactatgacagtgtaagtgatagaatctacttcacacaaaatttagcctctggagttggacagatttcctatgccaccctgtcttcagggatccatactccaactgtcattgcttcaggtatagggactgctgatggcattgcctttgactggattactagaagaatttattacagtgactacctcaaccagatgattaattccatggctgaagatgggtctaaccgcactgtgatagcccgcgttccaaaaccaagagcaattgtgttagatccctgccaagggtacctgtactgggctgactgggatacacatgccaaaatcgagagagccacattgggaggaaacttccgggtacccattgtgaacagcagtctggtcatgcccagtgggctgactctggactatgaagaggaccttctctactgggtggatgctagtctgcagaggattgaacgcagcactctgacgggcgtggatcgtgaagtcattgtcaatgcagccgttcatgcttttggcttgactctctatggccagtatatttactggactgacttgtacacacaaagaatttaccgagctaacaaatatgacgggtcaggtcagattgcaatgaccacaaatttgctctcccagcccaggggaatcaacactgttgtgaagaaccagaaacaacagtgtaacaatccttgtgaacagtttaatgggggctgcagccatatctgtgcaccaggtccaaatggtgccgagtgccagtgtccacatgagggcaactggtatttggccaacaacaggaagcactgcattgtggacaatggtgaacgatgtggtgcatcttccttcacctgctccaatgggcgctgcatctcggaagagtggaagtgtgataatgacaacgactgtggggatggcagtgatgagatggaaagtgtctgtgcacttcacacctgctcaccgacagccttcacctgtgccaatgggcgatgtgtccaatactcttaccgctgtgattactacaatgactgtggtgatggcagtgatgaggcagggtgcctgttcagggactgcaatgccaccacggagtttatgtgcaataacagaaggtgcatacctcgtgagtttatctgcaatggtgtagacaactgccatgataataacacttcagatgagaaaaattgccctgatcgcacttgccagtctggatacacaaaatgtcataattcaaatatttgtattcctcgcgtttatttgtgtgacggagacaatgactgtggagataacagtgatgaaaaccctacttattgcaccactcacacatgcagcagcagtgagttccaatgcgcatctgggcgctgtattcctcaacattggtattgtgatcaagaaacagattgttttgatgcctctgatgaacctgcctcttgtggtcactctgagcgaacatgcctagctgatgagttcaagtgtgatggtgggaggtgcatcccaagcgaatggatctgtgacggtgataatgactgtggggatatgagtgacgaggataaaaggcaccagtgtcagaatcaaaactgctcggattccgagtttctctgtgtaaatgacagacctccggacaggaggtgcattccccagtcttgggtctgtgatggcgatgtggattgtactgacggctacgatgagaatcagaattgcaccaggagaacttgctctgaaaatgaattcacctgtggttacggactgtgtatcccaaagatattcaggtgtgaccggcacaatgactgtggtgactatagcgacgagaggggctgcttataccagacttgccaacagaatcagtttacctgtcagaacgggcgctgcattagtaaaaccttcgtctgtgatgaggataatgactgtggagacggatctgatgagctgatgcacctgtgccacaccccagaacccacgtgtccacctcacgagttcaagtgtgacaatgggcgctgcatcgagatgatgaaactctgcaaccacctagatgactgtttggacaacagcgatgagaaaggctgtggcattaatgaatgccatgacccttcaatcagtggctgcgatcacaactgcacagacaccttaaccagtttctattgttcctgtcgtcctggttacaagctcatgtctgacaagcggacttgtgttgatattgatgaatgcacagagatgccttttgtctgtagccagaagtgtgagaatgtaataggctcctacatctgtaagtgtgccccaggctacctccgagaaccagatggaaagacctgccggcaaaacagtaacatcgaaccctatctcatttttagcaaccgttactatttgagaaatttaactatagatggctatttttactccctcatcttggaaggactggacaatgttgtggcattagattttgaccgagtagagaagagattgtattggattgatacacagaggcaagtcattgagagaatgtttctgaataagacaaacaaggagacaatcataaaccacagactaccagctgcagaaagtctggctgtagactgggtttccagaaagctctactggttggatgcccgcctggatggcctctttgtctctgacctcaatggtggacaccgccgcatgctggcccagcactgtgtggatgccaacaacaccttctgctttgataatcccagaggacttgcccttcaccctcaatatgggtacctctactgggcagactggggtcaccgcgcatacattgggagagtaggcatggatggaaccaacaagtctgtgataatctccaccaagttagagtggcctaatggcatcaccattgattacaccaatgatctactctactgggcagatgcccacctgggttacatagagtactctgatttggagggccaccatcgacacacggtgtatgatggggcactgcctcaccctttcgctattaccatttttgaagacactatttattggacagattggaatacaaggacagtggaaaagggaaacaaatatgatggatcaaatagacagacactggtgaacacaacacacagaccatttgacatccatgtgtaccatccatataggcagcccattgtgagcaatccctgtggtaccaacaatggtggctgttctcatctctgcctcatcaagccaggaggaaaagggttcacttgcgagtgtccagatgacttccgcacccttcaactgagtggcagcacctactgcatgcccatgtgctccagcacccagttcctgtgcgctaacaatgaaaagtgcattcctatctggtggaaatgtgatggacagaaagactgctcagatggctctgatgaactggccctttgcccgcagcgcttctgccgactgggacagttccagtgcagtgacggcaactgcaccagcccgcagactttatgcaatgctcaccaaaattgccctgatgggtctgatgaagaccgtcttctttgtgagaatcaccactgtgactccaatgaatggcagtgcgccaacaaacgttgcatcccagaatcctggcagtgtgacacatttaacgactgtgaggataactcagatgaagacagttcccactgtgccagcaggacctgccggccgggccagtttcggtgtgctaatggccgctgcatcccgcaggcctggaagtgtgatgtggataatgattgtggagaccactcggatgagcccattgaagaatgcatgagctctgcccatctctgtgacaacttcacagaattcagctgcaaaacaaattaccgctgcatcccaaagtgggccgtgtgcaatggtgtagatgactgcagggacaacagtgatgagcaaggctgtgaggagaggacatgccatcctgtgggggatttccgctgtaaaaatcaccactgcatccctcttcgttggcagtgtgatgggcaaaatgactgtggagataactcagatgaggaaaactgtgctccccgggagtgcacagagagcgagtttcgatgtgtcaatcagcagtgcattccctcgcgatggatctgtgaccattacaacgactgtggggacaactcagatgaacgggactgtgagatgaggacctgccatcctgaatattttcagtgtacaagtggacattgtgtacacagtgaactgaaatgcgatggatccgctgactgtttggatgcgtctgatgaagctgattgtcccacacgctttcctgatggtgcatactgccaggctactatgttcgaatgcaaaaaccatgtttgtatcccgccatattggaaatgtgatggcgatgatgactgtggcgatggttcagatgaagaacttcacctgtgcttggatgttccctgtaattcaccaaaccgtttccggtgtgacaacaatcgctgcatttatagtcatgaggtgtgcaatggtgtggatgactgtggagatggaactgatgagacagaggagcactgtagaaaaccgacccctaaaccttgtacagaatatgaatataagtgtggcaatgggcattgcattccacatgacaatgtgtgtgatgatgccgatgactgtggtgactggtccgatgaactgggttgcaataaaggaaaagaaagaacatgtgctgaaaatatatgcgagcaaaattgtacccaattaaatgaaggaggatttatctgctcctgtacagctgggttcgaaaccaatgtttttgacagaacctcctgtctagatatcaatgaatgtgaacaatttgggacttgtccccagcactgcagaaataccaaaggaagttatgagtgtgtctgtgctgatggcttcacgtctatgagtgaccgccctggaaaacgatgtgcagctgagggtagctctcctttgttgctactgcctgacaatgtccgaattcgaaaatataatctctcatctgagaggttctcagagtatcttcaagatgaggaatatatccaagctgttgattatgattgggatcccaaggacataggcctcagtgttgtgtattacactgtgcgaggggagggctctaggtttggtgctatcaaacgtgcctacatccccaactttgaatccggccgcaataatcttgtgcaggaagttgacctgaaactgaaatacgtaatgcagccagatggaatagcagtggactgggttggaaggcatatttactggtcagatgtcaagaataaacgcattgaggtggctaaacttgatggaaggtacagaaagtggctgatttccactgacctggaccaaccagctgctattgctgtgaatcccaaactagggcttatgttctggactgactggggaaaggaacctaaaatcgagtctgcctggatgaatggagaggaccgcaacatcctggttttcgaggaccttggttggccaactggcctttctatcgattatttgaacaatgaccgaatctactggagtgacttcaaggaggacgttattgaaaccataaaatatgatgggactgataggagagtcattgcaaaggaagcaatgaacccttacagcctggacatctttgaagaccagttatactggatatctaaggaaaagggagaagtatggaaacaaaataaatttgggcaaggaaagaaagagaaaacgctggtagtgaacccttggctcactcaagttcgaatctttcatcaactcagatacaataagtcagtgcccaacctttgcaaacagatctgcagccacctctgccttctgagacctggaggatacagctgtgcctgtccccaaggctccagctttatagaggggagcaccactgagtgtgatgcagccatcgaactgcctatcaacctgccccccccatgcaggtgcatgcacggaggaaattgctattttgatgagactgacctccccaaatgcaagtgtcctagcggctacaccggaaaatattgtgaaatggcgttttcaaaaggcatctctccaggaacaaccgcagtagctgtgctgttgacaatcctcttgatcgtcgtaattggagctctggcaattgcaggattcttccactatagaaggaccggctcccttttgcctgctctgcccaagctgccaagcttaagcagtctcgtcaagccctctgaaaatgggaatggggtgaccttcagatcaggggcagatcttaacatggatattggagtgtctggttttggacctgagactgctattgacaggtcaatggcaatgagtgaagactttgtcatggaaatggggaagcagcccataatatttgaaaacccaatgtactcagccagagacagtgctgtcaaagtggttcagccaatccaggtgactgtatctgaaaatgtggataataagaattatggaagtcccataaacccttctgagatagttccagagacaaacccaacttcaccagctgctgatggaactcaggtgacaaaatggaatctcttcaaacgaaaatctaaacaaactaccaactttgaaaatccaatctatgcacagatggagaacgagcaaaaggaaagtgttgctgcgacaccacctccatcaccttcgctccctgctaagcctaagcctccttcgagaagagacccaactccaacctattctgcaacagaagacacttttaaagacaccgcaaatcttgttaaagaagactctgaagtatagctataccagctatttagggaataattagaaacacacttttgcacatatattttttacaaacagatgaaaaaagttaacattcagtactttatgaaaaaaatatatttttccctgtttgcctataggtggaggtatcctgtgtgtctttttttacttatgccgtctcatatttttacaaataattatcacaatgtactatatgtatatctttgcactgaagttgtctgaaggtaatactataaatatattgtatatttgtaaattttggaaagattatcctgttactgaatttgctaataaagatgtctgctgaaaaaaaa

SEQ ID NO: 2685 - DNA, 2424 bp, Homo sapiens
cctggaactctagcacgccgagtgaacttgaatctttggctatttaaggaggactgggtttgttgtgaagttgcggtgatccagcgcagagccccgtcctgattgatcgcatcgcggggctcagatgactgtaaaatgaatagatgaaattcttgcttctcgaagattttcttgggcatctcccggaaagtgcgttttaaggcgaagtcatgatgtattctcccatctgtctcactcaggatgaatttcacccattcatggaagcacttcttccacatgtccgtgcaattgcctatacttggttcaacctgcaggctcgaaaacgcaagtactttaaaaagcatgagaagcgaatgtcaaaggatgaagaaagagcagtcaaagatgagcttctcagtgaaaagcctgaaatcaaacagaagtgggcatccaggctccttgccaaactgcgcaaagatattcgccaggagtatcgagaggactttgtgctcaccgtgactggcaagaagcacccgtgctgtgtcttatccaatcccgaccagaagggtaagattaggagaatcgactgcctgcgacaggcagacaaagtctggcgtctggatctagtcatggtgatcctgttcaaaggcatccccttggaaagtaccgatggagagcggctcatgaaatccccacattgcacaaacccagcactttgtgtccagccacatcatatcacagtatcagttaaggagcttgatttgtttttggcatactacgtgcaggagcaagattctggacaatcaggaagtccaagccacaatgatcctgccaagaatcctccaggttaccttgaggatagttttgtaaaatctggagtcttcaatgtatcagaacttgtaagagtatccagaacgcccataacccagggaactggagtcaacttcccaattggagaaatcccaagccaaccatactatcatgacatgaactcgggggtcaatcttcagaggtctctgtcttctccaccaagcagcaaaagacccaaaactatatccatagaygaaaatatggaaccaagtcctacaggagacttttacccctctccaagttcaccagctgctggaagtcgaacatggcacgaaagagatcaagatatgtcttctccgactactatgaagaagcctgaaaagccattgttcagctctgcatctccacaggattcttccccaagactgagcactttcccccagcaccaccatcccggaatacctggagttgcacacagtgtcatctcaactcgaactccacctccaccttcaccgttgccatttccaacacaagctatccttcctccagccccatcgagctacttttctcatccaacaatcagatatcctccccacctgaatcctcaggatactctgaagaactatgtaccttcttatgacccatccagtccacaaaccagccagtcctggtacctgggctagcttggttcctttccaagtgtcaaataggacacccatcttaccggccaatgtccaaaattacggtttgaacataattggagaacctttccttcaagcagaaacaagcaactgagggaaaaagaaacacaacaatagtttaagaaattttttttttaaataaaaaaaaggaaaagaggaagactggacaaaacaacacaaaggcagaaaggaaagaaactgaagaaagaagataatagaccagcaattgcagcacttacaatcactaattcccttaaggttaaactgtaatgacataaaaagggtcgatgatatttcactgatggtagatcgcagcccctgcaacgtagcctttgttacatgaagtccgctgggaaatagatgttctgtctctatgacaatatattttaactgactttctagatgccttaatatttgcatgataagctagttttattggtttagtattcttgttgtttacgcatggaatcactattcctggttatctcaccaacgaaggctaggaggcggcgtcagagatgctgggtgacagagccatgagccagccattttataagcactctgatttctaaaagttaaaaaaaatatatgaaatctctgtagcctttagttatcagtacagatttattaaatttcggcccttaacccagccttttccagtgtgtaacccagtttgaaatcttaaaaaaagaaaaaatgaaaaaaaaaggaaaaaaagaaaaaaggaaaaaaacagtttgaacacaaaggctctatggaagaaatgcctctatgtaggtgaagtgttctctctgcatgcaacagtaaaaattaatataatattttccccacaaaagaaacacttaacagagggcaagtgcaatttattaaatttatattcttaaagggggaattcatggattattaaggtccttcaggcccttggggactctta

SEQ ID NO: 2686 - DNA, 271 bp, Homo sapiens
gatgggccccgagaacctcgaacgcacgcgcccagcaccctgcctccggcgatgccgccccagcccctctgatggccctcctctctgctgccactcattccagaacaggaggcatgagcccggaacgcgcttgcttttaggagacagccactttctgtgtggtacgctggattcaaggatgcctgataaaccccacttgaaaaactgaggtgcttaaggagtaaaataatatgttcctggtggcatcctccagatcgtactgagaagcact

SEQ ID NO: 2687 - DNA, 7445 bp, Homo sapiens
ctgtctacggcagctattccagaggcaacaactgcttccctctgttctcatctccccattggtggctggcgacccgaatttgggaatggggagattgcccacctgttatctttgagcagactaatctcttgtaagcagaagtgccattcggagtctccagagccctgtggcttggggctgggaatgtccccctgacttcaggctttcctaagtgtattgcttttctctgagaatggtctaggtttttaattttttaattgtaagaatctgtaatacagcatttttatttcggtcttattcgttgtgctcaaaggcaggaaacaactattaatttgccttctcgaatcttaatagttataagattcattctctttcattgctctgctaggcataaaacacacttcgaacatgggtaactcattcgactgtggagttcttttaattcttatgaaagatttcaaatcctctggaagccaaaatgggacacagtaaacagattcgaattttacttctgaacgaaatggagaaactggaaaagaccctcttcagacttgaacaagggtatgagctacagttccgattaggcccaactttacagggaaaagcagttaccgtgtatacaaattacccatttcctggagaaacatttaatagagaaaaattccgttctctggattgggaaaatccaacagaaagagaagatgattctgataaatactgtaaacttaatctgcaacaatctggttcatttcagtattatttccttcaaggaaatgagaaaagtggtggaggttacatagttgtggaccccattttacgtgttggtgctgataatcatgtgctacccttggactgtgttactcttcagacatttttagctaagtgtttgggaccttttgatgaatgggaaagcagacttagggttgcaaaagaatcaggctacaacatgattcattttaccccattgcagactcttggactatctaggtcatgctactcccttgccaatcagttagaattaaatcctgacttttcaagacctaatagaaagtatacctggaatgatgttggacagctagtggaaaaattaaaaaaggaatggaatgttatttgtattactgatgttgtctacaatcatactgctgctaatagtaaatggatccaggaacatccagaatgtgcctataatcttgtgaattctccacacttaaaacctgcctgggtcttagacagagcactttggcgtttctcctgtgatgttgcagaagggaaatacaaagaaaagggaatacctgctttgattgaaaatgatcaccatatgaattccatccgaaaaataatttgggaggatatttttccaaagcttaaactctgggaatttttccaagtagatgtcaacaaagcggttgagcaatttagaagacttcttacacaagaaaataggcgagtaaccaagtctgatccaaaccaacaccttacgattattcaagatcctgaatacagacggtttggctgtactgtagatatgaacattgcactaacgactttcataccacatgacaaggggccagcagcaattgaagaatgctgtaattggtttcataaaagaatggaggaattaaattcagagaagcatcgactcattaactatcatcaggaacaggcagttaattgccttttgggaaatgtgttttatgaacgactggctggccatggtccaaaactaggacctgtcactagaaagcatcctttagttaccaggtattttactttcccatttgaagagatagacttctccatggaagaatctatgattcatctgccaaataaagcttgttttctgatggcacacaatggatgggtaatgggagatgatcctcttcgaaactttgctgaaccgggttcagaagtttacctaaggagagaacttatttgctggggagacagtgttaaattacgctatgggaataaaccagaggactgtccttatctctgggcacacatgaaaaaatacactgaaataactgcaacttatttccagggagtacgtcttgataactgccactcaacacctcttcacgtagctgagtacatgttggatgctgctaggaatttgcaacccaatttatatgtagtagctgaactgttcacaggaagtgaagatctggacaatgtctttgttactagactgggcattagttccttaataagagaggcaatgagtgcatataatagtcatgaagagggcagattagtttaccgatatggaggagaacctgttggatcctttgttcagccctgtttgaggcctttaatgccagctattgcacatgccctgtttatggatattacgcatgataatgagtgtcctattgtgcatagatcagcgtatgatgctcttccaagtactacaattgtttctatggcatgttgtgctagtggaagtacaagaggctatgatgaattagtgcctcatcagatttcagtggtttctgaagaacggttttacactaagtggaatcctgaagcattgccttcaaacacaggtgaagttaatttccaaagcggcattattgcagccaggtgtgctatcagtaaacttcatcaggagcttggagccaagggttttattcaggtgtatgtggatcaagttgatgaagacatagtggcagtaacaagacactcacctagcatccatcagtctgttgtggctgtatctagaactgctttcaggaatcccaagacttcattttacagcaaggaagtgcctcaaatgtgcatccctggcaaaattgaagaagtagttcttgaagctagaactattgagagaaacacgaaaccttataggaaggatgagaattcaatcaatggaacaccagatatcacagtagaaattagagaacatattcagcttaatgaaagtaaaattgttaaacaagctggagttgccacaaaagggcccaatgaatatattcaagaaatagaatttgaaaacttgtctccaggaagtgttattatattcagagttagtcttgatccacatgcacaagtcgctgttggaattcttcgaaatcatctgacacaattcagtcctcactttaaatctggcagcctagctgttgacaatgcagatcctatattaaaaattccttttgcttctcttgcctccagattaactttggctgagctaaatcagatcctttaccgatgtgaatcagaagaaaaggaagatggtggagggtgctatgacataccaaactggtcagcccttaaatatgcaggtcttcaaggtttaatgtctgtattggcagaaataagaccaaagaatgacttggggcatcctttttgtaataatttgagatctggagattggatgattgactatgtcagtaaccggcttatttcacgatcaggaactattgctgaagttggtaaatggttgcaggctatgttcttctacctgaagcagatcccacgttaccttatcccatgttactttgatgctatattaattggtgcatataccactcttctggatacagcatggaagcagatgtcaagctttgttcagaatggttcaacctttgtgaaacacctttcattgggttcagttcaactgtgtggagtaggaaaattcccttccctgccaattctttcacctgccctaatggatgtaccttataggttaaatgagatcacaaaagaaaaggagcaatgttgtgtttctctagctgcaggcttacctcatttttcttctggtattttccgctgctggggaagggatacttttattgcacttagaggtatactgctgattactggacgctatgtagaagccaggaatattattttagcatttgcgggtaccctgaggcatggtctcattcctaatctactgggtgaagggatttatgccagatacaattgtcgggatgctgtgtggtggtggctgcagtgtatccaggattactgtaaaatggttccaaatggtctagacattctcaagtgcccagtttccagaatgtatcctacagatgattctgctcctttgcctgctggcacactggatcagccattgtttgaagtcatacaggaagcaatgcaaaaacacatgcagggcatacagttccgagaaaggaatgctggtccccagatagatcgaaacatgaaggacgaaggttttaatataactgcaggagttgatgaagaaacaggatttgtttatggaggaaatcgtttcaattgtggcacatggatggataaaatgggagaaagtgacagagctagaaacagaggaatcccagccacaccaagagatgggtctgctgtggaaattgtgggcctgagtaaatctgctgttcgctggttgctggaattatccaaaaaaaatattttcccttatcatgaagtcacagtaaaaagacatggaaaggctataaaggtctcatatgatgagtggaacagaaaaatacaagacaactttgaaaagctatttcatgtttccgaagacccttcagatttaaatgaaaagcatccaaatctggttcacaaacgtggcatatacaaagatagttatggagcttcaagtccttggtgtgactatcagctcaggcctaattttaccatagcaatggttgtggcccctgagctctttactacagaaaaagcagggaaagctttggagattgcagaaaaaaaattgcttggtccccttggcatgaaaactttagatccagatgatatggtttactgtggaatttatgacaatgcattagacaatgacaactacaatcttgctaaaggtttcaattatcaccaaggacctgagtggctgtggcctattgggtattttcttcgtgcaaaattatatttttccagattgatgggcccggagactactgcaaagactatagttttggttaaaaatgttctttcccgacattatgttcatcttgagagatccccttggaaaggacttccagaactgaccaatgagaatgcccagtactgtcctttcagctgtgaaacacaagcctggtcaattgctactattcttgagacactttatgatttatagtttattacagatattaagtatgcaattactgtattataggatgcaaggtcatcatatgtaaatgctatatgcacaggctcaagttgttttaaaaatctcatttattataatattgatgctcaattaggtaagattgtaaaagcattgattttttttaatgtacagaggtagatttcaatttgaatcagaaagaaatatcattaccaatgaaatgtgtttgagttcagtaagaattattcaaatgcctagaaatccatagtttggaaaataaaaatcatgtcatcttctatttgtacagaaatgaaaataaaatatgaaaataatgaaagaaatgaaaagatagcttttaattgtggtatatataatcttcagtaacaatacatactgaatacgctgtggttcattaatattaacaccacgtactatagtattcttagaatacagtgctcactgcatttaataaatatttaataaatgatgaatgatagaagtttccatctacaatatatgttcctaaatggagcacagatgttcaaactatgctttcattttttcactgatatattaatttttgtgtaatgaatgccaacagtatattttatatgatttacttatgtgaggaaacatgcaaagcattaggaaatttatttcctaaaaacagttttgtaaaattagtattgagttctattgagtattataagatagcttacattttcaaaatggaaattgtcggtcatatttctagaactttaaagaaaaaagaatgttatattagttttctaaaactcaactatctttagtcatgttcaaaaatctattgctagatcatagtagatactggttttctattaactcaaaacctacattgacaagtttaacattgagaagaatcttaacaaaaatatggatatgaattcagtagatatcttaaattcaataaaatcactggaagtttttcatgataacttattttaagatgccttaaaaatcttaaagtcacaaaaggaaaaaggtttttaacatttacatgagttaacattttttcatagaacttatttcctagatagaattttttactgttttttactgttttcttaagaaaacagttaaatcattatgcattcagttggaagaaagtagtggcaagaattctttcattgctatataatattcagtggctcatttatacctaataaaataatggtattttaaaataatgctactttcaaagtagcatttttttagttagtttacaggttacatacccaaaaccttaactatgactaagaaattaaagaagaaaaccagcaaactaaaacttctgggcagcaaaaatatataaatgcttcagatgtcaaatacccatgcttgaaagctcgtgtaatttactttaagattatctgcctgctcttcttcaaagctgaccttgctttagaaatagttttaactagcttagttttctggtttccaaaactaaaatagattaaatcctacaaatttaaggacagttgtgacagtaatctgaccactatctataaatacattggacattggtttccaaatctccctttctcttcagttccttccttgttcaatatatacccttctctaaactgtgcgggtaaaaggaatgactgtccttgagagaaccattagtttatcaaaggtttatgtagttttgttgctgtaccctaactttgatattcagggaggtaggaaaggtaacagaaaaccagcatatttaatcaaagcaagaagtaatcgctgacagttaaatgtgaccaaaaaaattaaaagttcacaatttttttaatgtagccatttggggttatctctagtaaggcagatacccacgttggtaaatttttaggatattgtgttgcactagaaaactaagtggttcatatttctaatgaggaagattaatgaaagaacattgttatattctgcgtggtatattttaaagtttaagaaggcatgttaaacattatttcctctatggtagttaaaatacagaattagatttttaacaggtgtcatttgactaaacgtttcggtagaatgcttcatacttgagtgatgctggataaggtattgtatttcaacaatggactatgccttggtttttcactaatcaaaatcaaaattactctttaacatgataaatgaatttaccagtttagtatgctgtggtattttaataagttttcaaagataattgggaaaacatgagactggtcatattgatgaatattgtaacatgtgaattgtgatccatttctgatatgtcttgaactactgtgtctagtaggcaaatgtcattgttacctctgtgtgttaagaaaataaaaatattttctaaaggtcg

SEQ ID NO: 2688 - DNA, 1299 bp, Homo sapiens
tcccgccgcccccctccccgccttttttgaaaaaaagcattttaccaccaaccaccaccccaatccaacccacaccgaaccttcgcgcaccccctacacccaacaacaacaacaacaactgcaaaatagaaaacaaatccccaaacccaggcgaaaagcagccaacaccggcggcggcggcggcctcggcaagcacggccagcgcgctcggactgcaagagggttaaaagtgtagattggatttcacccctggaactctagcacgccgagtgaacttgaatctttggctatttaaggaggattgggtttgttgtgaagttgcggtgatccagcgcagagccccgtcctgattgatcgcatcgcggggctcagatgactgtaaaatgaatagatgaaattcttgcttctcgaagattttcttgggcatctcccggaaagtgccttttaaggcgaagtcatgatgtattctcccatctgtctcactcaggatgaatttcacccattcatcgaggcacttcttccacatgtccgtgcaattgcctatacttggttcaacctgcaggctcgaaaacgcaagtactttaaaaagcatgagaagcgaatgtcaaaggatgaagaaagagcagtcaaagatgagcttctcagtgaaaagcccgaaatcaaacagaagtgggcatccaggctccttgccaaactgcgcaaagatattcgccaggagtatcgagaggactttgtgctcaccgtgactggcaagaagcacccgtgctgtgtcttatccaatcccgaccagaagggtaagattaggagaatcgactgcctgcgacaggcagacaaagtctggcgtctggatctagtcatggtgatcctgttcaaaggcatccccttggaaagtaccgatggagagcggctcatgaaatccccacattgcacaaacccagcactttgtgtccagccacatcatatcacagtatcagttaaggagcttgatttgtttttggcatactacgtgcaggaggcaaggtaagaatttcttttcttcaaataaatgcatcaagatataggtgtccttgcattaccaacaatccatagtaaaacaatcattttacaaagccgcataccaaaagtagactaaagtttgagctgtcacagatggtaggtcatttccaaacttggcctggtgggaggaaaaatggcctgcagatagccaggtgacagactgttacctgaggtttgttatataaatgtgggacttaataaactgctatgagctttattattcaaaaaaaaaaaaaaaaaaaa

SEQ ID NO: 2689 - DNA, 1894 bp, Homo sapiens
ggctgaggacccgagggaggacacggttaaagcatcgctatcaactgcgtaacccagagagccctccttagccaacacgctaactccgaagcctccccttacgcccccgaaccaccgaaggcggcgacacctgattcagcgcacaaacacaggtcccttctgtcccggatacaattacgcggcagacacacactcagactcgcgcggggcagccaagagacgagctatgaagtcttacactccatatttcattctcctgtggagtgctgttgggatagcgaaggctgctaaaatcatcatcgtgccgccaattatgtttgaaagccatatgtacattttcaagacgctagcctcagccttgcacgagagaggccaccatacagtgttcctcctctctgaaggcagagacatcgccccatctaatcattacagcctccagcgctacccaggaatctttaacagtaccacctcagatgctttcctacagtccaagatgcggaatattttctctgggagattgccagcaatcgaactgtttgacatactggatcactatactaagaactgtgacatgatggttggcaaccatgccctgatccagggtctgaagaaagaaaaatttgacctgctgctggtggaccctaatgatatgtgtggatttgtgatagctcatcttttaggggttaaatatgctgtattttcaactggcctttggtatcctgctgaagtgggtgctcctgctccattagcatacgtcccagagtttaactcactcctcacagaccgcatgaacttgctgcaaaggatgaaaaataccggtgtttacctcatttccagattaggggtcagctttctggttcttcccaaatatgaaaggataatgcagaagtacaacctgctgccggagaagtccatgtatgatttggttcatgggtccagcctgtggatgctgtgtactgacgtagcactggaattcccaagacccactctgcctaatgttgtttatgtaggaggaatcctaaccaaaccagccagcccactaccagaagatctccaaagatgggtaaatggtgctaatgaacatggctttgtcttggtgtcttttggagctggtgtcaagtatctgtcagaagacattgctaacaaactggcaggagctctggggagattgcctcaaaaagtgatttggaggttttctggacccaaaccaaagaatctaggaaacaacactaaactcatagaatggttaccacaaaatgacctgcttgggcattcaaagattaaagccttcgtgagccatggtggtttgaacagtatttttgaaactatgtatcatggtgtgcctgtagtgggaattccagtctttggagaccattatgatactatgaccagagtacaggcaaaaggcatggggatattgctagaatggaagacagttactgaaaaagagctctatgaagcactagtgaaggttatcaataatcccagctaccgtcagagggctcagaagctttcggaaattcacaaggatcaacctggtcaccctgtcaatcgaactatctattggatagattatattattcgtcacaatggagcccatcacctacgtgccgctgtccatcagatctccttttgtcagtattttttactggatattgcctttgtgcttttgcttggtgctgccttgttatactttctcttgtcttgggtgacaaaatttatctacagaaaaatcaaaagtctgtggtctagaaataagcatagcacagttaatggacattaccacaatggaatcctcaatggcaagtacaaaagaaatggccatattaaacatgaaaagaaagtgaaatgagccgacagcccaggtgatagaaataaattggttcactcattg

SEQ ID NO: 2690 - DNA, 583 bp, Homo sapiens
atgcacgtgaacggcaaagtggcgctggtgaccggcgcggctcagggcataggcagagcctttgcagaggcgctgctgcttaagggcgccaaggtagcgctggtggattggaatcttgaagcaggtgtacagtgtaaagctgccctggatgagcaatttgaacctcagaagactctgttcatccagtgcgatgtggctgaccagcaacaactgagagacacttttagaaaagttgtagaccactttggaagactggacattttggtcaataatgctggagtgaataatgagaaaaactgggaaaaaactctgcaaattaatttggtttctgttatcagtggaacctatcttggtttggattacatgagtaagcaaaatggaggtgaaggcggcatcattatcaatatgtcatctttagcagcccaccattgattgccaatggattgataacactcattgaagatgatgctttaaatggtgctattatgaagatcacaacttctaagggaattcattttcaagactatgatacaactccatttcaagcaaaaacccaatgaacagcttatgtgttagccatagc

SEQ ID NO: 2691 - DNA, 1929 bp, Homo sapiens
atggcggaggatgtttcctcagcggccccgagcccgcggcggtgtgcggatggtagggatgccgaccctactgaggagcagatggcagaaacagagagaaacgacgaggagcagttcgaatgccaggaactgctcgagtgccaggtgcaggtgggggcccccgaggaggaggaggaggaggaggaggacgcgggcctggtggccgaggccgaggccgtggctgccggctggatgctcgatttcctctgcctctctctttgccgagctttccgcgacggccgctccgaggacttccgcaggacccgcaacagcgcagaggctattattcatggactatccagtctaacagcttgccagttgagaacgatatacatatgtcagtttttgacaagaattgcagcaggaaaaacccttgatgcacagtttgaaaatgatgaacgaattacacccttggaatcagccctgatgatttggggttcaattgaaaaggaacatgacaaacttcatgaagaaatacagaatttaattaaaattcaggctatagctgtttgtatggaaaatggcaactttaaagaagcagaagaagtctttgaaagaatatttggtgatccaaattctcatatgcctttcaaaagcaaattgcttatgataatctctcagaaagatacatttcattccttttttcaacacttcagctacaaccacatgatggagaaaattaagagttatgtgaattatgtgctaagtgaaaaatcatcaacctttctaatgaaggcagcggcaaaagtagtagaaagcaaaaggacaagaacaataacttctcaagataaacctagtggtaatgatgttgaaatggaaactgaagctaatttggatacaagaaaaaggtctcacaagaatcttttcttatctaagttgcaacatggaacccagcaacaagaccttaataagaaagaaagaagagtaggaactcctcaaagtacaaaaaagaaaaaagaaagcagaagagccactgaaagcagaatacctgtttcaaagagtcagccggtaactcctgaaaaacatcgagctagaaaaagacaggcatggctttgggaagaagacaagaatttgagatctggcgtgaggaaatatggagagggaaactggtctaaaatactgttgcattataaattcaacaaccggacaagtgtcatgttaaaagacagatggaggaccatgaagaaactaaaactgatttcctcagacagcgaagactgattgtgtttgtaaaagcttgatgaaaggacagttaagtattttgatcactgcattttgtttgaaacttgtgtcattgatgtaatttaaaacttttgtttaaagcattacagtatttttctgtgaccatcaattaatgagggtttgtgctaccagagttaaagcatatgctatcattgtattctttaagaaccttattttgataaaatgtaaatttgttgaaccctgccacatttagtatccccacccccaaatcctgttccaatgaaaaaattaaaacctgatacgaaaaaaaaaaaattccagttaacctattttgtgtctgtaggctgacctcaaccctgtaacgtaacccattaaaatgaatttctttttttttaagacagagtttctctctgttgcccaggctggagtgcagtggcgcaatttcagctcactgaacctctgcctcccaggtcaagtgattctcctgcctcagcctctgagtagctgggattacaggcacacaccaccagccagctaatttttgtatttttagtagaggcggggtttcaccatgctggtcaggatgttctccaactcctgacttcatgatccacccacctcggcctcccaaagtgctgagattacagacgtgagccactgcgtcctgcctaaaatgaattttctaga

SEQ ID NO: 2692 - DNA, 2823 bp, Homo sapiens
tatgtaaggcggccaaggctgacctggtatttatggtggatggatcctggagcattggagatgaaaatttcaataagatcatcagctttctatacagcactgttggagccctgaacaagattggcacagatggaacccaagttgcaatggttcagttcactgatgatcccagaacagaatttaaactaaatgcttacaaaaccaaagagactcttcttgatgcaattaaacacatttcatacaaaggaggaaatacaaaaacaggaaaagcaattaagtatgttcgagataccttgttcactgcagagtcaggtacaagaaggggcatcccaaaggttatcgtggttataactgatggaagatcacaagatgatgtgaacaaaatctccagggagatgcaattagatggctatagcatttttgcaattggtgtggccgatgcagattactcggagttggttagcattggcagtaagcccagcgcacgccatgtcttctttgtggatgactttgacgcctttaagaaaatcgaagatgagttaattacttttgtctgcgaaacagcatcagcaacctgtccagtggtacacaaggatggcattgatcttgcaggatttaagatgatggaaatgtttggtttggttgaaaaagatttttcatcagtggaaggggtttctatggagcctggtaccttcaatgtgtttccatgttaccaactccataaagatgccctggtttcccagccaaccaggtacttgcacccagaaggattgccctccgactacacaatcagttttctattccggattcttcctgacactccacaggagccatttgctctttgggagattttaaataaaaattctgacccattggttggggttattttagacaatggtgggaaaactctaacatatttcaactatgaccagagtggggattttcaaactgttactttcgaaggacctgaaattaggaaaattttttatggaagctttcacaagctacacattgttgtcagtgagactttggtcaaagtggttattgactgcaagcaagtgggtgagaaggcaatgaacgcatcagctaatatcacgtcagatggtgtagaagtgctagggaaaatggttcgatcaagaggaccaggtggaaactctgcaccgttccagttacagatgtttgatattgtttgctccacatcatgggccaatacagacaaatgctgtgaacttccaggcctgagagatgatgagtcttgcccagaccttccccattcctgctcctgttctgaaaccaatgaagtggctctgggaccagcgggcccaccaggtggtccaggactccgaggaccaaagggccagcaaggtgaaccgggtccaaagggaccagatggccctcggggtgaaattggtctgccaggacctcagggtccacctggacctcaaggaccaagtggtctgtccattcaaggaatgcccggaatgccaggagaaaaaggagagaaaggagatactggccttccaggtccacagggtatcccaggaggcgttggttcaccaggacgtgatggctcaccaggccagaggggccttccgggaaaggatggatcctcgggacctccaggaccaccagggccaataggcattcctggcacccctggagtcccagggatcacaggaagcatgggaccgcaaggcgccctgggaccacctggtgtccctggagcaaagggggaacgaggagagcggggtgacctgcagtctcaagccatggtgagatcagtggcgcgtcaagtatgcgaacagctcatccagagtcacatggccaggtacactgccatcctcaaccagattcccagccactcctcatccatccggactgtccaagggcctcctggggagcctgggaggccaggctcacctggagcccctggtgaacaaggacccccaggaacaccaggcttccccggaaatgcaggcgtaccagggaccccaggagaacgaggtctaactggtatcaaaggagaaaaaggaaatccaggcgttggaacccaaggtccaagaggcccccctggaccagcaggaccttcaggggagagtcggcctggcagccctgggccccctggctctcctggaccaagaggcccaccaggtcatctgggggttcctggaccccaaggtccttctggccagcctggatattgtgacccctcatcatgttctgcctatggtgtgagagatctgatcccctacaatgattaccagcactgaagtggaaatcctccactctggttccattggccccagacatttagctgtggatacagaactgtcctgtcaaccaccaccaccaccaagcccctgcccctaacaatggacactctgcttccctgcttcttctgcatccctgccttcccactttcaaacctcttgcccactctgctccaaacatgatggagtgataacatcggaacttaaccaaatcatatatgtctattttaatagacactgactgctccatgtcagcctggatagaggtatatgacgtgtgccaagaatttatcccagactcccctgtgtgacagcttcataataaagttacttaactgtgcctcttcctccttcctctccccacacaggatggatgggcatctttctccttgaccaccctactctcccttcctcccctgatcacctcccctccctgctctcccctggtgatggacttctaacatgagatttttttaaaaaatttctatttcttttataattttgctgagttttcagggtttcttctgtaaataaaacataatatttaaaaaaa

SEQ ID NO: 2693 - DNA, 573 bp, Homo sapiens
atggcccgcggggctgccctggcgctgctgctcttcggcctgctgggtgttctggtcgccgccccggatggtggtttcgatttatctgatgcccttcctgacaatgaaaacaagaaacccactgcaatccccaagaaacccagtgctggggatgactttgacttaggagatgctgttgttgatggagaaaatgacgacccacgaccaccgaacccacccaaaccgatgccaaatccaaaccccaaccaccctagttcctccggtagcttttcagatgctgaccttgcggatggcgtttcaggtggagaaggaaaaggaggcagtgatggtggaggcagccacaggaaagaaggggaagaggccgacgccccaggcgtgatccccgggattgtgggggctgtcgtggtcgccgtggctggagccatctctagcttcattgcttaccagaaaaagaagctatgcttcaaagaaaatgatggctgaagacctagggaacaaggggaggtggacatggagagccaccggaatgccaacgcagagccagctgttcagcgtactcttttagagaaatag

SEQ ID NO: 2694 - DNA, 7642 bp, Homo sapiens
cggaccctgcgcgcccccgtcccggctcccggccggctcgggggagaaggcgcccgaggggaggcgccggacagatcgcgtttcggaggcggcgcaggtgctgtaaactgcaaaccataatcctgtcttaatactgcaaacaaatcatagtggaactaaggggaacttaatttactgtttccaggttaactaaggtctcagctgtaaaccaaaagtgagaggagacattaagattttcattcttaccgggttgtcttcttcctgaagagcaatggagccgcttttacttggaagaggactaatcgtatatctaatgttcctcctgttaaaattctcaaaagcaattgaaataccatcttcagttcaacaggttccaacaatcataaaacagtcaaaagtccaagttgcctttcccttcgatgagtattttcaaattgaatgtgaagctaaaggaaatccagaaccaacattttcgtggactaaggatggcaaccctttttatttcactgaccatcggataattccatcgaacaattcaggaacattcaggatcccaaacgaggggcacatatctcactttcaagggaaataccgctgctttgcttcaaataaactgggaatcgctatgtcagaagaaatagaatttatagttccaagtgttccaaaattcccaaaagaaaaaattgaccctcttgaagtggaggagggagatccaattgtcctcccatgcaatcctcccaaaggcctcccacctttacacatttattggatgaatattgaattagaacacatcgaacaagatgaaagagtatacatgagccaaaagggagatctatacttcgcaaacgtggaagaaaaggacagtcgcaatgactactgttgctttgctgcatttccaagattaaggactattgtacagaaaatgccaatgaaactaacagttaacagtttaaagcatgctaatgactcaagttcatccacagaaattggttccaaggcaaattccatcaagcaaagaaaacccaaactgctgttgcctcccactgagagtggcagtgagtcttcaattaccatcctcaaaggggaaatcttgctgcttgagtgttttgctgaaggcttgccaactccacaggttgattggaacaaaattggtggtgacttaccaaaggggagagaagcaaaagaaaattatggcaagactttgaagatagagaatgtctcctaccaggacaaaggaaattatcgctgcacagccagcaatttcttgggaacagccactcacgattttcacgttatagtagaagagcctcctcgctggacaaagaagcctcagagtgctgtgtatagcaccggaagcaatggcatcttgttatgtgaggctgaaggagaacctcaacccacaatcaagtggagagtcaatggctccccagttgacaatcatccatttgctggtgatgttgtcttccccagggaaatcagttttaccaaccttcaaccaaatcatactgctgtgtaccagtgtgaagcctcaaatgtccatggaactatccttgccaatgccaatattgatgttgtggatgtccgtccattgatacaaaccaaagatggagaaaattacgctacagtggttgggtacagtgctttcttacattgcgagttctttgcttcacctgaggcagtcgtgtcctggcagaaggtggaagaagtgaaacccctggagggcaggcggtatcatatctatgaaaatggcacattgcagatcaacagaaccaccgaagaagatgctgggtcttactcatgttgggtagaaaatgctataggaaaaactgcagtcacagccaatttggatattagaaatgctacaaaacttagagtttctcctaagaatcctcgtatccccaaattgcatatgcttgaattacattgtgaaagcaaatgtgactcacatttgaaacacagtttgaagttgtcctggagtaaagatggagaagcctttgaaattaatggcacagaagatggcaggataattattgatggagctaatttgaccatatctaatgtaactttagaggaccaaggtatttactgctgttcagctcatactgctctagacagtgctgccgatataactcaagtaactgttcttgatgttccggatccaccagaaaaccttcacttgtctgaaagacagaacaggagtgttcggctgacctgggaagctggagctgaccacaacagcaatattagcgagtatattgttgaatttgaaggaaacaaagaagagcctggaaggtgggaggaactgaccagagtccaaggaaagaaaaccacagttatcttacctttggctccatttgtgagataccagttcagggtcatagccgtgaacgaagtagggagaagtcagcctagccagccgtcagaccatcatgaaacaccaccagcagctccagataggaatccacaaaacataagggttcaagcctctcaacccaaggaaatgattataaagtgggagcctttgaaatccatggagcagaatggaccaggcctagagtacagagtgacctggaagccacagggagccccagtggagtgggaagaagaaacagtcacaaaccacacattgcgggtgatgacgcctgctgtctatgccccttatgatgtcaaggtccaggctatcaatcaactaggatctgggcctgaccctcagtcagtgactctctattctggagaagactatcctgatacagctccagtgatccatggggtggacgttataaacagtacattagttaaagttacctggtcaacagttccaaaggacagagtacatggacgtctgaaaggctatcagataaattggtggaaaacaaaaagtctgttggatggaagaacacatcccaaagaagtgaacattctaagattttcaggacaaagaaactctggaatggttccttccttagatgcctttagtgaatttcatttaacagtcttagcctataactctaaaggagctggtcctgaaagtgagccttatatatttcaaacaccagaaggagtacctgaacagccaacttttctaaaggtcatcaaagttgataaagacactgccactttatcttggggactacctaagaaattaaatggaaacttaactggctatcttttgcaatatcagataataaatgacacctacgagattggagaattaaatgatattaacattacaactccatcaaagcccagctggcacctctcaaacctgaatgcaactaccaagtacaaattctacttgagggcttgcacttcacagggctgtggaaaaccgatcacggaggaaagctccaccttaggagaagggagtaaaggtatcgggaagatatcaggagtaaatcttactcaaaagactcacccagtagaggtatttgagccgggagctgaacatatagttcgcctaatgactaagaattggggcgataacgatagcatttttcaagatgtaattgagacaagagggagagaatatgctggtttatatgatgacatctccactcaaggctggtttattggactgatgtgtgcgattgctcttctcacactactattattaactgtttgctttgtgaagaggaatagaggtggaaagtactcagttaaagaaaaggaagatttgcatccagacccagaaattcagtcagtaaaagatgaaacctttggtgaatacagtgacagtgatgaaaagcctctcaaaggaagccttcggtcccttaatagggatatgcagcctactgaaagtgctgacagcttagtcgaatacggagagggagaccatggtctcttcagtgaagatggatcatttattggtgcctacgctggatctaaggagaagggatctgttgaaagcaatggaagttctacagcaacttttccccttcgggcataaacacaacatatgtaagcaacgctactggttcaccccaaccttccatatttatctgttcaaaggagcaagaactttcatataggaatagaaacatgctggccgaagatttcatccagaagtcaacatcctgcaattatgttgaaaagagtagtactttcttcaaaatataaaatgccaagcacttcaggcctatgttttgcttatattgttttcaggtgctcaaaatgcaaaacacaaaacaaatcctgcatttagatacacctcaactaaatccaaagtccccattcagtatattccatatttgcctgattttactattcggtgtgtttgcatagatgttgctacttggtgggtttttctccgtatgcacattggtatacagtctctgagaactggcttggtgactttgcttcactacaggttaaaagaccataagcaaactggttatttaaaatgtaaaaaggaatatgaaagtcttattaaaacacttcattgaaaatatacagtctaaatttattatttaaattttactagcaaaagtcttaggtgaacaatcaactagtatttgttgagctcctatttgcccagagatggtcatatttaaacagaagtatacgtttttcagtttcaacatgaatttttttatttctgtcagttatgacatccacgagcatcactttttgtgtctgtttttttttttttcttggactaaattcaactgcatggaagcggtggtcagaaggttgttttatacgagaacaggcagaaagtgcccattgttcaggattctaatagctacatctacttaatatcttcatttctaaattgactgcttttacctttttctcatgtttatataatggtatgcttgcatatatttcatgaatacattgtacatattatgttaatatttacacaatttaaaatatagatgtgttttattttgaagtgagaaaatgaacattaacaggcatgtttgtacagctagaatatattagtaagatactgtttttcgtcattccagagctacaactaataacacgaggttccaaagctgaagactttgtataaagtatttgggttttgttcttgtattgctttctttcaacagtttcaaaataaaatatcatacaaatattgagggaaatgttttcatatttttcaaaataggtttttattgttgaatgtacatctaccccagcccctcaaaagaaaaactgtttacatagaaattcctacacatacgtttgcgtatatgttattttaaacatctttgtggtgagaattttttccccgatattctccttctgtcaaagtcagaacaaattcagggaatttattttctggcagttgtgctccagtccttttaaaattgtacatgaacatgttttagaaacaatatggaggatgatgcatacatgtcggtcaagttcagcgctcgacattttatggaaagatttttttaaccttaccacgaaatacttaactactgtttaagtgaattgacttatttcactttagtttttgaactgtgattattggtatactgttatatcctcaacttggatttatggtaaccccttttagttcatggagaccaaaatttggggtatttataatagtcagcgcaggaatgcacatggaatatctacttgtccttttgaacctcacgagtcatccagaatgtatagacaggaaaagcatgtcttatttaaaactgtaatttatgggctcaggatctgaccgcagtcccgggagtaagcatttcaaagggggaaggcagtgtggtccctaccctgtgtgaatgtgaggatgtagacatccatcagtgcaactcgagctccatcctcctccgatttctaaggttccagttttctggagggacagtcatcatgttttgatttatctgggagaaaactgtggtgcacagcttgtgaggagggcaaggttgtgacgttcgagcttagttctggtgttattctgtctcctcttctttgtcatcagccaaaacgtggtttttaaagagagtcatgcaggttagaaataatgtcaaaaatatttaggaatttaataacctttaagtcagaaactaaaacaaatactgaaatattagctcttcctacacttcgtgttcccctttagctgcctgaaaatcaagattgctcctactcagatcttctgagtggctaaaacttatggatatgaaaaatgagattgaatgatgactatgctttgctatcattgttacctttcctcaatactatttggcaactactgggactcttcagcacaaaaggaatagatctatgattgaccctgattttaattgtgaaattatatgattcatatattttatgaatcagaataaccttcaaataaaataaatctaagtcggttaaaatggatttcatgattttccctcagaaaatgagtaacggagtcccacggcgtgcaatggtaattataaattggtgatgcttgtttgcaaattgcccactcgtgataagtcaacagccaatatttaaaactttgttcgttactggctttaccctaactttctctagtctactgtcaatatcattttaatgtaattgattgtatatagtctcaagaatggttggtgggcatgagttcctagagaactgtccaagggttgggaaaatccaaattctcttcctggctccagcactgattttgtacataaacattaggcaggttgcttaacctttttatttcaaactctctcaactctaaagtgctaataataatctcagttaccttatctttgtcacagggtgttcttttttatgaagaaaaatttgaaaatgataaaagctaagatgccttctaacttcataagcaaacctttaactaattatgtatctgaaagtcacccccacataccaactcaacttttttcctgtgaacacataaatatatttttatagaaaaacaaatctacataaaataaatctactgtttagtgagcagtatgacttgtacatgccattgaaaattattaatcagaagaaaattaagcagggtctttgctatacaaaagtgttttccactaattttgcatgcgtatttataagaaaaatgtgaatttggtggttttattctatcggtataaaggcatcgatattttagatgcacccgtgtttgtaaaaatgtagagcacaatggaattatgctggaagtctcaaataatatttttttcctattttatactcatggaagagataagctaaagaggggacaataatgagaaatgttggtgtgcttttctaagcatttaaaacataattgccaattgaaaccctaaatatgtttacataccattaagatatgattcatgtaacaatgttaaattaattataatgggattgggtttgttatctgtggtagtatatatcctagtgttcctatagtgaaataagtagggttcagccaaagctttctttgttttgtaccttaaattgttcgattacgtcatcaaaagagatgaaaggtatgtagaacaggttcacgtgattacctttttcttttggcttggattaatattcatagtagaactttataaaacgtgtttgtattgtaggtggtgtttgtattatgcttatgactatgtatggtttgaaaatattttcattatacatgaaattcaactttccaaataaaagttctacttcatgt

SEQ ID NO: 2695 - DNA, 2143 bp, Homo sapiens
taggggtggggactcggcctcacacagtgagtgccggctattggacttttgtccagtgacagctgagacaacaaggaccacgggaggaggtgtaggagagaagcgccgcgaacagcgatcgcccagcaccaagtccgcttccaggctttcggtttctttgcctccatcttgggtgcgccttcccggcgtctaggggagcgaaggctgaggtggcagcggcaggagagtccggccgcgacaggacgaactcccccactggaaaggattctgaaagaaatgaagtcagccctcagaaatgaagttgactgcctgctggctttctgttgactggcccggagctgtactgcaagacccttgtgagcttccctagtctaagagtaggatgtctgctgaagtcatccatcaggttgaagaagcacttgatacagatgagaaggagatgctgctctttttgtgccgggatgttgctatagatgtggttccacctaatgtcagggaccttctggatattttacgggaaagaggtaagctgtctgtcggggacttggctgaactgctctacagagtgaggcgatttgacctgctcaaacgtatcttgaagatggacagaaaagctgtggagacccacctgctcaggaaccctcaccttgtttcggactatagagtgctgatggcagagattggtgaggatttggataaatctgatgtgtcctcattaattttcctcatgaaggattacatgggccgaggcaagataagcaaggagaagagtttcttggaccttgtggttgagttggagaaactaaatctggttgccccagatcaactggatttattagaaaaatgcctaaagaacatccacagaatagacctgaagacaaaaatccagaagtacaagcagtctgttcaaggagcagggacaagttacaggaatgttctccaagcagcaatccaaaagagtctcaaggatccttcaaataacttcaggctccataatgggagaagtaaagaacaaagacttaaggaacagcttggcgctcaacaagaaccagtgaagaaatccattcaggaatcagaagcttttttgcctcagagcatacctgaagagagatacaagatgaagagcaagcccctaggaatctgcctgataatcgattgcattggcaatgagacagagcttcttcgagacaccttcacttccctgggctatgaagtccagaaattcttgcatctcagtatgcatggtatatcccagattcttggccaatttgcctgtatgcccgagcaccgagactacgacagctttgtgtgtgtcctggtgagccgaggaggctcccagagtgtgtatggtgtggatcagactcactcagggctccccctgcatcacatcaggaggatgttcatgggagattcatgcccttatctagcagggaagccaaagatgttttttattcagaactatgtggtgtcagagggccagctggaggacagcagcctcttggaggtggatgggccagcgatgaagaatgtggaattcaaggctcagaagcgagggctgtgcacagttcaccgagaagctgacttcttctggagcctgtgtactgcggacatgtccctgctggagcagtctcacagctcaccatccctgtacctgcagtgcctctcccagaaactgagacaagaaagaaaacgcccactcctggatcttcacattgaactcaatggctacatgtatgattggaacagcagagtttctgccaaggagaaatattatgtctggctgcagcacactctgagaaagaaacttatcctctcctacacataagaaaccaaaaggctgggcgtagtggctcacacctgtaatcccagcactttgggaggccaaggagggcagatcacttcaggtcaggagttcgagaccagcctggccaacatggtaaacgctgtccctagtaaaaatacaaaaattagctgggtgtgggtgtgggtacctgtattcccagttacttgggaggctgaggtgggaggatcttttgaacccaggagttcagggtcatagcatgctgtgattgtgcctacgaatagccactgcataccaacctgggcaatatagcaagatcccatctctttaaaaaaaaaaaaa

SEQ ID NO: 2696 - DNA, 2269 bp, Homo sapiens
tgggttggtgtttatctcctcccagccttgagggagggaacaacactgtaggatctggggagagaggaacaaaggaccgtgaaagctgctctgtaaaagctgacacagccctcccaagtgagcaggactgttcttcccactgcaatctgacagtttactgcatgcctggagagaacacagcagtaaaaaccaggtttgctactggaaaaagaggaaagagaagactttcattgacggacccagccatggcagcgtagcagccctgcgtttcagacggcagcagctcgggactctggacgtgtgtttgccctcaagtttgctaagctgctggtttattactgaagaaagaatgtggcagattgttttctttactctgagctgtgatcttgtcttggccgcagcctataacaactttcggaagagcatggacagcataggaaagaagcaatatcaggtccagcatgggtcctgcagctacactttcctcctgccagagatggacaactgccgctcttcctccagcccctacgtgtccaatgctgtgcagagggacgcgccgctcgaatacgatgactcggtgcagaggctgcaagtgctggagaacatcatggaaaacaacactcagtggctaatgaagcttgagaattatatccaggacaacatgaagaaagaaatggtagagatacagcagaatgcagtacagaaccagacggctgtgatgatagaaatagggacaaacctgttgaaccaaacagctgagcaaacgcggaagttaactgatgtggaagcccaagtattaaatcagaccacgagacttgaacttcagctcttggaacactccctctcgacaaacaaattggaaaaacagattttggaccagaccagtgaaataaacaaattgcaagataagaacagtttcctagaaaagaaggtgctagctatggaagacaagcacatcatccaactacagtcaataaaagaagagaaagatcagctacaggtgttagtatccaagcaaaattccatcattgaagaactagaaaaaaaaatagtgactgccacggtgaataattcagttcttcaaaagcagcaacatgatctcatggagacagttaataacttactgactatgatgtccacatcaaactcagctaaggaccccactgttgctaaagaagaacaaatcagcttcagagactgtgctgaagtattcaaatcaggacacaccacaaatggcatctacacgttaacattccctaattctacagaagagatcaaggcctactgtgacatggaagctggaggaggcgggtggacaattattcagcgacgtgaggatggcagcgttgattttcagaggacttggaaagaatataaagtgggatttggtaacccttcaggagaatattggctgggaaatgagtttgtttcgcaactgactaatcagcaacgctatgtgcttaaaatacaccttaaagactgggaagggaatgaggcttactcattgtatgaacatttctatctctcaagtgaagaactcaattataggattcaccttaaaggacttacagggacagccggcaaaataagcagcatcagccaaccaggaaatgattttagcacaaaggatggagacaacgacaaatgtatttgcaaatgttcacaaatgctaacaggaggctggtggtttgatgcatgtggtccttccaacttgaacggaatgtactatccacagaggcagaacacaaataagttcaacggcattaaatggtactactggaaaggctcaggctattcgctcaaggccacaaccatgatgatccgaccagcagatttctaaacatcccagtccacctgaggaactgtctcgaactattttcaaagacttaagcccagtgcactgaaagtcacggctgcgcactgtgtcctcttccaccacagagggcgtgtgctcggtgctgacgggacccacatgctccagattagagcctgtaaactttatcacttaaacttgcatcacttaacggaccaaagcaagaccctaaacatccataattgtgattagacagaacacctatgcaaagatgaacccgaggctgagaatcagactgacagtttacagacgctgctgtcacaaccaagaatgttatgtgcaagtttatcagtaaataactggaaaacagaacacttatgttatacaatacagatcatcttggaactgcattcttctgagcactgtttatacactgtgtaaatacccatatgtcct

SEQ ID NO: 2697 - DNA, 2039 bp, Homo sapiens
agtctcaactaaaagggactcccggagctaggggtggggactcggcctcacacagtgagtgccggctattggacttttgtccagtgacagctgagacaacaaggaccacgggaggaggtgtaggagagaagcgccgcgaacagcgatcgcccagcaccaagtccgcttccaggctttcggtttctttgcctccatcttgggtgcgccttcccggcgtctaggggagcgaaggctgaggtggcagcggcaggagagtccggccgcgacaggacgaactcccccactggaaaggattctgaaagaaatgaagtcagccctcagaaatgaagttgactgcctgctggctttctgttgactggcccggagctgtactgcaagacccttgtgagcttccctagtctaagagtaggatgtctgctgaagtcatccatcaggttgaagaagcacttgatacagatgagaaggagatgctgctctttttgtgccgggatgttgctatagatgtggttccacctaatgtcagggaccttctggatattttacgggaaagaggtaagctgtctgtcggggacttggctgaactgctctacagagtgaggcgatttgacctgctcaaacgtatcttgaagatggacagaaaagctgtggagacccacctgctcaggaaccctcaccttgtttcggactatagagtgctgatggcagagattggtgaggatttggataaatctgatgtgtcctcattaattttcctcatgaaggattacatgggccgaggcaagataagcaaggagaagagtttcttggaccttgtggttgagttggagaaactaaatctggttgccccagatcaactggatttattagaaaaatgcctaaagaacatccacagaatagacctgaagacaaaaatccagaagtacaagcagtctgttcaaggagcagggacaagttacaggaatgttctccaagcagcaatccaaaagagtctcaaggatccttcaaataacttcaggctccataatgggagaagtaaagaacaaagacttaaggaacagcttggcgctcaacaagaaccagtgaagaaatccattcaggaatcagaagcttttttgcctcagagcatacctgaagagagatacaagatgaagagcaagcccctaggaatctgcctgataatcgattgcattggcaatgagacagagcttcttcgagacaccttcacttccctgggctatgaagtccagaaattcttgcatctcagtatgcatggtatatcccagattcttggccaatttgcctgtatgcccgagcaccgagactacgacagctttgtgtgtgtcctggtgagccgaggaggctcccagagtgtgtatggtgtggatcagactcactcagggctccccctgcatcacatcaggaggatgttcatgggagattcatgcccttatctagcagggaagccaaagatgttttttattcagaactatgtggtgtcagagggccagctggaggacagcagcctcttggaggtggatgggccagcgatgaagaatgtggaattcaaggctcagaagcgagggctgtgcacagttcaccgagaagctgacttcttctggagcctgtgtactgcggacatgtccctgctggagcagtctcacagctcaccgtccctgtacctgcagtgcctctcccagaaactgagacaagaaagaaaacgcccactcctggatcttcacattgaactcaatggctacatgtatgattggaacagcagagtttctgccaaggagaaatattatgtctggctgcagcacactctgagaaagaaacttatcctctcctacacataagaaaccaaaaggctgggcgtagtggctcacacctgtaatcccagcactttgggaggccaaggagggcagatcacttcaggtcaggagttcgagaccagcctggccaacatggtaaacgctgtccctagtaaaaatacaaaaattaaaaaaaaaaaaaaaaaaaaaaaaaaaaaaaaaaaaaaaaaa

SEQ ID NO: 2698 - DNA, 2040 bp, Homo sapiens
agcgagcttgcagcctcaccgacgagtctcaactaaaagggactcccggagctaggggtggggactcggcctcacacagtgagtgccggctattggacttttgtccagtgacagctgagacaacaaggaccacgggaggaggtgtaggagagaagcgccgcgaacagcgatcgcccagcaccaagtccgcttccaggctttcggtttctttgcctccatcttgggtgcgccttcccggcgtctaggggagcgaaggctgaggtggcagcggcaggagagtccggccgcgacaggacgaactcccccactggaaaggattctgaaagaaatgaagtcagccctcagaaatgaagttgactgcctgctggctttcctgttgactggcccggagctgtactgcaagacccttgtgagcttccctagtctaagagtaggatgtctgctgaagtcatccatcaggttgaagaagcacttgatacagatgagaaggagatgctgctctttttgtgccgggatgttgctatagatgtggttccacctaatgtcagggaccttctggatattttacgggaaagaggtaagctgtctgtcggggacttggctgaactgctctacagagtgaggcgatttgacctgctcaaacgtatcttgaagatggacagaaaagctgtggagacccacctgctcaggaaccctcaccttgtttcggactatagagtgctgatggcagagattggtgaggatttggataaatctgatgtgtcctcattaattttcctcatgaaggattacatgggccgaggcaagataagcaaggagaagatttcttgggaccttgtggttgagttggagaaactaaatctggttgccccagatcaactggatttattagaaaaatgcctaaagaacatccacagaatagacctgaagacaaaaatccagaagtacaagcagtctgttcaaggagcagggacaagttacaggaatgttctccaagcagcaatccaaaagagtctcaaggatccttcaaataacttcaggctccataatgggagaagtaaagaacaaagacttaaggaacagcttggcgctcaacaagaaccagtgaagaaatccattcaggaatcagaagcttttttgcctcagagcatacctgaagagagatacaagatgaagagcaagcccctaggaatctgcctgataatcgattgcattggcaatgagacagagcttcttcgagacaccttcacttccctgggctatgaagtccagaaattcttgcatctcagtatgcatggtatatcccagattcttggccaatttgcctgtatgcccgagcaccgagactacgacagctttgtgtgtgtcctggtgagccgaggaggctcccagagtgtgtatggtgtggatcagactcactcagggctccccctgcatcacatcaggaggatgttcatgggagaatcatgcccttatctagcagggaagccaaagatgttttttattcagaactatgtggtgtcagagggcccagctggagacagcagcctctggagggtggatgggccagcgatgaagaatgtggaattcagggctcagaagcgagggctgtgcacagttcaccgagaagctgacttcttctggagcctgtgtactgcggacatgtccctgctggagcagtctcacagctcaccatccctgtacctgcagtgcctctcccagaaactgagacaagaaagaaaacgcccactcctggatcttcacattgaactcaatggctacatgtatgattggaacagcagagtttctgccaaggagaaatattatgtctggctgcagcacactctgagaaagaaacttatcctctcctacacataagaaaccaaaaggctgggcgtagtggctcacacctgtaatcccagcactttgggaggccaaggagggcagatcacttcaggtcaggagttcgagaccagcctggccaacatggtaaacgctgtccctagtaaaaatacaaaaattaaaaaaaaaaaaaaaaaa

SEQ ID NO: 2699 - DNA, 1804 bp, Homo sapiens
gcggtggtggacacgtcgagccgggtagaagtggaggggccgttcgaagagtcgtgagggggtgacgggttaagattcggagagagaggtgctagtggctggacttgacctggaaagaatcttctgctgactctcaacttttcctggaaaaaatggatcattcccaccatatggggatgagctatatggactccaacagtaccatgcaaccttctcaccatcacccaaccacttcagcctcacactcccatggtggaggagacagcagcatgatgatgatgcctatgaccttctactttggctttaagaatgtggaactactgttttccggtttggtgatcaatacagctggagaaatggctggagcttttgtggcagtgtttttactagcaatgttctatgaaggactcaagatagcccgagagagcctgctgcgtaagtcacaagtcagcattcgctacaattccatgcctgtcccaggaccaaatggaaccatccttatggagacacacaaaactgttgggcaacagatgctgagctttcctcacctcctgcaaacagtgctgcacatcatccaggtggtcataagctacttcctcatgctcatcttcatgacctacaacgggtacctctgcattgcagtagcagcaggggccggtacaggatacttcctcttcagctggaagaaggcagtggtagtggatatcacagagcattgccattgacatcaaactctatggcgtggccttatcgattgcagtgggaagttgttgaagacttgaagacgtgattcctgctccaatcatcccttcttgctcctctttgtgcacgtacacacacacacacacacacacacacacacacacacccctgctcaacagaggtttagtttacagtctctgaactaaagtagtaacctcccaaattgttttttctaataagctgagattcccatttctcttaaggagaagccacccatgagatgtcttttccttctccatcatcttagagccaagttatatgttcttgtctaatccatgtagctttttgttcaatgacttgatcatctgcttcctttttgaatttttaacagatagtaagtaaatttggtggttttttcccctgggtcagtgatggaaaggggttaacttcagccaggattgatggcagctgagggaaattcttgcccaactaaacccagaactcaaacttaacattagaaaataaggtccagggccggacacagtggcccatgcctgtaatcccagcactttggggggccaaggcaggctggatcacctgaggacaggagttcgagaccagtctggccaacatggggaaaccccgtctctactaaaaatacaaaaattagccgggcatggtggtgggcgcctgtaatcccagctactcagaaggctgaggcaggagaatcacttgaacctaggaggcggaggttgcagtgagccaagatggcgccattgcactccagcctgggtgacaagagtgaaactccatctcaaaaaaaaagaaaagaaggtccagcttttggattcaatgagtgggaaatacattgtgcctttctctagatgtgatacgttataccaaaatctttgtagtgtgcagagcggtggtttgagactaaatacaggcttagaacttgcagagtgtgtattcttggatggctgatgcatcgacttgcattcccacttaacactttgattagccatgaacttgccaatcaaaaaatgacaatcaatttgagaaaatagaaatagatatttttaaataaaaccattcacagttt

SEQ ID NO: 2700 - DNA, 2056 bp, Homo sapiens
cgagtctcaactaaaagggactcccggagctaggggtggggactcggcctcacacagtgagtgccggctattggacttttgtccagtgacagctgagacaacaaggaccacgggaggaggtgtaggagagaagcgccgcgaacagcgatcgcccagcaccaagtccgcttccaggctttcggtttctttgcctccatcttgggtgcgccttcccggcgtctaggggagcgaaggctgaggtggcagcggcaggagagtccggccgcgacaggacgaactcccccactggaaaggattctgaaagaaatgaagtcagccctcagaaatgaagttgactgcctgctggctttctgttgactggcccggagctgtactgcaagacccttgtgagcttccctagtctaagagtaggatgtctgctgaagtcatccatcaggttgaagaagcacttgatacagatgagaaggagatgctgctctttttgtgccgggatgttgctatagatgtggttccacctaatgtcagggaccttctggatattttacgggaaagaggtaagctgtctgtcggggacttggctgaactgctctacagagtgaggcgatttgacctgctcaaacgtatcttgaagatggacagaaaagctgtggagacccacctgctcaggaaccctcaccttgtttcggactatagagtgctgatggcagagattggtgaggatttggataaatctgatgtgtcctcattaattttcctcatgaaggattacatgggccgaggcaagataagcaaggagaagagtttcttggaccttgtggttgagttggagaaactaaatctggttgccccagatcaactggatttattagaaaaatgcctaaagaacatccacagaatagacctgaagacaaaaatccagaagtacaagcagtctgttcaaggagcagggacaagttacaggaatgttctccaagcagcaatccaaaagagtctcaaggatccttcaaataacttcaggagcatacctgaagagagatacaagatgaagagcaagcccctaggaatctgcctgataatcgattgcattggcaatgagacagagcttcttcgagacaccttcacttccctgggctatgaagtccagaaattcttgcatctcagtatgcatggtatatcccagattcttggccaatttgcctgtatgcccgagcaccgagactacgacagctttgtgtgtgtcctggtgagccgaggaggctcccagagtgtgtatggtgtggatcagactcactcagggctccccctgcatcacatcaggaggatgttcatgggagattcatgcccttatctagcagggaagccaaagatgttttttattcagaactatgtggtgtcagagggccagctggaggacagcagcctcttggaggtggatgggccagcgatgaagaatgtggaattcaaggctcagaagcgagggctgtgcacagttcaccgagaagctgacttcttctggagcctgtgtactgcggacatgtccctgctggagcagtctcacagctcaccgtccctgtacctgcagtgcctctcccagaaactgagacaagaaagaaaacgcccactcctggatcttcacattgaactcaatggctacatgtatgattggaacagcagagtttctgccaaggagaaatattatgtttggctgcagcacactctgagaaagaaacttatcctctcctacacataagaaaccaaaaggctgggcgtagtggctcacacctgtaatcccagcactttgggaggccaaggagggcagatcacttcaggtcaggagttcgagaccagcctggccaacatggtaaacgctgtccctagtaaaaatacaaaaattagctgggtgtgggtgtgggtacctgtattcccagttacttgggaggctgaggtgggaggatcttttgaacccaggagttcagggtcatagcatgctgtgattgtgcctacgaatagccactgcataccaacctgggcaatatagcaagatcccatctcttta

SEQ ID NO: 2701 - DNA, 1057 bp, Homo sapiens
atgtctgctgaagtcatccatcaggttgaagaagcacttgatacagatgagaaggagatgctgctctttttgtgccgggatgttgctatagatgtggttccacctaatgtcagggaccttctggatattttacgggaaagaggtaagctgtctgtcggggacttggctgaactgctctacagagtgaggcgatttgacctgctcaaacgtatcttgaagatggacagaaaagctgtggagacccacctgctcaggaaccctcaccttgtttcggactatagagtgctgatggcagagattggtgaggatttggataaatctgatgtgtcctcattaattttcctcatgaaggattacatgggccgaggcaagataagcaaggagaagagtttcttggaccttgtggttgagttggagaaactaaatctggttgccccagatcaactggatttattagaaaaatgcctaaagaacatccacagaatagacctgaagacaaaaatccagaagtacaagcagtctgttcaaggagcagggacaagttacaggaatgttctccaagcagcaatccaaaagagtctcaaggatccttcaaataacttcaggagcatacctgaagagagatacaagatgaagagcaagcccctaggaatctgcctgataatcgattgcattggcaatgagacagaactatgtggtgtcagagggccagctggaggacagcagcctcttggaggtggatgggccagcgatgaagaatgtggaattcaaggctcagaagcgagggctgtgcacagttcaccgagaagctgacttcttctggagcctgtgtactgcggacatgtccctgctggagcagtctcacagctcaccgtccctgtacctgcagtgcctctcccagaaactgagacaagaaagaaaacgcccactcctggatcttcacattgaactcaatggctacatgtatgattggaacagcagagtttctgccaaggagaaatattatgtttggctgcagcacactctgagaaagaaacttatcctctcctacacataa

SEQ ID NO: 2702 - DNA, 1443 bp, Homo sapiens
atgtctgctgaagtcatccatcaggttgaagaagcacttgatacagatgagaaggagatgctgctctttttgtgccgggatgttgctatagatgtggttccacctaatgtcagggaccttctggatattttacgggaaagaggtaagctgtctgtcggggacttggctgaactgctctacagagtgaggcgatttgacctgctcaaacgtatcttgaagatggacagaaaagctgtggagacccacctgctcaggaaccctcaccttgtttcggactatagagtgctgatggcagagattggtgaggatttggataaatctgatgtgtcctcattaattttcctcatgaaggattacatgggccgaggcaagataagcaaggagaagagtttcttggaccttgtggttgagttggagaaactaaatctggttgccccagatcaactggatttattagaaaaatgcctaaagaacatccacagaatagacctgaagacaaaaatccagaagtacaagcagtctgttcaaggagcagggacaagttacaggaatgttctccaagcagcaatccaaaagagtctcaaggatccttcaaataacttcaggctccataatgggagaagtaaagaacaaagacttaaggaacagcttggcgctcaacaagaaccagtgaagaaatccattcaggaatcagaagcttttttgcctcagagcatacctgaagagagatacaagatgaagagcaagcccctaggaatctgcctgataatcgattgcattggcaatgagacagagcttcttcgagacaccttcacttccctgggctatgaagtccagaaattcttgcatctcagtatgcatggtatatcccagattcttggccaatttgcctgtatgcccgagcaccgagactacgacagctttgtgtgtgtcctggtgagccgaggaggctcccagagtgtgtatggtgtggatcagactcactcagggctccccctgcatcacatcaggaggatgttcatgggagattcatgcccttatctagcagggaagccaaagatgttttttattcagaactatgtggtgtcagagggccagctggaggacagcagcctcttggaggtggatgggccagcgatgaagaatgtggaattcaaggctcagaagcgagggctgtgcacagttcaccgagaagctgacttcttctggagcctgtgtactgcggacatgtccctgctggagcagtctcacagctcaccgtccctgtacctgcagtgcctctcccagaaactgagacaagaaagaaaacgcccactcctggatcttcacattgaactcaatggctacatgtatgattggaacagcagagtttctgccaaggagaaatattatgtttggctgcagcacactctgagaaagaaacttatcctctcctacacataa

SEQ ID NO: 2703 - DNA, 932 bp, Homo sapiens
atgtctgctgaagtcatccatcaggttgaagaagcacttgatacagatgagaaggagatgctgctctttttgtgccgggatgttgctatagatgtggttccacctaatgtcagggaccttctggatattttacgggaaagaggtaagctgtctgtcggggacttggctgaactgctctacagagtgaggcgatttgacctgctcaaacgtatcttgaagatggacagaaaagctgtggagacccacctgctcaggaaccctcaccttgtttcggactatagagtgctgatggcagagattggtgaggatttggataaatctgatgtgtcctcattaattttcctcatgaaggattacatgggccgaggcaagataagcaaggagaagagtttcttggaccttgtggttgagttggagaaactaaatctggttgccccagatcaactggatttattagaaaaatgcctaaagaacatccacagaatagacctgaagacaaaaatccagaagtacaagcagtctgttcaaggagcagggacaagttacaggaatgttctccaagcagcaatccaaaagagtctcaaggatccttcaaataacttcaggctccataatgggagaagtaaagaacaaagacttaaggaacagcttggcgctcaacaagaaccagtgaagaaatccattcaggaatcagaagcttttttgcctcagagcatacctgaagagagatacaagatgaagagcaagcccctaggaatctgcctgataatcgattgcattggcaatgagacagaaaacgcccactcctggatcttcacattgaactcaatggctacatgtatgattggaacagcagagtttctgccaaggagaaatattatgtttggctgcagcacactctgagaaagaaacttatcctctcctacacataa

SEQ ID NO: 2704 - DNA, 2013 bp, Homo sapiens
  misc_feature (301)..(301): n is a, c, g, or t
  misc_feature (1707)..(1707): n is a, c, g, or t
  misc_feature (1722)..(1722): n is a, c, g, or t
  misc_feature (1756)..(1756): n is a, c, g, or t
  misc_feature (1880)..(1880): n is a, c, g, or t
  misc_feature (1882)..(1882): n is a, c, g, or t
  misc_feature (1885)..(1885): n is a, c, g, or t
  misc_feature (1887)..(1887): n is a, c, g, or t
gaattccaatcagaacaagctgttctcagacattaatctgaatgatcaggagtggcaagaattaatagatgaattggacaacacggttcctgaggatgacatacaggacctgttcaacgaagactttgaagagaagaaggagccagaattctcgcagacagcaactgagcacccctctctcccaggagagtgcgagcgtgaagagcgacccctctcactctcccttcggacatgtctccatgggatctccccaggcgaggtcttcttcttctggtcctcccttttcttctgtctccacggncactagtttaccttctggtgacagcactcccgcaggtccaaaccctgcaagctcaccagcaaacttgtgcttgtccagtccccttcaaaacttccaaaccaagcccacactccaggccaagctccacctcggcctggaaatggttatctcctgaatccggcagcagtgacagtggccggttcagcgtcagggcctgtggctgtgcccagctctgacatgtctccagcagaacagctcaaacagatggctgcacagcagcaacaaagggccaaactcatgcagcagaaacagcaacagcaacagcagcagcagcagcagcagcagcaacagcactcaaatcagacttcaaattggtctcccttaggacctccctctagtccatatggagcagcttttactgcagaaaaaccaaatagcccaatgatgtacccccaagcctttaacaaccaaaaccctatagtgcctccaatggcaaacaacctgcagaagacaacaatgaataactacctccctcagaatcacatgaatatgatcaatcagcagccaaataacttgggtacaaactccttaaacaaacagcacaatattctgacttatggcaacactaaacccctgacccacttcaatgcagacctgagtcagaggatgacaccaccagtggccaaccccaacaaaaaccccttgatgccgtatatccagcagcagcaacagcagcagcaacagcaacagcagcagcagcagcagcagcagccgccacctccacagctccaggcccccagggcacacctgagcgaagaccagaaacgcctgcttctcatgaagcagaaaggagtgatgaatcagcccatggcttacgctgcacttccatcccacggtcaggtaagtgtgaaagtgacacactcttcgagcagttcttgtggtgcatttcaagactgtcgatgtgtgatgttctacaaagcttccactgtagtggggtctaattgcctgcagaaaacctctttacaacatcctcaggtagtggccaggtttggagtgttctttttccatttctcctaagaaatggaaaagggtggcatgataaactttcgtgtatttcagtgtctaggaatcaaacttcttttattcccaactgcagataagaattacataaaattctcactctgagggagggaggctgcagaggtcactccaccaaacacggcactacctctgtagcttctctcccagcttgcatgatcccaggctctgggtggtgggaagcaggggacattcagggctgtctacaacagttttataaggccctgagcagccttcgagttttttaaattttattttagtgaatacatgcattaaaataaaacaacaacaacaacaacaacaaaaacacaaagaggctagagatttcnccgtttctacccccnaaataacgcttgctatcaagactttggagggggntgggggaaaagaatttaaaagccaaataatttttttttcataaaaagtaaaagctaccataaaacatttttttttctgtcacactgattaaatttcttctgaaaagccgcacatatagacaaancnaancnaaaattcctgaactggacaaacagcaaatactcaacagggttgttaacctaggtaacagttcagtagtttaaagaatcttttagacatctggaagcctttctattcattcctcagtacagtgttcc

SEQ ID NO: 2705 - DNA, 870 bp, Homo sapiens
  misc_feature (723)..(723): n is a, c, g, or t
gtttggatgatatggccattgcccaccactacagggactcctatcgacaccccagccacagggacctcagggacagaaacagacctatggggttgcatggcacacgtcaagaagaaatgattgatcacagactaacagacagagaatgggcagaagagtggaaacatcttgaccatctgttaaactgcataatggacatggtagaaaaaacaaggcgatctctcaccgtactaaggcggtgtcaagaagcagaccgggaagaattgaattactggatccggcggtacagtgacgccgaggacttaaaaaaaggtggcggcagtagcagcagccactctaggcagcagagtcccgtcaacccagacccagttgcactaggatgaaggccatacctaggtgctgcccagctttgagcattgctgtcctgggtcatatgaggtcacattgcttctccaaaggctatcagctcatcccttcatgtatattgatggcggcccttgcagtatctagtatccaatggtctccatcctgtcacgcgcatcgggaattccttcacaggcctgcgtctggatacgtaccagaggagatctggaagaaagctgaggaggccgtcaatgaggtgaagcgccaggcgatgacggagctgcagaaggccgtgtctgaggcggagcggaaagcccacgacatgatcacaacagagagggccaagatggagcgcacggncgccgaggccaaacggcaggcggcggaggacgcactggcagttatcaatcagcaggaggattcaagcgagagttgctggaattgtggccgtaaagcgagtgaaacctgcagtggctgtaacacagcccgatactgtggctcattttg

SEQ ID NO: 2706 - DNA, 1443 bp, Homo sapiens
atgtctgctgaagtcatccatcaggttgaagaagcacttgatacagatgagaaggagatgctgctctttttgtgccgggatgttgctatagatgtggttccacctaatgtcagggaccttctggatattttacgggaaagaggtaagctgtctgtcggggacttggctgaactgctctacagagtgaggcgatttgacctgctcaaacgtatcttgaagatggacagaaaagctgtggagacccacctgctcaggaaccctcaccttgtttcggactatagagtgctgatggcagagattggtgaggatttggataaatctgatgtgtcctcattaattttcctcatgaaggattacatgggccgaggcaagataagcaaggagaagagtttcttggaccttgtggttgagttggagaaactaaatctggttgccccagatcaactggatttattagaaaaatgcctaaagaacatccacagaatagacctgaagacaaaaatccagaagtacaagcagtctgttcaaggagcagggacaagttacaggaatgttctccaagcagcaatccaaaagagtctcaaggatccttcaaataacttcaggctccataatgggagaagtaaagaacaaagacttaaggaacagcttggcgctcaacaagaaccagtgaagaaatccattcaggaatcagaagcttttttgcctcagagcatacctgaagagagatacaagatgaagagcaagcccctaggaatctgcctgataatcgattgcattggcaatgagacagagcttcttcgagacaccttcacttccctgggctatgaagtccagaaattcttgcatctcagtatgcatggtatatcccagattcttggccaatttgcctgtatgcccgagcaccgagactacgacagctttgtgtgtgtcctggtgagccgaggaggctcccagagtgtgtatggtgtggatcagactcactcagggctccccctgcatcacatcaggaggatgttcatgggagattcatgcccttatctagcagggaagccaaagatgttttttattcagaactatgtggtgtcagagggccagctggaggacagcagcctcttggaggtggatgggccagcgatgaagaatgtggaattcaaggctcagaagcgagggctgtgcacagttcaccgagaagctgacttcttctggagcctgtgtactgcggacatgtccctgctggagcagtctcacagctcaccatccctgtacctgcagtgcctctcccagaaactgagacaagaaagaaaacgcccactcctggatcttcacattgaactcaatggctacatgtatgattggaacagcagagtttctgccaaggagaaatattatgtctggctgcagcacactctgagaaagaaacttatcctctcctacacataa

SEQ ID NO: 2707 - DNA, 2243 bp, Homo sapiens
ggacgtcgaggcattacaatcgcgaaaccaagccatagcatgaaacagcgagcttgcagcctcaccgacgagtctcaactaaaagggactcccggagctaggggtggggactcggcctcacacagtgagtgccggctattggacttttgtccagtgacagctgagacaacaaggaccacgggaggaggtgtaggagagaagcgccgcgaacagcgatcgcccagcaccaagtccgcttccaggctttcggtttctttgcctccatcttgggtgcgccttcccggcgtctaggggagcgaaggctgaggtggcagcggcaggagagtccggccgcgacaggacgaactcccccactggaaaggattctgaaagaaatgaagtcagccctcagaaatgaagttgactgcctgctggctttcctgttgactggcccggagctgtactgcaagacccttgtgagcttccctagtctaagagtaggatgtctgctgaagtcatccatcaggttgaagaagcacttgatacagatgagaaggagatgctgctctttttgtgccgggatgttgctatagatgtggttccacctaatgtcagggaccttctggatattttacgggaaagaggtaagctgtctgtcggggacttggctgaactgctctacagagtgaggcgatttgacctgctcaaacgtatcttgaagatggacagaaaagctgtggagacccacctgctcaggaaccctcaccttgtttcggactatagagtgctgatggcagagattggtgaggatttggataaatctgatgtgtcctcattaattttcctcatgaaggattacatgggccgaggcaagataagcaaggagaagagtttcttggaccttgtggttgagttggagaaactaaatttggttgccccagatcaactggatttattagaaaaatgcctaaagaacatccacagaatagacctgaagacaaaaatccagaagtacaagcagtctgttcaaggagcagggacaagttacaggaatgttctccaagcagcaatccaaaagagtctcaaggatccttcaaataacttcaggctccataatgggagaagtaaagaacaaagacttaaggaacagcttggcgctcaacaagaaccagtgaagaaatccattcaggaatcagaagcttttttgcctcagagcatacctgaagagagatacaagatgaagagcaagcccctaggaatctgcctgataatcgattgcattggcaatgagacagagcttcttcgagacaccttcacttccctgggctatgaagtccagaaattcttgcatctcagtatgcatggtatatcccagattcttggccaatttgcctgtatgcccgagcaccgagactacgacagctttgtgtgtgtcctggtgagccgaggaggctcccagagtgtgtatggtgtggatcagactcactcagggctccccctgcatcacatcaggaggatgttcatgggagattcatgcccttatctagcagggaagccaaagatgttttttattcagaactatgtggtgtcagagggccagctggagaacagcagcctcttggaggtggatgggccagcgatgaagaatgtggaattcaaggctcagaagcgagggctgtgcacagttcaccgagaagctgacttcttctggagcctgtgtactgcggacatgtccctgctggagcagtctcacagctcaccgtccctgtacctgcagtgcctctcccagaaactgagacaagaaagaaaacgcccactcctggatcttcacattgaactcaatggctacatgtatgattggaacagcagagtttctgccaaggagaaatattatgtctggctgcagcacactctgagaaagaaacttatcctctcctacacataagaaaccaaaaggctgggcgtagtggctcacacctgtaatcccagcactttgggaggccaaggagggcagatcacttcaggtcaggagttcgagaccagcctggccaacatggtaaacgctgtccctagtaaaaatgcaaaaattagctgggtgtgggtgtgggtacctgtgttcccagttacttgggaggctgaggtgggaggatcttttgaacccaggagttcagggtcatagcatgctgtgattgtgcctacgaatagccactgcataccaacctgggcaatatagcaagatcccatctctttaaaaaaaaaaaaaa

SEQ ID NO: 2708 - DNA, 5830 bp, Homo sapiens
actgagtcccgggaccccgggagagcggtcagtgtgtggtcgctgcgtttcctctgcctgcgccgggcatcacttgcgcgccgcagaaagtccgtctggcagcctggatatcctctcctaccggcacccgcagacgcccctgcagccgccggtcggcgcccgggctccctagccctgtgcgctcaactgtcctgcgctgcggggtgccgcgagttccacctccgcgcctccttctctagacaggcgctgggagaaagaaccggctcccgagttctgggcatttcgcccggctcgaggtgcaggatgcagagcaaggtgctgctggccgtcgccctgtggctctgcgtggagacccgggccgcctctgtgggtttgcctagtgtttctcttgatctgcccaggctcagcatacaaaaagacatacttacaattaaggctaatacaactcttcaaattacttgcaggggacagagggacttggactggctttggcccaataatcagagtggcagtgagcaaagggtggaggtgactgagtgcagcgatggcctcttctgtaagacactcacaattccaaaagtgatcggaaatgacactggagcctacaagtgcttctaccgggaaactgacttggcctcggtcatttatgtctatgttcaagattacagatctccatttattgcttctgttagtgaccaacatggagtcgtgtacattactgagaacaaaaacaaaactgtggtgattccatgtctcgggtccatttcaaatctcaacgtgtcactttgtgcaagatacccagaaaagagatttgttcctgatggtaacagaatttcctgggacagcaagaagggctttactattcccagctacatgatcagctatgctggcatggtcttctgtgaagcaaaaattaatgatgaaagttaccagtctattatgtacatagttgtcgttgtagggtataggatttatgatgtggttctgagtccgtctcatggaattgaactatctgttggagaaaagcttgtcttaaattgtacagcaagaactgaactaaatgtggggattgacttcaactgggaatacccttcttcgaagcatcagcataagaaacttgtaaaccgagacctaaaaacccagtctgggagtgagatgaagaaatttttgagcaccttaactatagatggtgtaacccggagtgaccaaggattgtacacctgtgcagcatccagtgggctgatgaccaagaagaacagcacatttgtcagggtccatgaaaaaccttttgttgcttttggaagtggcatggaatctctggtggaagccacggtgggggagcgtgtcagaatccctgcgaagtaccttggttacccacccccagaaataaaatggtataaaaatggaataccccttgagtccaatcacacaattaaagcggggcatgtactgacgattatggaagtgagtgaaagagacacaggaaattacactgtcatccttaccaatcccatttcaaaggagaagcagagccatgtggtctctctggttgtgtatgtcccaccccagattggtgagaaatctctaatctctcctgtggattcctaccagtacggcaccactcaaacgctgacatgtacggtctatgccattcctcccccgcatcacatccactggtattggcagttggaggaagagtgcgccaacgagcccagccaagctgtctcagtgacaaacccatacccttgtgaagaatggagaagtgtggaggacttccagggaggaaataaaattgaagttaataaaaatcaatttgctctaattgaaggaaaaaacaaaactgtaagtacccttgttatccaagcggcaaatgtgtcagctttgtacaaatgtgaagcggtcaacaaagtcgggagaggagagagggtgatctccttccacgtgaccaggggtcctgaaattactttgcaacctgacatgcagcccactgagcaggagagcgtgtctttgtggtgcactgcagacagatctacgtttgagaacctcacatggtacaagcttggcccacagcctctgccaatccatgtgggagagttgcccacacctgtttgcaagaacttggatactctttggaaattgaatgccaccatgttctctaatagcacaaatgacattttgatcatggagcttaagaatgcatccttgcaggaccaaggagactatgtctgccttgctcaagacaggaagaccaagaaaagacattgcgtggtcaggcagctcacagtcctagagcgtgtggcacccacgatcacaggaaacctggagaatcagacgacaagtattggggaaagcatcgaagtctcatgcacggcatctgggaatccccctccacagatcatgtggtttaaagataatgagacccttgtagaagactcaggcattgtattgaaggatgggaaccggaacctcactatccgcagagtgaggaaggaggacgaaggcctctacacctgccaggcatgcagtgttcttggctgtgcaaaagtggaggcatttttcataatagaaggtgcccaggaaaagacgaacttggaaatcattattctagtaggcacggcggtgattgccatgttcttctggctacttcttgtcatcatcctacggaccgttaagcgggccaatggaggggaactgaagacaggctacttgtccatcgtcatggatccagatgaactcccattggatgaacattgtgaacgactgccttatgatgccagcaaatgggaattccccagagaccggctgaagctaggtaagcctcttggccgtggtgcctttggccaagtgattgaagcagatgcctttggaattgacaagacagcaacttgcaggacagtagcagtcaaaatgttgaaagaaggagcaacacacagtgagcatcgagctctcatgtctgaactcaagatcctcattcatattggtcaccatctcaatgtggtcaaccttctaggtgcctgtaccaagccaggagggccactcatggtgattgtggaattctgcaaatttggaaacctgtccacttacctgaggagcaagagaaatgaatttgtcccctacaagaccaaaggggcacgattccgtcaagggaaagactacgttggagcaatccctgtggatctgaaacggcgcttggacagcatcaccagtagccagagctcagccagctctggatttgtggaggagaagtccctcagtgatgtagaagaagaggaagctcctgaagatctgtataaggacttcctgaccttggagcatctcatctgttacagcttccaagtggctaagggcatggagttcttggcatcgcgaaagtgtatccacagggacctggcggcacgaaatatcctcttatcggagaagaacgtggttaaaatctgtgactttggcttggcccgggatatttataaagatccagattatgtcagaaaaggagatgctcgcctccctttgaaatggatggccccagaaacaatttttgacagagtgtacacaatccagagtgacgtctggtcttttggtgttttgctgtgggaaatattttccttaggtgcttctccatatcctggggtaaagattgatgaagaattttgtaggcgattgaaagaaggaactagaatgagggcccctgattatactacaccagaaatgtaccagaccatgctggactgctggcacggggagcccagtcagagacccacgttttcagagttggtggaacatttgggaaatctcttgcaagctaatgctcagcaggatggcaaagactacattgttcttccgatatcagagactttgagcatggaagaggattctggactctctctgcctacctcacctgtttcctgtatggaggaggaggaagtatgtgaccccaaattccattatgacaacacagcaggaatcagtcagtatctgcagaacagtaagcgaaagagccggcctgtgagtgtaaaaacatttgaagatatcccgttagaagaaccagaagtaaaagtaatcccagatgacaaccagacggacagtggtatggttcttgcctcagaagagctgaaaactttggaagacagaaccaaattatctccatcttttggtggaatggtgcccagcaaaagcagggagtctgtggcatctgaaggctcaaaccagacaagcggctaccagtccggatatcactccgatgacacagacaccaccgtgtactccagtgaggaagcagaacttttaaagctgatagagattggagtgcaaaccggtagcacagcccagattctccagcctgactcggggaccacactgagctctcctcctgtttaaaaggaagcatccacaccccaactcccggacatcacatgagaggtctgctcagattttgaagtgttgttctttccaccagcaggaagtagccgcatttgattttcatttcgacaacagaaaaaggacctcggactgcagggagccagtcttctaggcatatcctggaagaggcttgtgacccaagaatgtgtctgtgtcttctcccagtgttgacctgatcctcttttttcattcatttaaaaagcattatcatgcccctgctgcgggtctcaccatgggtttagaacaaagagcttcaagcaatggccccatcctcaaagaagtagcagtacctggggagctgacacttctgtaaaactagaagataaaccaggcaacgtaagtgttcgaggtgttgaagatgggaaggatttgcagggctgagtctatccaagaggctttgtttaggacgtgggtcccaagccaagccttaagtgtggaattcggattgatagaaaggaagactaacgttaccttgctttggagagtactggagcctgcaaatgcattgtgtttgctctggtggaggtgggcatggggtctgttctgaaatgtaaagggttcagacggggtttctggttttagaaggttgcgtgttcttcgagttgggctaaagtagagttcgttgtgctgtttctgactcctaatgagagttccttccagaccgttagctgtctccttgccaagccccaggaagaaaatgatgcagctctggctccttgtctcccaggctgatcctttattcagaataccacaaagaaaggacattcagctcaaggctccctgccgtgttgaagagttctgactgcacaaaccagcttctggtttcttctggaatgaataccctcatatctgtcctgatgtgatatgtctgagactgaatgcgggaggttcaatgtgaagctgtgtgtggtgtcaaagtttcaggaaggattttacccttttgttcttccccctgtccccaacccactctcaccccgcaacccatcagtattttagttatttggcctctactccagtaaacctgattgggtttgttcactctctgaatgattattagccagacttcaaaattattttatagcccaaattataacatctattgtattatttagacttttaacatatagagctatttctactgatttttgcccttgttctgtcctttttttcaaaaaagaaaatgtgttttttgtttggtaccatagtgtgaaatgctgggaacaatgactataagacatgctatggcacatatatttatagtctgtttatgtagaaacaaatgtaatatattaaagccttatatataatgaactttgtactattcacattttgtatcagtattatgtagcataacaaaggtcataatgctttcagcaattgatgtcattttattaaagaacattgaaaaacttga

SEQ ID NO: 2709 - DNA, 2389 bp, Homo sapiens
taatgagagggaaaacaagtatgaagctgtgtggctgaaaccgtcttggcaagttagggaaagaaaacggaagtcactggggctgatcacagtgctaagcatgagagcactgcaagatgaggtcacggaggtgggcagggaccggcttgtgccaggccttgctggcagggtgaagagtttgccttttctctgcgtacaatggaaaggagaagaggttttaagcaagagaatggcttggtcatgtgtatgtctttgagacaccctggctagtctatgtatgatgcaaaaggtgggtggggcagggtgacaagaaaatactgttccggagcttcctgtggctgtgcctataagaggtggtggtggtggtgtggaaggaggtgtggcagtgaataaacagagatgtagaaacagcgtgtacatatattttaaggaacactgaggacgtgatgctggaatttgtgatgagagagtggaaaaaatccaggaaacttctaggacagaggctattcaacaagctcatgaagatgaccttctatgggcattttgtagccggggaggaccaggagtccatccagcccctgcttcggcactacagggccttcggtgtcagcgccatcctggactatggagtggaggaggacctgagccccgaggaggcagagcacaaggagatggagtcctgctcctcggctgcggagagggatggcagtggcacgaataagcgggacaagcaataccaggcccaccgggctttcggggaccgcaggaatggtgtcatcagtgcccgcacctacttctacgccaatgaggccaagtgcgacagccacatggagacattcttgcgctgcatcgaagcctcaggtagagtcagcgatgacggcttcatagccattaagctcacagcactggggagaccccagtttctgctgcagttctcagaggtgctggccaagtggaggtgcttctttcaccaaatggctgtggagcaagggcaggcgggcctggctgccatggacaccaagctggaggtggcggtgctgcaggaaagtgtcgcaaagttgggcatcgcatccagggctgagattgaggactggttcacggcagagaccctgggagtgtctggcaccatggacctgctggactggagcagcctcatcgacagcaggaccaagctgtccaagcacctggtagtccccaacgcacagacaggacagctggagcccctgctgtcccggttcactgaggaggaggagctacagatgaccaggatgctacagcggatggatgtcctggccaagaaagccacagagatgggcgtgcggctgatggtggatgccgagcagacctacttccagccggccatcagccgcctgacgctggagatgcagcggaagttcaatgtggagaagccgctcatcttcaacacataccagtgctacctcaaggatgcctatgacaatgtgaccctggacgtggagctggctcgccgtgagggctggtgttttggggccaagctggtgcggggcgcatacctggcccaggagcgagcccgtgcggcagagatcggctatgaggaccccatcaaccccacgtacgaggccaccaacgccatgtaccacaggtgcctggactacgtgttggaggagctgaagcacaacgccaaggccaaggtgatggtggcctcccacaatgaggacacagtgcgcttcgcactgcgcaggatggaggagctgggcctgcatcctgctgaccaccaggtgtactttggacagctgctaggcatgtgtgaccagatcagcttcccgctgggccaggccggctaccccgtgtacaagtacgtgccctatggccccgtgatggaggtgctgccctacttgtcccgccgtgccctggagaacagcagcctcatgaagggcacccatcgggagcggcagttgctgtggctggagctcttgaggcggctccgaactggcaacctcttccatcgccctgcctagcacccgccagcacaccctcagcctccagcaccccccgcccccgcccaggccatcaccacagctgcagccaaccccatcctcacacagattcaccttttttcaccccacacttgcagagctgctggaggtgaggtcaggtgcctcccagccctgcccagagtatgggcactcaggtgtgggccgaacctgatacctgcctgggacagccactggaaacttttgggaactctcctcgaatgtgtggcccaaggcccccacctctgtgacccccatgtccttggacctagaggattgtccaccttctgccaaggccagcccacacagcccgagccccttggggagcagtggccgggctggggaggcctgcctggtcaataaaccactgttcctgc

SEQ ID NO: 2710 - DNA, 1542 bp, Homo sapiens
atgaccctcttaccgggagacaattctgactacgactacagcgcgctgagctgcacctcggacgcctccttccacccggccttcctcccgcagcgccaggccatcaagggcgcgttctaccgccgggcgcagcggctgcggccgcaggatgagccccgccagggctgtcagcccgaggaccgccgccgtcggatcatcatcaacgtaggcggcatcaagtactcgctgccctggaccacgctggacgagttcccgctgacgcgcctgggccagctcaaggcctgcaccaacttcgacgacatcctcaacgtgtgcgatgactacgacgtcacctgcaacgagttcttcttcgaccgcaacccgggggccttcggcactatcctgaccttcctgcgcgcgggcaagctgcggctgctgcgcgagatgtgcgcgctgtccttccaggaggagctgctgtactggggcatcgcggaggaccacctggacggctgctgcaagcgccgctacctgcagaagattgaggagttcgcggagatggtggagcgggaggaagaggacgacgcgctggacagcgagggccgcgacagcgagggcccggccgagggcgagggccgcctggggcgctgcatgcggcgactgcgcgacatggtggagaggccgcactcggggctgcctggcaaggtgttcgcctgcctgtcggtgctcttcgtgaccgtcaccgccgtcaacctctccgtcagcaccttgcccagcctgagggaggaggaggagcagggccactgttcccagatgtgccacaacgtcttcatcgtggagtcggtgtgcgtgggctggttctccctggagttcctcctgcggctcattcaggcgcccagcaagttcgccttcctgcggagcccgctgacgctgatcgacctggtggccatcctgccctactacatcacgctgctggtggacggcgccgccgcaggccgtcgcaagcccggcgcgggcaacagctacctggacaaggtggggctggtgctgcgcgtgctgcgggcgctgcgcatcctgtacgtgatgcgcctggcgcgccactccctggggctgcagacgctggggctcacggcccgccgctgcacccgcgagttcgggctcctgctgctcttcctctgcgtggccatcgccctcttcgcgcccctgctctacgtcatcgagaacgagatggccgacagccccgagttcaccagcatccctgcctgctactggtgggctgtcatcaccatgacgacggtggactatggcgacatggtccccaggagcaccccgggccaggtagtggccctgagcagcatcctgagcggcatcctgctcatggccttcccagtcacctccatcttccacaccttctccccctcctacctggagctcaaacaggagcaagagagggtgatgttccggagggcgcagttcctcatcaaaaccaagtcgcagctgagcgtgtcccaggacagtgacatcttgttcggaagtgcctcctcggacaccagagacaataactga

SEQ ID NO: 2711 - DNA, 5463 bp, Homo sapiens
gccagcgctgcagggagatagcagcgcgcagcccgcagaggcgctgcggcccgtgcagccccggaggcccctcgcggagaaggcggcggcggaggagaggccgagttaccgcccgccgcccgcgccccccctccccgcggcgccgcatcttgaatggaaacatggcggtgccggctcggacctgcggcgcctctcggcccggcccagcgcggactgcgcgcccctggcccggctgcggcccccaccctggccccggcacccggcgcccgacgtccgggcccccgcgcccgctgtggctgctgctgccgcttctaccgctgctcgccgcccccggcgcctctgcctacagcttcccccagcagcacacgatgcagcactgggcccggcgtctggagcaggaggtcgacggcgtgatgcggatttttggaggcgtccagcagctccgtgagatttacaaggacaaccggaacctgttcgaggtacaggagaatgagcctcagaagttggtggagaaggtggcaggggacattgagagccttctggacaggaaggtgcaggccctgaagagactggctgatgctgcagagaacttccagaaagcacaccgctggcaggacaacatcaaggaggaagacatcgtgtactatgacgccaaggctgacgctgagctggacgaccctgagagtgaggatgtggaaagggggtctaaggccagcaccctaaggctggacttcatcgaggacccaaacttcaagaacaaggtcaactattcatacgcggctgtacagatccctacggacatctacaaaggctccactgtcatcctcaatgagctcaactggacagaggccctggagaatgtgttcatggaaaaccgcagacaagaccccacactgctgtggcaggtcttcggcagcgccacaggagtcactcgctactacccggccaccccgtggcgagcccccaagaagatcgacctgtacgatgtccgaaggagaccctggtatatccagggggcctcgtcacccaaagacatggtcatcatcgtggatgtgagtggcagtgtgagcggcctgaccctgaagctgatgaagacatctgtctgcgagatgctggacacgctgtctgatgatgactatgtgaatgtggcctcgttcaacgagaaggcacagcctgtgtcatgcttcacacacctggtgcaggccaatgtgcgcaacaagaaggtgttcaaggaagctgtgcagggcatggtggccaagggcaccacaggctacaaggccggctttgagtatgcctttgaccagctgcagaactccaacatcactcgggccaactgcaacaagatgatcatgatgttcacggatggtggtgaggaccgcgtgcaggacgtctttgagaagtacaattggccaaaccggacggtgcgcgtgtttactttctccgtggggcagcataactatgacgtcacaccgctgcagtggatggcctgtgccaacaaaggctactattttgagatcccttccatcggagccatccgcatcaacacacaggaatatctagatgtgttgggcaggcccatggtgctggcaggcaaggaggccaagcaggttcagtggaccaacgtgtatgaggatgcactgggactggggttggtggtaacagggaccctccctgttttcaacctgacacaggatggccctggggaaaagaagaaccagctgatcctgggcgtgatgggcattgacgtggctctgaatgacatcaagaggctgacccccaactacacgcttggagccaacggctatgtgtttgccattgacctgaacggctacgtgttgctgcaccccaatctcaagccccagaccaccaacttccgggagcctgtgactctggacttcctggatgcggagctagaggatgagaacaaggaagagatccgtcggagcatgattgatggcaacaagggccacaagcagatcagaacgttggtcaagtccctggatgagaggtacatagatgaggtgacacggaactacacctgggtgcctataaggagcactaactacagcctggggctggtgctcccaccctacagcaccttctacctccaagccaatctcagtgaccagatcctgcaggtcaagtattttgagttcctgctccccagcagctttgagtctgaaggacacgttttcattgctcccagagagtactgcaaggacctgaatgcctcagacaacaacaccgagttcctgaaaaactttattgagctcatggagaaagtgactccagactccaagcagtgcaacaacttccttctgcacaacctgatcttggacacgggcatcacgcagcagctggtagagcgtgtgtggagggaccaggatctcaacacgtacagcctactggccgtgttcgctgccacagacggtggcatcacccgagtcttccccaacaaggcagctgaggactggacagagaaccctgagcccttcaatgccagcttctaccgccgcagcctggataaccacggttatgtcttcaagcccccacaccaggatgccctgttaaggccgctggagctggagaatgacactgtgggcatcctcgtcagcacagctgtggagctcagcctaggcaggcgcacactgaggccagcagtggtgggcgtcaagctggacctagaggcttgggctgagaagttcaaggtgctagccagcaaccgtacccaccaagaccagcctcagaagtgcggccccaacagccactgtgagatggactgcgaggttaacaatgaggacttactctgtgtcctcattgatgatggaggattcctggtgctgtcaaaccagaaccatcagtgggaccaggtgggcaggttcttcagtgaggtggatgccaacctgatgctggcactctacaataactccttctacacccgcaaggagtcctatgactatcaggcagcctgtgcccctcagccccctggcaacctgggtgctgcaccccggggtgtctttgtgcccaccgttgcagatttccttaacctggcctggtggacctctgctgccgcctggtccctgttccagcagcttctctacggcctcatctaccacagctggttccaagcagaccccgcggaggccgaggggagccccgagacgcgcgagagcagctgcgtcatgaaacagacccagtactacttcggctcggtaaacgcctcctacaacgccatcatcgactgcggaaactgctccaggctgttccacgcgcagagactgaccaacaccaatcttctctttgtggtggccgagaagccgctgtgcagccagtgcgaggctggccggctgctgcagaaggagacgcactgcccagcggacggcccggagcagtgtgagctagtgcagagaccgcgataccggagaggcccgcacatctgcttcgactacaacgcgacagaagatacctcagactgtggccgcggggcctccttcccgccgtcgctgggcgtcctggtctccctgcaactgctgctcctcctgggcctgccgccccggccgcagcctcaagtcctcgtccacgcctctcgccgcctctgagcaccctgccccaccccacctccactcccacctcacccggcctcttcgcctttcccaccctcctgccccacactccccgccttagagcctcgtccctccctcactgaaggacctgagctggccaggccctgagagtctggtctgcgccttgggatggggagtcccaaagcgggacgccgcaggtgtttggcacccaaatcacatctcacctccgaactgttcaagtgtccccagacccttcttgcctgctgggctccccccagtgggatgggacagggaggccacacgcactggtgccaaaaccaggcctctgctgccgcccttcctggaggctgcctatgttgggggggaccctgcctcagctgacccggcctctctgccccacccaagcccaaacttggtttctgtgagaatagtggaggaaggtgagatggccagtttgaagcctgtgcctcccagcttaaatcctagcaggagagaggctctggggcagcccccatgggctcctgcccctttcaggcctacagccacatccccaagcccaccaggtgtcaggatagtcacagtgataccagttcagacactaccccatatacacctggaacattgaggatggaaactggactcacattcgacataccccactgggcacacgcacaaacacacacactatggggtggggtgggtgtaggggcttacaaagccttacacagggcgaggggttggtgggagggttggcacctgcacactccatctcctgctcaccacctgcctctaatctgagctgcagcctggctggtcctcccatttctaaagctgaatgtcaaacagtgccaaatgctggggcagggggtgaagaaccctctgtcccacccctagccaccagtgtcctccaagtgccccctcacctctccaggtgctcattgtaaccatttctcactagtgtcaggcccccagtgggaccacatgccactgcctgcacctttcggcagaggaacccccaccagacatcaccctttgccttagcaggggtgactttgtctctcctggctgggccatccttccgccaatctggcccttacacactcaggcctgtgcccactccctatctccttcccacccctacacacacactccctgcttgcaggaggccaaactgtccctcccttgctgaacacacacacacacacacacacacaggtggggactgggcacagctcttcacaccattcattctggtcatttcccccaaaggcatcccagcctgggggccagtggggaactgagggcaaggggatatagtgatggggctcagatggactgggaggagggggagggtgatgcattaattaatggcttcgttaattaatgtcatgttgcttgtcgctttctcagtgtgtgtgtgtggtccatgcccactgctggtgccagggtgggtgtccatgtgcacccggcctggatgccagctgtgtccttcgggggcgtgcgtgtaactgtagtgtagtcaggtgctcaatggagaatataaacatatacagaaaaatatatattttaagtttaaaaaacagaaaaacagacaaaacaatccccatcaggtagctgtctaacccccagctgggtctaatccttctcattacccacccgacctggctgcccctcaccttgggctgggggactggggggccatttccttttctctgccctttttttgttgttctattttgtacagacaagttggaaaaacaacagcgacaaaaaagtcaagaaactttgtaaaatatcgtgtgtgtgattccttgtaaaatattttcaaatggtttattacagaagatcagttattaaataatgttcatattttcacttc

SEQ ID NO: 2712 - DNA, 5279 bp, Homo sapiens
atccgcggcgaagcgagtggctgcagagggctgcatcctgccgtccccagccccccacaaccgtacagccgtgcccaggtttccgcttagggaaccaggaggtccaggccctttctgccagcagccgggcgtgcaagcccccgacagagagaaatcttaaagatagctagagccacgggggctgatgcagcactgggcccggcgtctggagcaggaggtcgacggcgtgatgcggatttttggaggcgtccagcagctccgtgagatttacaaggacaaccggaacctgttcgaggtacaggagaatgagcctcagaagttggtggagaaggtggcaggggacattgagagccttctggacaggaaggtgcaggccctgaagagactggctgatgctgcagagaacttccagaaagcacaccgctggcaggacaacatcaaggaggaagacatcgtgtactatgacgccaaggctgacgctgagctggacgaccctgagagtgaggatgtggaaagggggtctaaggccagcaccctaaggctggacttcatcgaggacccaaacttcaagaacaaggtcaactattcatacgcggctgtacagatccctacggacatctacaaaggctccactgtcatcctcaatgagctcaactggacagaggccctggagaatgtgttcatggaaaaccgcagacaagaccccacactgctgtggcaggtcttcggcagcgccacaggagtcactcgctactacccggccaccccgtggcgagcccccaagaagatcgacctgtacgatgtccgaaggagaccctggtatatccagggggcctcgtcacccaaagacatggtcatcatcgtggatgtgagtggcagtgtgagcggcctgaccctgaagctgatgaagacatctgtctgcgagatgctggacacgctgtctgatgatgactatgtgaatgtggcctcgttcaacgagaaggcacagcctgtgtcatgcttcacacacctggtgcaggccaatgtgcgcaacaagaaggtgttcaaggaagctgtgcagggcatggtggccaagggcaccacaggctacaaggccggctttgagtatgcctttgaccagctgcagaactccaacatcactcgggccaactgcaacaagatgatcatgatgttcacggatggtggtgaggaccgcgtgcaggacgtctttgagaagtacaattggccaaaccggacggtgcgcgtgtttactttctccgtggggcagcataactatgacgtcacaccgctgcagtggatggcctgtgccaacaaaggctactattttgagatcccttccatcggagccatccgcatcaacacacaggaatatctagatgtgttgggcaggcccatggtgctggcaggcaaggaggccaagcaggttcagtggaccaacgtgtatgaggatgcactgggactggggttggtggtaacagggaccctccctgttttcaacctgacacaggatggccctggggaaaagaagaaccagctgatcctgggcgtgatgggcattgacgtggctctgaatgacatcaagaggctgacccccaactacacgcttggagccaacggctatgtgtttgccattgacctgaacggctacgtgttgctgcaccccaatctcaagccccagaccaccaacttccgggagcctgtgactctggacttcctggatgcggagctagaggatgagaacaaggaagagatccgtcggagcatgattgatggcaacaagggccacaagcagatcagaacgttggtcaagtccctggatgagaggtacatagatgaggtgacacggaactacacctgggtgcctataaggagcactaactacagcctggggctggtgctcccaccctacagcaccttctacctccaagccaatctcagtgaccagatcctgcaggtcaagtattttgagttcctgctccccagcagctttgagtctgaaggacacgttttcattgctcccagagagtactgcaaggacctgaatgcctcagacaacaacaccgagttcctgaaaaactttattgagctcatggagaaagtgactccagactccaagcagtgcaacaacttccttctgcacaacctgatcttggacacgggcatcacgcagcagctggtagagcgtgtgtggagggaccaggatctcaacacgtacagcctactggccgtgttcgctgccacagacggtggcatcacccgagtcttccccaacaaggcagctgaggactggacagagaaccctgagcccttcaatgccagcttctaccgccgcagcctggataaccacggttatgtcttcaagcccccacaccaggatgccctgttaaggccgctggagctggagaatgacactgtgggcatcctcgtcagcacagctgtggagctcagcctaggcaggcgcacactgaggccagcagtggtgggcgtcaagctggacctagaggcttgggctgagaagttcaaggtgctagccagcaaccgtacccaccaagaccagcctcagaagtgcggccccaacagccactgtgagatggactgcgaggttaacaatgaggacttactctgtgtcctcattgatgatggaggattcctggtgctgtcaaaccagaaccatcagtgggaccaggtgggcaggttcttcagtgaggtggatgccaacctgatgctggcactctacaataactccttctacacccgcaaggagtcctatgactatcaggcagcctgtgcccctcagccccctggcaacctgggtgctgcaccccggggtgtctttgtgcccaccgttgcagatttccttaacctggcctggtggacctctgctgccgcctggtccctgttccagcagcttctctacggcctcatctaccacagctggttccaagcagaccccgcggaggccgaggggagccccgagacgcgcgagagcagctgcgtcatgaaacagacccagtactacttcggctcggtaaacgcctcctacaacgccatcatcgactgcggaaactgctccaggctgttccacgcgcagagactgaccaacaccaatcttctctttgtggtggccgagaagccgctgtgcagccagtgcgaggctggccggctgctgcagaaggagacgcactgcccagcggacggcccggagcagtgtgagctagtgcagagaccgcgataccggagaggcccgcacatctgcttcgactacaacgcgacagaagatacctcagactgtggccgcggggcctccttcccgccgtcgctgggcgtcctggtctccctgcaactgctgctcctcctgggcctgccgccccggccgcagcctcaagtcctcgtccacgcctctcgccgcctctgagcaccctgccccaccccacctccactcccacctcacccggcctcttcgcctttcccaccctcctgccccacactccccgccttagagcctcgtccctccctcactgaaggacctgagctggccaggccctgagagtctggtctgcgccttgggatggggagtcccaaagcgggacgccgcaggtgtttggcacccaaatcacatctcacctccgaactgttcaagtgtccccagacccttcttgcctgctgggctccccccagtgggatgggacagggaggccacacgcactggtgccaaaaccaggcctctgctgccgcccttcctggaggctgcctatgttgggggggaccctgcctcagctgacccggcctctctgccccacccaagcccaaacttggtttctgtgagaatagtggaggaaggtgagatggccagtttgaagcctgtgcctcccagcttaaatcctagcaggagagaggctctggggcagcccccatgggctcctgcccctttcaggcctacagccacatccccaagcccaccaggtgtcaggatagtcacagtgataccagttcagacactaccccatatacacctggaacattgaggatggaaactggactcacattcgacataccccactgggcacacgcacaaacacacacactatggggtggggtgggtgtaggggcttacaaagccttacacagggcgaggggttggtgggagggttggcacctgcacactccatctcctgctcaccacctgcctctaatctgagctgcagcctggctggtcctcccatttctaaagctgaatgtcaaacagtgccaaatgctggggcagggggtgaagaaccctctgtcccacccctagccaccagtgtcctccaagtgccccctcacctctccaggtgctcattgtaaccatttctcactagtgtcaggcccccagtgggaccacatgccactgcctgcacctttcggcagaggaacccccaccagacatcaccctttgccttagcaggggtgactttgtctctcctggctgggccatccttccgccaatctggcccttacacactcaggcctgtgcccactccctatctccttcccacccctacacacacactccctgcttgcaggaggccaaactgtccctcccttgctgaacacacacacacacacacacacacaggtggggactgggcacagctcttcacaccattcattctggtcatttcccccaaaggcatcccagcctgggggccagtggggaactgagggcaaggggatatagtgatggggctcagatggactgggaggagggggagggtgatgcattaattaatggcttcgttaattaatgtcatgttgcttgtcgctttctcagtgtgtgtgtgtggtccatgcccactgctggtgccagggtgggtgtccatgtgcacccggcctggatgccagctgtgtccttcgggggcgtgcgtgtaactgtagtgtagtcaggtgctcaatggagaatataaacatatacagaaaaatatatattttaagtttaaaaaacagaaaaacagacaaaacaatccccatcaggtagctgtctaacccccagctgggtctaatccttctcattacccacccgacctggctgcccctcaccttgggctgggggactggggggccatttccttttctctgccctttttttgttgttctattttgtacagacaagttggaaaaacaacagcgacaaaaaagtcaagaaactttgtaaaatatcgtgtgtgtgattccttgtaaaatattttcaaatggtttattacagaagatcagttattaaataatgttcatattttcacttc

SEQ ID NO: 2713 - DNA, 4956 bp, Homo sapiens
atgaaatggaaacatgttccttttttggtcatgatatcactcctcagcttatccccaaatcacctgtttctggcccagcttattccagaccctgaagatgtagagagggggaacgaccacgggacgccaatccccacctctgataacgatgacaattcgctgggctatacaggctcccgtcttcgtcaggaagattttccacctcgcattgttgaacacccttcagacctgattgtctcaaaaggagaacctgcaactttgaactgcaaagctgaaggccgccccacacccactattgaatggtacaaagggggagagagagtggagacagacaaagatgaccctcgctcacaccgaatgttgctgccgagtggatctttatttttcttacgtatagtacatggacggaaaagtagacctgatgaaggagtctatgtctgtgtagcaaggaattaccttggagaggctgtgagccacaatgcatcgctggaagtagccatacttcgggatgacttcagacaaaacccttcggatgtcatggttgcagtaggagagcctgcagtaatggaatgccaacctccacgaggccatcctgagcccaccatttcatggaagaaagatggctctccactggatgataaagatgaaagaataactatacgaggaggaaagctcatgatcacttacacccgtaaaagtgacgctggcaaatatgtttgtgttggtaccaatatggttggggaacgtgagagtgaagtagccgagctgactgtcttagagagaccatcatttgtgaagagacccagtaacttggcagtaactgtggatgacagtgcagaatttaaatgtgaggcccgaggtgaccctgtacctacagtacgatggaggaaagatgatggagagctgcccaaatccagatatgaaatccgagatgatcataccttgaaaattaggaaggtgacagctggtgacatgggttcatacacttgtgttgcagaaaatatggtgggcaaagctgaagcatctgctactctgactgttcaagaacctccacattttgttgtgaaaccccgtgaccaggttgttgctttgggacggactgtaacttttcagtgtgaagcaaccggaaatcctcaaccagctattttctggaggagagaagggagtcagaatctacttttctcatatcaaccaccacagtcatccagccgattttcagtctcccagactggcgacctcacaattactaatgtccagcgatctgatgttggttattacatctgccagactttaaatgttgctggaagcatcatcacaaaggcatatttggaagttacagatgtgattgcagatcggcctcccccagttattcgacaaggtcctgtgaatcagactgtagccgtggatggcactttcgtcctcagctgtgtggccacaggcagtccagtgcccaccattctgtggagaaaggatggagtcctcgtttcaacccaagactctcgaatcaaacagttggagaatggagtactgcagatccgatatgctaagctgggtgatactggtcggtacacctgcattgcatcaacccccagtggtgaagcaacatggagtgcttacattgaagttcaagaatttggagttccagttcagcctccaagacctactgacccaaatttaatccctagtgccccatcaaaacctgaagtgacagatgtcagcagaaatacagtcacattatcgtggcaaccaaatttgaattcaggagcaactccaacatcttatattatagaagccttcagccatgcatctggtagcagctggcagaccgtagcagagaatgtgaaaacagaaacatctgccattaaaggactcaaacctaatgcaatttaccttttccttgtgagggcagctaatgcatatggaattagtgatccaagccaaatatcagatccagtgaaaacacaagatgtcctaccaacaagtcagggggtggaccacaagcaggtccagagagagctgggaaatgctgttctgcacctccacaaccccaccgtcctttcttcctcttccatcgaagtgcactggacagtagatcaacagtctcagtatatacaaggatataaaattctctatcggccatctggagccaaccacggagaatcagactggttagtttttgaagtgaggacgccagccaaaaacagtgtggtaatccctgatctcagaaagggagtcaactatgaaattaaggctcgccctttttttaatgaatttcaaggagcagatagtgaaatcaagtttgccaaaaccctggaagaagcacccagtgccccaccccaaggtgtaactgtatccaagaatgatggaaacggaactgcaattctagttagttggcagccacctccagaagacactcaaaatggaatggtccaagagtataaggtttggtgtctgggcaatgaaactcgataccacatcaacaaaacagtggatggttccaccttttccgtggtcattccctttcttgttcctggaatccgatacagtgtggaagtggcagccagcactggggctgggtctggggtaaagagtgagcctcagttcatccagctggatgcccatggaaaccctgtgtcacctgaggaccaagtcagcctcgctcagcagatttcagatgtggtgaagcagccggccttcatagcaggtattggagcagcctgttggatcatcctcatggtcttcagcatctggctttatcgacaccgcaagaagagaaacggacttactagtacctacgcgggtatcagaaaagtcccgtcttttaccttcacaccaacagtaacttaccagagaggaggcgaagctgtcagcagtggagggaggcctggacttctcaacatcagtgaacctgccgcgcagccatggctggcagacacgtggcctaatactggcaacaaccacaatgactgctccatcagctgctgcacggcaggcaatggaaacagcgacagcaacctcactacctacagtcgcccagctgattgtatagcaaattataacaaccaactggataacaaacaaacaaatctgatgctccctgagtcaactgtttatggtgatgtggaccttagtaacaaaatcaatgagatgaaaaccttcaatagcccaaatctgaaggatgggcgttttgtcaatccatcagggcagcctactccttacgccaccactcagctcatccagtcaaacctcagcaacaacatgaacaatggcagcggggactctggcgagaagcactggaaaccactgggacagcagaaacaagaagtggcaccagttcagtacaacatcgtggagcaaaacaagctgaacaaagattatcgagcaaatgacacagttcctccaactatcccatacaaccaatcatacgaccagaacacaggaggatcctacaacagctcagaccggggcagtagtacatctgggagtcaggggcacaagaaaggggcaagaacacccaaggtaccaaaacagggtggcatgaactgggcagacctgcttcctcctcccccagcacatcctcctccacacagcaatagcgaagagtacaacatttctgtagatgaaagctatgaccaagaaatgccatgtcccgtgccaccagcaaggatgtatttgcaacaagatgaattagaagaggaggaagatgaacgaggccccactccccctgttcggggagcagcttcttctccagctgccgtgtcctatagccatcagtccactgccactctgactccctccccacaggaagaactccagcccatgttacaggattgtccagaggagactggccacatgcagcaccagcccgacaggagacggcagcctgtgagtcctcctccaccaccacggccgatctcccctccacatacctatggctacatttcaggacccctggtctcagatatggatacggatgcgccagaagaggaagaagacgaagccgacatggaggtagccaagatgcaaaccagaaggcttttgttacgtgggcttgagcagacacctgcctccagtgttggggacctggagagctctgtcacggggtccatgatcaacggctggggctcagcctcagaggaggacaacatttccagcggacgctccagtgttagttcttcggacggctcctttttcactgatgctgactttgcccaggcagtcgcagcagcggcagagtatgctggtctgaaagtagcacgacggcaaatgcaggatgctgctggccgtcgacattttcatgcgtctcagtgccctaggcccacaagtcccgtgtctacagacagcaacatgagtgccgccgtaatgcagaaaaccagaccagccaagaaactgaaacaccagccaggacatctgcgcagagaaacctacacagatgatcttccaccacctcctgtgccgccacctgctataaagtcacctactgcccaatccaagacacagctggaagtacgacctgtagtggtgccaaaactcccttctatggatgcaagaacagacagatcatcagacagaaaaggaagcagttacaaggggagagaagtgttggatggaagacaggttgttgacatgcgaacaaatccaggtgatcccagagaagcacaggaacagcaaaatgacgggaaaggacgtggaaacaaggcagcaaaacgagaccttccaccagcaaagactcatctcatccaagaggatattctaccttattgtagacctacttttccaacatcaaataatcccagagatcccagttcctcaagctcaatgtcatcaagaggatcaggaagcagacaaagagaacaagcaaatgtaggtcgaagaaatattgcagaaatgcaggtacttggaggatatgaaagaggagaagataataatgaagaattagaggaaactgaaagctga

SEQ ID NO: 2714 - DNA, 1458 bp, Homo sapiens
tagtctaagagtaggatgtctgctgaagtcatccatcaggttgaagaagcacttgatacagatgagaaggagatgctgctctttttgtgccgggatgttgctatagatgtggttccacctaatgtcagggaccttctggatattttacgggaaagaggtaagctgtctgtcggggacttggctgaactgctctacagagtgaggcgatttgacctgctcaaacgtatcttgaagatggacagaaaagctgtggagacccacctgctcaggaaccctcaccttgtttcggactatagagtgctgatggcagagattggtgaggatttggataaatctgatgtgtcctcattaattttcctcatgaaggattacatgggccgaggcaagataagcaaggagaagagtttcttggaccttgtggttgagttggagaaactaaatctggttgccccagatcaactggatttattagaaaaatgcctaaagaacatccacagaatagacctgaagacaaaaatccagaagtacaagcagtctgttcaaggagcagggacaagttacaggaatgttctccaagcagcaatccaaaagagtctcaaggatccttcaaataacttcaggctccataatgggagaagtaaagaacaaagacttaaggaacagcttggcgctcaacaagaaccagtgaagaaatccattcaggaatcagaagcttttttgcctcagagcatacctgaagagagatacaagatgaagagcaagcccctaggaatctgcctgataatcgattgcattggcaatgagacagagcttcttcgagacaccttcacttccctgggctatgaagtccagaaattcttgcatctcagtatgcatggtatatcccagattcttggccaatttgcctgtatgcccgagcaccgagactacgacagctttgtgtgtgtcctggtgagccgaggaggctcccagagtgtgtatggtgtggatcagactcactcagggctccccctgcatcacatcaggaggatgttcatgggagattcatgcccttatctagcagggaagccaaagatgttttttattcagaactatgtggtgtcagagggccagctggaggacagcagcctcttggaggtggatgggccagcgatgaagaatgtggaattcaaggctcagaagcgagggctgtgcacagttcaccgagaagctgacttcttctggagcctgtgtactgcggacatgtccctgctggagcagtctcacagctcaccgtccctgtacctgcagtgcctctcccagaaactgagacaagaaagaaaacgcccactcctggatcttcacattgaactcaatggctacatgtatgattggaacagcagagtttctgccaaggagaaatattatgtctggctgcagcacactctgagaaagaaacttatcctctcctacacataa

SEQ ID NO: 2715 - DNA, 1002 bp, Homo sapiens
accttggactgaaccactattgaagatttatttgataataatttgtaagttttaactcagtacctcccttctgcttttatagttcaaggagcagggacaagttacaggaatgttctccaagcagcaatccaaaagagtctcaaggatccttcaaataacttcaggctccataatgggagaagtaaagaacaaagacttaaggaacagcttggcgctcaacaagaaccagtgaagaaatccattcaggaatcagaagcttttttgcctcagagcatacctgaagagagatacaagatgaagagcaagcccctaggaatctgcctgataatcgattgcattggcaatgagacagagcttcttcgagacaccttcacttccctgggctatgaagtccagaaattcttgcatctcagtatgcatggtatatcccagattcttggccaatttgcctgtatgcccgagcaccgagactacgacagctttgtgtgtgtcctggtgagccgaggaggctcccagagtgtgtatggtgtggatcagactcactcagggctccccctgcatcacatcaggaggatgttcatgggagattcatgcccttatctagcagggaagccaaagatgttttttattcagaactatgtggtgtcagagggccagctggaggacagcagcctcttggaggtggatgggccagcgatgaagaatgtggaattcaaggctcagaagcgagggctgtgcacagttcaccgagaagctgacttcttctggagcctgtgtactgcggacatgtccctgctggagcagtctcacagctcaccatccctgtacctgcagtgcctctcccagaaactgagacaagaaagaaaacgcccactcctggatcttcacattgaactcaatggctacatgtatgattggaacagcagagtttctgccaaggagaaatattatgtctggctgcagcacactctgagaaagaaacttatcctctcctacacataa

SEQ ID NO: 2716 - DNA, 1350 bp, Homo sapiens
atgtctgctgaagtcatccatcaggttgaagaagcacttgatacagatgagaaggagatgctgctctttttgtgccgggatgttgctatagatgtggttccacctaatgtcagggaccttctggatattttacgggaaagaggtaagctgtctgtcggggacttggctgaactgctctacagagtgaggcgatttgacctgctcaaacgtatcttgaagatggacagaaaagctgtggagacccacctgctcaggaaccctcaccttgtttcggactatagagtgctgatggcagagattggtgaggatttggataaatctgatgtgtcctcattaattttcctcatgaaggattacatgggccgaggcaagataagcaaggagaagagtttcttggaccttgtggttgagttggagaaactaaatctggttgccccagatcaactggatttattagaaaaatgcctaaagaacatccacagaatagacctgaagacaaaaatccagaagtacaagcagtctgttcaaggagcagggacaagttacaggaatgttctccaagcagcaatccaaaagagtctcaaggatccttcaaataacttcaggctccataatgggagaagtaaagaacaaagacttaaggaacagcttggcgctcaacaagaaccagtgaagaaatccattcaggaatcagaagcttttttgcctcagagcatacctgaagagagatacaagatgaagagcaagcccctaggaatctgcctgataatcgattgcattggcaatgagacagagcttcttcgagacaccttcacttccctgggctatgaagtccagaaattcttgcatctcagtatgcatggtatatcccagattcttggccaatttgcctgtatgcccgagcaccgagactacgacagctttgtgtgtgtcctggtgagccgaggaggctcccagagtgtgtatggtgtggatcagactcactcagggctccccctgcatcacatcaggaggatgttcatgggagattcatgcccttatctagcagggaagccaaagatgttttttattcagaactatgtggtgtcagagggccagctggaggacagcagcctcttggaggtggatgggccagcgatgaagaatgtggaattcaaggctcagaagcgagggctgtgcacagttcaccgagaagctgacttcttctggagcctgtgtactgcggacatgtccctgctggagcagtctcacagctcaccgtccctgtacctgcagtgcctctcccagaaactgagacaagaaagaaaacgcccactcctggatcttcacattgaactcaacggcctttag

SEQ ID NO: 2717 - DNA, 1361 bp, Homo sapiens
gcctctagatgcatgctcgagcggccgccagtgtgctctaaagtagatgtggttccacctaatgtcagggaccttctggatattttacgggaaagaggtaagctgtctgtcggggacttggctgaactgctctacagagtgaggcgatttgacctgctcaaacgtatcttgaagatggacagaaaagctgtggagacccacctgctcaggaaccctcaccttgtttcggactatagagtgctgatggcagagattggtgaggatttggataaatctgatgtgtcctcattaattttcctcatgaaggattacatgggccgaggcaagataagcaaggagaagagtttcttggaccttgtggttgagttggagaaactaaatctggttgccccagatcaactggatttattagaaaaatgcctaaagaacatccacagaatagacctgaagacaaaaatccagaagtacaagcagtctgttcaaggagcagggacaagttacaggaatgttctccaagcagcaatccaaaagagtctcaaggatccttcaaataacttcaggctccataatgggagaagtaaagaacaaagacttaaggaacagcttggcgctcaacaagaaccagtgaagaaatccattcaggaatcagaagcttttttgcctcagagcatacctgaagagagatacaagatgaagagcaagcccctaggaatctgcctgataatcgattgcattggcaatgagacagagcttcttcgagacaccttcacttccctgggctatgaagtccagaaattcttgcatctcagtatgcatggtatatcccagattcttggccaatttgcctgtatgcccgagcaccgagactacgacagctttgtgtgtgtcctggtgagccgaggaggctcccagagtgtgtatggtgtggatcagactcactcagggctccccctgcatcacatcaggaggatgttcatgggagattcatgcccttatctagcagggaagccaaagatgttttttattcagaactatgtggtgtcagagggccagctggaggacagcagcttcttggaggtggatgggccagcgatgaagaatgtggaattcaaggctcagaagcgagggctgtgcacagttcaccgagaagctgacttcttctggagcctgtgtactgcggacatgtccctgctggagcagtctcacagctcaccgtccctgtacctgcagtgcctctcccagaaactgagacaagaaagaaaacgcccactcctggatcttcacattgaactcaatggctacatgtatgattctttagagcacactggcggccgttactagtggatccgagctcggtacca

SEQ ID NO: 2718 - DNA, 1047 bp, Homo sapiens
atggcagagattggtgaggatttggataaatctgatgtgtcctcattaattttcctcatgaaggattacatgggccgaggcaagataagcaaggagaagagtttcttggaccttgtggttgagttggagaaactaaatctggttgccccagatcaactggatttattagaaaaatgcctaaagaacatccacagaatagacctgaagacaaaaatccagaagtacaagcagtctgttcaaggagcagggacaagttacaggaatgttctccaagcagcaatccaaaagagtctcaaggatccttcaaataacttcagggaagaaccagtgaagaaatccattcaggaatcagaagcttttttgcctcagagcatacctgaagagagatacaagatgaagagcaagcccctaggaatctgcctgataatcgattgcattggcaatgagacagagcttcttcgagacaccttcacttccctgggctatgaagtccagaaattcttgcatctcagtatgcatggtatatcccagattcttggccaatttgcctgtatgcccgagcaccgagactacgacagctttgtgtgtgtcctggtgagccgaggaggctcccagagtgtgtatggtgtggatcagactcactcagggctccccctgcatcacatcaggaggatgttcatgggagattcatgcccttatctagcagggaagccaaagatgttttttattcagaactatgtggtgtcagacggccagctggaggacagcagcctcttggaggtggatgggccagcgatgaagaatgtggaattcaaggctcagaagcgagggctgtgcacagttcaccgagaagctgacttcttctggagcctgtgtactgcggacatgtccctgctggagcagtctcacagctcaccgtccctgtacctgcagtgcctctcccagaaactgagacaagaaagggggacaattcccggaagtggaattacagagtcaaaggacatgcatttttcaagcctcggatgcatcttactagatgtcctatag

SEQ ID NO: 2719 - DNA, 3024 bp, Homo sapiens
atggaagttttccccttgctcttggttttgtccgtctggtggtctcgaacctgggactcggcgaatgcggattcgatcattcacatcggagcaatttttgatgaatctgccaaaaaggatgatgaggtatttcgcactgcggttggtgaccttaaccagaatgaagagatcttacagactgagaaaatcacattttcagtgacgtttgttgatggcaacaaccctttccaagcagttcaagaagcctgtgaacttatgaatcaaggcatcttggccctggtcagctccattggctgcacgtcagcaggatccctccagtctttggcagacgccatgcatatcccccacctcttcattcagcgctcaacagctgggaccccaaggagtggctgtggactcacccggagcaacaggaatgatgactacactctctcagttcgcccacctgtctacttgcatgatgttatcctaagagtggtcacagagtatgcctggcagaaattcattatattctatgatagtgaatacgatatccgtggaatacaggagttcttggacaaagtctctcagcagggaatggatgttgcacttcagaaggtagaaaacaacatcaataaaatgattaccactctctttgacaccatgagaatagaagaactgaatcgctatcgagacactcttaggcgagcgatccttgttatgaatcctgctacagccaaatccttcattactgaggttgtggagactaatttggttgcttttgactgtcactggatcattataaatgaggaaataaacgatgtggacgtacaggaacttgtaagaaggtcaattggaaggttaacgattattcggcagacatttccaattccccagaacataagtcagcggtgtttccgtggcaaccatcgaatatcttcaacattgtgtgatccaaaggatccatttgctcagaatatggagatttccaacctttacatatatgacacggtgcttctgcttgctaatgcttttcataagaagctggaggaccgaaagtggcacagcatggcaagtctgtcatgtatcagaaagaactcaaagccctggcagggtgggcgctccatgttggagaccatcaagaagggtggagttagtgggttgactggagagctagaatttggagaaaatggaggcaatcccaatgtccactttgaaatccttggaaccaactatggagaagagcttggcagaggtgttcgaaaacttgggtgctggaatcctgtcacaggtctgaatgggtcactgactgacaagaaattggagaataacatgcgtggagtggttctacgtgtagtaactgttctggaagaaccttttgtgatggtctctgaaaatgtcttgtgtaagccgaagaaataccagggcttctccattgatgttttggatgccttatctaactacctgggttttaactacgaaatttacgtagcaccggatcacaaatacggaagcccacaagaagatgggacatggaatggcttggtaggagaacttgtctttaagagagccgacatagggatttctgctttaaccatcactccagatcgtgaaaatgtggtggactttacgacacgttacatggactactcagtgggggtactacttcgaagggctgaaaagacagtggatatgtttgcctgtcttgcaccatttgatctctctctatgggcttgcattgctggcacagtccttctggtgggtctactggtctacctcttgaactggcttaatcccccacgattacaaatgggatcaatgacgtctactactctctacaactccatgtggtttgtgtatggatcttttgtacaacaaggcggggaagtcccgtacacgactctggctacccgaatgatgatgggggcttggtggctatttgctttgattgttatctcatcttacacggcaaacctcgctgctttcctcactattacacgcattgaaagttccatccagtctctccaggacctttccaagcaaacagaaatcccttatggcacagtcctagactctgcggtatatgagcatgtccgcatgaaaggactgaatccttttgagagggacagcatgtattcccaaatgtggcggatgatcaaccgaagcaatggatcggagaacaatgttctggagtcccaggcaggcattcaaaaggtaaaatatggaaattatgctttcgtatgggatgcagctgtattggaatatgtggctatctatgacccagattgttccttttacaccattggaaatactgttgctgatcggggatatggaattgcattacaacatggcagtccttaccgagatgttttttcacaaaggatcctggagcttcagcagaatggtgacatggacatcctgaagcacaaatggtggcctaagaatggccagtgtgacctgtactcgtcagtggacacaaagcagaaaggaggcgccctggacataaagagctttgcaggggtcttttgtatcctggctgctggaattgtcctctcctgcttcatagccatgctggagacgtggtggaacaagaggaaaggctcccgggttccatcaaaagaggatgacaaggaaattgacctggagcacctccatagacgtgtaaatagcttgtgcacagatgacgacagcccccataaacagttttccacctcgtcaattgatttgacccctctggacattgacactttgccaacacgacaagcactggagcaaatcagtgatttcaggaacactcatattaccacaacaacctttatcccagagcagatccagactcttagccgcacactgtcagctaaagctgcttctggtttcacttttggcaacgtgcctgagcaccgaactggcccttttaggcacagggcacctaatgggggctttttcaggagtcctataaaaacaatgtcatctattccttatcaaccaactcctaccctggggctcaatctgggtaatgatccagaccgaggcacctccatatga

SEQ ID NO: 2720 - DNA, 1719 bp, Homo sapiens
gaattctttagtaggggcggagtctgctgctgccctgcgctgccacctcggctacactgccctccgcgacgacccctgaccagccggggtcacgtccgggagacgggatcatgaagcgctcggtagccgtctggctcttggtcgggctcagcctcggtgtcccccagttcggcaaaggtgatatttgtgatcccaatccatgtgaaaatggaggtatctgtttgccaggattggctgatggttccttttcctgtgagtgtccagatggcttcacagaccccaactgttctagtgttgtggaggttgcatcagatgaagaagaaccaacttcagcaggtccctgcactcctaatccatgccataatggaggaacctgtgaaataagtgaagcataccgaggggatacattcataggctatgtttgtaaatgtccccgaggatttaatgggattcactgtcagcacaacataaatgaatgcgaagttgagccttgcaaaaatggtggaatatgtacagatcttgttgctaactattcctgtgagtgcccaggcgaatttatgggaagaaattgtcaatacaaatgctcaggcccactgggaattgaaggtggaattatatcaaaccagcaaatcacagcttcctctactcaccgagctctttttggactccaaaaatggtatccctactatgcacgtcttaataagaaggggcttataaatgcgtggacagctgcagaaaatgacagatggccgtggattcagataaatttgcaaaggaaaatgagagttactggtgtgattacccaaggagccaagaggattggaagcccagagtatataaaatcctacaaaattgcctacagtaatgatggaaagacttgggcaatgtacaaagtgaaaggcaccaatgaagacatggtgtttcgtggaaacattgataacaacactccatatgctaactctttcacaccccccataaaagctcagtatgtaagactctatccccaagtttgtcgaagacattgcactttgcgaatggaacttcttggctgtgaactgtcgggttgttctgagcctctgggtatgaaatcaggacatatacaagactatcagatcactgcctccagcatcttcagaacgctcaacatggacatgttcacttgggaaccaaggaaagctcggctggacaagcaaggcaaagtgaatgcctggacctctggccacaatgaccagtcacaatggttacaggtggatcttcttgttccaaccaaagtgactggcatcattacacaaggagctaaagattttggtcatgtacagtttgttggctcctacaaactggcttacagcaatgatggagaacactggactgtataccaggatgaaaagcaaagaaaagataaggttttccagggaaattttgacaatgacactcacagaaaaaatgtcatcgaccctcccatctatgcacgacacataagaatccttccttggtcctggtacgggaggatcacattgcggtcagagctgctgggctgcacagaggaggaatgaggggaggctacatttcacaaccctcttccctatttccctaaaagtatctccatggaatgaactgtgcaaaatctgtaggaaactgaatggtttttttttttttttcatgaaaaagtgctcaaattatggtaggcaactaacggtgtttttaagggggccggaattc

SEQ ID NO: 2721 - DNA, 5482 bp, Homo sapiens
cgggcagcgcagcccgcagaggcgctgcggcccgtgcagccccggaggcccctcgcggagaaggcggcggcggaggagaggccgagttaccgcccgccgcccgcgcccccccaaccccgccgccgccgccgccgccgccactgccccccctccccgcggcgccgcatcttgaatggaaacatggcggtgccggctcggacctgcggcgcctctcggcccggcccagcgcggactgcgcgcccctggcccggctgcggcccccaccctggccccggcacccggcgcccgacgtccgggcccccgcgcccgctgtggctgctgctgccgcttctaccgctgctcgccgcccccggcgcctctgcctacagcttcccccagcagcacacgatgcagcactgggcccggcgtctggagcaggaggtcgacggcgtgatgcggatttttggaggcgtccagcagctccgtgagatttacaaggacaaccggaacctgttcgaggtacaggagaatgagcctcagaagttggtggagaaggtggcaggggacattgagagccttctggacaggaaggtgcaggccctgaagagactggctgatgctgcagagaacttccagaaagcacaccgctggcaggacaacatcaaggaggaagacatcgtgtactatgacgccaaggctgacgctgagctggacgaccctgagagtgaggatgtggaaagggggtctaaggccagcaccctaaggctggacttcatcgaggacccaaacttcaagaacaaggtcaactattcatacgcggctgtacagatccctacggacatctacaaaggctccactgtcatcctcaatgagctcaactggacagaggccctggagaatgtgttcatggaaaaccgcagacaagaccccacactgctgtggcaggtcttcggcagcgccacaggagtcactcgctactacccggccaccccgtggcgagcccccaagaagatcgacctgtacgatgtccgaaggagaccctggtatatccagggggcctcgtcacccaaagacatggtcatcatcgtggatgtgagtggcagtgtgagcggcctgaccctgaagctgatgaagacatctgtctgcgagatgctggacacgctgtctgatgatgactatgtgaatgtggcctcgttcaacgagaaggcacagcctgtgtcatgcttcacacacctggtgcaggccaatgtgcgcaacaagaaggtgttcaaggaagctgtgcagggcatggtggccaagggcaccacaggctacaaggccggctttgagtatgcctttgaccagctgcagaactccaacatcactcgggccaactgcaacaagatgatcatgatgttcacggatggtggtgaggaccgcgtgcaggacgtctttgagaagtacaattggccaaaccggacggtgcgcgtgtttactttctccgtggggcagcataactatgacgtcacaccgctgcagtggatggcctgtgccaacaaaggctactattttgagatcccttccatcggagccatccgcatcaacacacaggaatatctagatgtgttgggcaggcccatggtgctggcaggcaaggaggccaagcaggttcagtggaccaacgtgtatgaggatgcactgggactggggttggtggtaacagggaccctccctgttttcaacctgacacaggatggccctggggaaaagaagaaccagctgatcctgggcgtgatgggcattgacgtggctctgaatgacatcaagaggctgacccccaactacacgcttggagccaacggctatgtgtttgccattgacctgaacggctacgtgttgctgcaccccaatctcaagccccagaccaccaacttccgggagcctgtgactctggacttcctggatgcggagctagaggatgagaacaaggaagagatccgtcggagcatgattgatggcaacaagggccacaagcagatcagaacgttggtcaagtccctggatgagaggtacatagatgaggtgacacggaactacacctgggtgcctataaggagcactaactacagcctggggctggtgctcccaccctacagcaccttctacctccaagccaatctcagtgaccagatcctgcaggtcaagtattttgagttcctgctccccagcagctttgagtctgaaggacacgttttcattgctcccagagagtactgcaaggacctgaatgcctcagacaacaacaccgagttcctgaaaaactttattgagctcatggagaaagtgactccagactccaagcagtgcaacaacttccttctgcacaacctgatcttggacacgggcatcacgcagcagctggtagagcgtgtgtggagggaccaggatctcaacacgtacagcctactggccgtgttcgctgccacagacggtggcatcacccgagtcttccccaacaaggcagctgaggactggacagagaaccctgagcccttcaatgccagcttctaccgccgcagcctggataaccacggttatgtcttcaagcccccacaccaggatgccctgttaaggccgctggagctggagaatgacactgtgggcatcctcgtcagcacagctgtggagctcagcctaggcaggcgcacactgaggccagcagtggtgggcgtcaagctggacctagaggcttgggctgagaagttcaaggtgctagccagcaaccgtacccaccaagaccagcctcagaagtgcggccccaacagccactgtgagatggactgcgaggttaacaatgaggacttactctgtgtcctcattgatgatggaggattcctggtgctgtcaaaccagaaccatcagtgggaccaggtgggcaggttcttcagtgaggtggatgccaacctgatgctggcactctacaataactccttctacacccgcaaggagtcctatgactatcaggcagcctgtgcccctcagccccctggcaacctgggtgctgcaccccggggtgtctttgtgcccaccgttgcagatttccttaacctggcctggtggacctctgctgccgcctggtccctgttccagcagcttctctacggcctcatctaccacagctggttccaagcagaccccgcggaggccgaggggagccccgagacgcgcgagagcagctgcgtcatgaaacagacccagtactacttcggctcggtaaacgcctcctacaacgccatcatcgactgcggaaactgctccaggctgttccacgcgcagagactgaccaacaccaatcttctctttgtggtggccgagaagccgctgtgcagccagtgcgaggctggccggctgctgcagaaggagacgcactgcccagcggacggcccggagcagtgtgagctagtgcagagaccgcgataccggagaggcccgcacatctgcttcgactacaacgcgacagaagatacctcagactgtggccgcggggcctccttcccgccgtcgctgggcgtcctggtctccctgcaactgctgctcctcctgggcctgccgccccggccgcagcctcaagtcctcgtccacgcctctcgccgcctctgagcaccctgccccaccccacctccactcccacctcacccggcctcttcgcctttcccaccctcctgccccacactccccgccttagagcctcgtccctccctcactgaaggacctgagctggccaggccctgagagtctggtctgcgccttgggatggggagtcccaaagcgggacgccgcaggtgtttggcacccaaatcacatctcacctccgaactgttcaagtgtccccagacccttcttgcctgctgggctccccccagtgggatgggacagggaggccacacgcactggtgccaaaaccaggcctctgctgccgcccttcctggaggctgcctatgttgggggggaccctgcctcagctgacccggcctctctgccccacccaagcccaaacttggtttctgtgagaatagtggaggaaggtgagatggccagtttgaagcctgtgcctcccagcttaaatcctagcaggagagaggctctggggcagcccccatgggctcctgcccctttcaggcctacagccacatccccaagcccaccaggtgtcaggatagtcacagtgataccagttcagacactaccccatatacacctggaacattgaggatggaaactggactcacattcgacataccccactgggcacacgcacaaacacacacactatggggtggggtgggtgtaggggcttacaaagccttacacagggcgaggggttggtgggagggttggcacctgcacactccatctcctgctcaccacctgcctctaatctgagctgcagcctggctggtcctcccatttctaaagctgaatgtcaaacagtgccaaatgctggggcagggggtgaagaaccctctgtcccacccctagccaccagtgtcctccaagtgccccctcacctctccaggtgctcattgtaaccatttctcactagtgtcaggcccccagtgggaccacatgccactgcctgcacctttcggcagaggaacccccaccagacatcaccctttgccttagcaggggtgactttgtctctcctggctgggccatccttccgccaatctggcccttacacactcaggcctgtgcccactccctatctccttcccacccctacacacacactccctgcttgcaggaggccaaactgtccctcccttgctgaacacacacacacacacacacacacaggtggggactgggcacagctcttcacaccattcattctggtcatttcccccaaaggcatcccagcctgggggccagtggggaactgagggcaaggggatatagtgatggggctcagatggactgggaggagggggagggtgatgcattaattaatggcttcgttaattaatgtcatgttgcttgtcgctttctcagtgtgtgtgtgtggtccatgcccactgctggtgccagggtgggtgtccatgtgcacccggcctggatgccagctgtgtccttcgggggcgtgcgtgtaactgtagtgtagtcaggtgctcaatggagaatataaacatatacagaaaaatatatattttaagtttaaaaaacagaaaaacagacaaaacaatccccatcaggtagctgtctaacccccagctgggtctaatccttctcattacccacccgacctggctgcccctcaccttgggctgggggactggggggccatttccttttctctgccctttttttgttgttctattttgtacagacaagttggaaaaacaacagcgacaaaaaagtcaagaaactttgtaaaatatcgtgtgtgtgattccttgtaaaatattttcaaatggtttattacagaagatcagttattaaataatgttcatattttcacttc

SEQ ID NO: 2722 - DNA, 615 bp, Homo sapiens
acagaagtccactcattcttggcaggatggcttctcatcgtctgctcctcctctgccttgctggactggtatttgtgtctgaggctggccctacgggcaccggtgaatccaagtgtcctctgatggtcaaagttctagatgctgtccgaggcagtcctgccatcaatgtggccatgcatgtgttcagaaaggctgctgatgacacctgggagccatttgcctctgggaaaaccagtgagtctggagagctgcatgggctcacaactgaggaggaatttgtagaagggatatacaaagtggaaatagacaccaaatcttactggaaggcacttggcatctccccattccatgagcatgcagaggtggtattcacagccaacgactccggcccccgccgctacaccattgccgccctgctgagcccctactcctattccaccacggctgtcgtcaccaatcccaaggaatgagggacttctcctccagtggacctgaaggacgagggatgggatttcatgtaaccaagagtattccatttttactaaagcagtgttttcacctcatatgctatgttagaagtccaggcagagacaataaaacattcctgtgaaaggc

SEQ ID NO: 2723 - DNA, 4648 bp, Homo sapiens
gaatgcaggtgagaaaaggcacggactctgcggctgcgaacccaaacttgggcaccgcacggtgcgcactgctcagccttcgcccccgtgggcgaaaggctgctgcggtttcaggcggctgcttcgtgactaatgaccttgcgcagagttgttaagaaaaaagagaaacccgcgctctccggggtgagaagggactgactctgggcgtctctgaagatggctcgggcttctctttggcgcgccggggggaccctgacactgaccgctctgtgacgcgagtagtctcccctgcaccgtgcccgaagcgacgtgccgggggatttttcattctcgatctgttgactggctcccccgctgcatgagcagatcggagttgagactggcttgttgctggccccagcgcctggtgcaggaagcgactcacgtttgtctgggtggccggagccggagccggagcagagctgggctttggagtgagtgcctggaacgtgaattggactcaactcgagtagcagcaaagaccagcgggctggcaggcgggggaggctgcaggctcattccccacctcttcccagccccactgcccgtctgccggagcggttctggccccttccgacagagcggggactagagccggggattctccgcccgctgaggggatgactctgggttgggggagcgccgaacccgcggcgcgcagtgtcccgtgaactgtgagtactgcgactgaacggcggcaggcgagcgggcgattagcacccattgcatgaattatgaaacaataactttcggaagaagcaggaggaaaaaaagaagcatctatcgctgccctcccacccccattcccggccaactctccacgccgcttttgccccctccctcccctccctctcgctccttcctttccgggagaggggagaggactcgggggagggcaggcggccggccccggaggaggggggcgccgagggggctgtggttagaaggagcagtagcagcagcaggagaagatgctgaggatgcggaccgcgggatgggcgcgcggctggtgcttgggctgctgcctcctcctgccgctctcgttcagcctggcggccgccaagcagctcctccggtaccggctggccgaggagggccccgccgacgtccgcatcggcaacgtggcttcagacctgggcatcgtgaccggatcgggtgaggtgactttcagcctggagtccggttccgagtacctgaagatcgacaacctcactggcgagctgagcacgagcgagcggcgcatcgaccgcgagaagctgccccagtgtcagatgatcttcgacgagaacgagtgcttcctggacttcgaggtgtcggtgatcgggccctcgcagagctgggtggacctgtttgagggtcaggtcatcgtgcttgacatcaacgacaacacgcccaccttcccgtcgcccgtgctcacgctcacggtggaggagaatcggccggtgggcacactttacctgctgcccacagccaccgaccgcgacttcggccgcaacggcatcgagcgctacgagctgctccaggagcccggaggcggcggcagcggcggcgagagccggcgcgccggggcggccgacagcgccccctaccccgggggcggcgggaacggcgcgagcggcggcggctcgggaggctccaagcggcggctggacgcatcagagggcggcggcggcaccaaccccggcggccgcagcagcgtgttcgagctgcaggtggcggacaccccggacggcgagaagcagccgcagctgatcgtgaagggggcgctggaccgcgagcagcgcgactcctacgagctgaccctgcgagtgcgcgacggcggcgacccgcctcgctcctcgcaggccatcctacgggtcctcatcaccgacgtgaacgacaacagcccccgcttcgagaagagcgtgtacgaggccgacttggctgagaacagcgccccggggacccccatcctgcaactgcgcgcagccgacttggacgtgggggtcaacgggcagatcgaatacgtgttcggggcggccaccgagtcggtgaggcggctgctgcgccttgacgagacgtccggctggctcagcgtcctgcaccggatcgaccgcgaggaggtgaaccagctgcgcttcacggtcatggcccgcgaccgcgggcagccccccaagaccgacaaggccaccgtggtccttaacatcaaagacgagaacgacaacgtgccgtccattgaaatccgcaagattgggcgcatccccctcaaggacggggtggccaacgtggccgaggacgttctggtcgacacccccatcgctctggtgcaggtgtccgaccgagaccaaggcgagaacggggtggtcacctgcaccgtggtgggcgacgtgcccttccagctcaagccagccagcgacaccgagggcgaccagaacaagaaaaagtacttcttgcacacctcgacccctctggactatgaggccacccgggagttcaacgtggtcatcgtggcggtggactcaggcagccccagcctctcgagcaagaactccctgattgtcaaggtgggagacaccaacgacaacccgcccatgttcggccagtcggtggtggaggtttacttccctgagaacaacatcccgggcgagagggtggccacggtgctggcgacagacgcagacagcggtaagaacgccgagatcgcctactcgctggactcctctgtgatggggatctttgccatcgatcccgattctggggacatcctggtcaataccgtgctggaccgcgagcagactgacaggtatgagtttaaagttaacgccaaagacaaaggcatccccgtgctgcagggcagcactacggtgattgtgcaggtggctgataaaaatgacaatgaccctaagtttatgcaggacgtcttcaccttttatgtgaaagaaaacttgcagcccaacagccctgtggggatggtcaccgtgatggatgctgacaaggggcggaatgcagagatgagcctgtacatagaggagaacaataacattttttctattgaaaatgacacggggaccatttactccacaatgtcttttgaccgggaacatcagaccacatacactttcagagtcaaggctgtggatgggggagatcctcccagatctgccacagctacagtctcgctttttgtgatggatgaaaatgacaatgctcccacagttacccttcccaaaaacatttcctacactttactgccaccttcgagtaatgtcaggacagtagtagctacagtgttggcaacagacagtgatgatggcatcaatgcagacctgaactacagcattgtgggaggaaatcccttcaagctgtttgaaattgatcccactagtggtgtggtttccttagtgggaaaactcacccaaaagcattatggcttgcacaggttggtggtgcaagtgaatgacagtgggcagccttcccagtccaccacgactgtggtgcacgtgtttgtcaatgaaagtgtttctaatgcaactgcgattgactcccagatagctagaagtttgcacatcccactcacccaggatatagctggtgacccaagctatgaaattagcaaacagagactcagtattgtcattggcgtagttgctggcattatgacggtgattctaatcatcttaattgtagtgatggcaaggtactgcaggtccaaaaataaaaatggctatgaagccggcaaaaaagatcacgaagacttttttacaccccaacagcatgacaaatctaaaaagcctaaaaaggacaagaaaaacaaaaaatctaagcagcctctctacagcagcattgtcactgtggaggcttctaagccaaatggacagaggtatgatagtgtcaatgagaagctgtcagacagcccaagcatggggcgatacagatccgttaatggtgggcccggcagtcctgacctggcaaggcattacaaatctagttccccattgcctactgttcagcttcatccccagtcaccaactgcaggaaaaaaacaccaggccgtacaagatctaccaccagccaacacatttgtgggagcaggagacaacatttcaattggatcagatcactgctctgagtacagctgtcaaaccaataacaagtacagcaaacagatgcgtctacatccatacattactgtgtttggctgaattccactctaatatgatgctccattatgcaccatactgtgatgacctttctactccgaaacctgctggagcctgcccttggccgtggggtgtcagccaatcactgcttgttccacttgttgtacattttatttttgagtctttttctttctcatatacagaaaaatagtatgaaaataaaataaatgtatgaaacagtattaatgcagaaatgtgctactaatggatgtctgagtcaccagaaattccattcttaaagaggcggttagcacctattagacgtaacagtgatgtcttttaaaaaatccaaaagcatattgcaacaataagtttgagactttgtgtgaacaaagggaaattcagcctcttatgtctttgtctttaatacattaaatactgattttgaataaaaatctaaattgatcaat

SEQ ID NO: 2724 - DNA, 4040 bp, Homo sapiens
gtcgcctctcacccgccccggccgctccagcccgaggcgccccgaccccgcgccactccgcgcccggccagccgcccgcagccatggggctcctgcccaagctcggcgtgtcccagggcagcgacacctctactagccgagccggccgctgtgcccgctcggtcttcggcaacattaaggtgtttgtgctctgccaaggcctcctgcagctctgccaactcctgtacagcgcctacttcaagagcagcctcaccaccattgagaagcgctttgggctctccagttcttcatcgggtctcatttccagcttgaatgagatcagcaatgccatcctcatcatctttgtcagctactttggcagccgggtgcaccgtccacgtctgattggcatcggaggtctcttcctggctgcaggtgccttcatcctcaccctcccacacttcctctccgagccctaccagtacaccttggccagcactgggaacaacagccgcttgcaggccgagctctgccagaagcattggcaggacctgcctcccagtaagtgccacagcaccacccagaacccccagaaggagaccagcagcatgtggggcctgatggtggttgcccagctgctggctggcatcgggacagtgcctattcagccatttgggatctcctatgtggatgacttctcagagcccagcaactcgcccctgtacatctccatcttatttgccatctctgtatttggaccggctttcgggtacctgctgggctctatcatgctgcagatctttgtggactatggcagggtcaacacagctgcagttaacttggtcccgggtgacccccgatggattggagcctggtggctaggcctgctcatttcttcagctttattggttctcacctctttccccttttttttcttccctcgagcaatgcccataggagcaaagagggctcctgccacagcagatgaagcaaggaagttggaggaggccaagtcaagaggctccctggtggatttcattaaacggtttccatgcatctttctgaggctcctgatgaactcactcttcgtcctggtggtcctggcccagtgcaccttctcctccgtcattgctggcctctccaccttcctcaacaagttcctggagaagcagtatggcacctcagcagcctatgccaacttcctcattggtgctgtgaacctccctgctgcagccttggggatgctgtttggaggaatcctcatgaagcgctttgttttctctctacaaaccattccccgcatagctaccaccatcatcaccatctccatgatcctttgtgttcctttgttcttcatgggatgctccaccccaactgtggccgaagtctacccccctagcacatcaagttctatacatccgcagtctcctgcctgccgcagggactgctcgtgcccagattctatcttccacccggtctgtggagacaatggaatcgagtacctctccccttgccatgccggctgcagcaacatcaacatgagctctgcaacctccaagcaactgatctatttgaactgcagctgtgtgaccgggggatccgcttcagcaaagacaggatcgtgccctgtcccctgtgcccacttcctgctcccggccatcttcctcatctccttcgtgtccctgatagcctgcatctcccacaaccccctctacatgatggttctgcgtgtggtgaaccaggaggaaaagtcatttgccatcggggtgcagttcttgttgatgcgcttgctggcctggctgccatctccagccctctatggcctcaccattgaccactcctgcatccggtggaactcgctgtgcttggggaggcgaggggcctgcgcctactatgacaacgatgctctccgagacaggtacctgggcctgcagatgggctacaaggcgctgggcatgctgctgctttgcttcatcagctggagggtgaagaagaacaaggagtacaacgtgcagaaggcggcaggcctcatctgaccccaccctgggccactgcctgctccagagagtggaccttgactcttccacacctgcctatactcactaatgttaacacgtcatttcctttttgtatttttaaacaagaaagaaaaccccagtcctcatttgccttccctacctcttcctcccagagtcctccccacagttcctaagggccactgtgtacccgggctgtgtgggccagaactggggggctgagtcttccctggccccttggaagaggcccccagatgcccaggctcacttcagtgttgagtcctccattgaggatgcccactgaggcagccaggcccctcaccagccctggggggaatcctaaacagagagagaaaaagggtatctgcccttcttgccaggcagctccactctcccgctgactgcccacaccctgcagagtggcaggggtgaaaggaagaaggaagtggctgagttattaatagccagagccactgggagactggggagactggctgtaacccccttcacacctgggtttggcatcagcacagactacgggaggggctggctccctccccctcagaccctcacttcctgtacctagaggccattctggatgctgccatgttgggaagtacagtctctgcccattacctgcatgcaggcaccagagcagggactgagaaaccccaaggatgggtcatctaagtgctgtccatatgaaccctggactttctgtccttagatcctcacatgttatccctgtctttctggggtacgtttcaaactgaggaagctacaacacagtgaagacccaaggaaggcctatgaaatggtcctgatgcccaacctcccaccccttcaatgtggggacgagaccccctcatctcagagtaatgggaagaacctcccacatctccctggcagcagatgaggtggcttcacatgcacttccctgtctggacttcagcccgtattccgaggagtagagaggcagaagagatgtcagcaaagcaagtgatgaagcagagtggatgtccactgtcaccaagctggatggcaagctgcggcccacaaaacagccagtcaggttggctttcctggtttcagacatgctcataccattcccattttctcagcctcttctctgcctccagagaggtggatgcctgggttgagagacacagctgctacgtgatagatgttgagagacagaagccaacgaaggaggtcattcatcaacaaatatatttattggagaccgactttgtgcaaagcaatgctaatcagggttctccatggagcttccctcagctcttacctcacctccctccatttacattagggccttctcccagggtgtgctcggtgggcagtgtgggactgggggtgtgggagttggtgagagcaggaggagaggtggggacagcaagaagccacagattggcatgaaggatcctgacctgactatccatgccatccatggcccccagactgactctgcacctggccctttgccagacagctctgtctccccatgtcctctggaacagctgggcatgggtcatggccattcatgacccttaagtgccacccttcttggaagaccccctccagaagcatactggaagccacctctggaaaagcctcatatggtgatatgccaaaatatttatgtcaatgtccaaacaaagtccaatgccatgagactgaagtctttgtggaaaccactgttacagacaagcttatttccaaagccacctcatttccaaacatctcactcaggaagggaggctcaatgtaacctcaggggccagttttagcatttgaaatggttctgcttggaaaatgatgccctgcaactaaccctggtctttcccatggcaatttaaccacatttggaaggcactgccttcagctgagtttatgaacaatgaatgccaaccttcaggttctagaagattggttgcactcccaaacctttattctattatattactattaaaatattctaattttgctattgaggtaaaaaaaaaaaaa

SEQ ID NO: 2725 - DNA, 3901 bp, Homo sapiens
cagtttgcaaaagccagaggtgcaagaagcagcgactgcagcagcagcagcagcagcggcggtggcagcagcagcagcagcggcggcagcagcagcagcagcggaggcaccggtggcagcagcagcatcaccagcaacaacaacaaaaaaaaatcctcatcaaatcctcacctaagctttcagtgtatccagatccacatcttcactcaagccaggagagggaaagaggaaaggggggcaggaaaaaaaaaaaacccaacaacttagcggaaacttctcagagaatgctccaaaactcagcagtgcttctggtgctggtgatcagtgcttctgcaacccatgaggcggagcagaatgactctgtgagccccaggaaatcccgagtggcggctcaaaactcagctgaagtggttcgttgcctcaacagtgctctacaggtcggctgcggggcttttgcatgcctggaaaactccacctgtgacacagatgggatgtatgacatctgtaaatccttcttgtacagcgctgctaaatttgacactcagggaaaagcattcgtcaaagagagcttaaaatgcatcgccaacggggtcacctccaaggtcttcctcgccattcggaggtgctccactttccaaaggatgattgctgaggtgcaggaagagtgctacagcaagctgaatgtgtgcagcatcgccaagcggaaccctgaagccatcactgaggtcgtccagctgcccaatcacttctccaacagatactataacagacttgtccgaagcctgctggaatgtgatgaagacacagtcagcacaatcagagacagcctgatggagaaaattgggcctaacatggccagcctcttccacatcctgcagacagaccactgtgcccaaacacacccacgagctgacttcaacaggagacgcaccaatgagccgcagaagctgaaagtcctcctcaggaacctccgaggtgaggaggactctccctcccacatcaaacgcacatcccatgagagtgcataaccagggagaggttattcacaacctcaccaaactagtatcattttaggggtgttgacacaccaattttgagtgtactgtgcctggtttgatttttttaaagtagttcctattttctatcccccttaaagaaaattgcatgaaactaggcttctgtaatcaatatcccaacattctgcaatggcagcattcccaccaacaaaatccatgtgatcattctgcctctcctcaggagaaagtaccctcttttaccaacttcctctgccatgtcttttcccctgctcccctgagaccacccccaaacacaaaacattcatgtaactctccagccattgtaatttgaagatgtggatccctttagaacggttgccccagtagagttagctgataaggaaactttatttaaatgcatgtcttaaatgctcataaagatgttaaatggaattcgtgttatgaatctgtgctggccatggacgaatatgaatgtcacatttgaattcttgatctctaatgagctagtgtcttatggtcttgatcctccaatgtctaattttctttccgacacatttaccaaattgcttgagcctggctgtccaaccagactttgagcctgcatcttcttgcatctaatgaaaaacaaaaagctaacatctttacgtactgtaactgctcagagctttaaaagtatctttaacaattgtcttaaaaccagagaatcttaaggtctaactgtggaatataaatagctgaaaactaatgtactgtacataaattccagaggactctgcttaaacaaagcagtatataataactttattgcatatagatttagttttgtaacttagctttatttttcttttcctgggaatggaataactatctcacttccagatatccacataaatgctccttgtggccttttttataactaagggggtagaagtagttttaattcaacatcaaaacttaagatgggcctgtatgagacaggaaaaaccaacaggtttatctgaaggaccccaggtaagatgttaatctcccagcccacctcaacccagaggctactcttgacttagacctatactgaaagatctctgtcacatccaactggaaattccaggaaccaaaaagagcatccctatgggcttggaccacttacagtgtgataaggcctactatacattaggaagtggtagttctttactcgtcccctttcatcggtgcctggtactctggcaaatgatgatggggtgggagactttccattaaatcaatcaggaatgagtcaatcagcctttaggtctttagtccgggggacttggggctgagagagtataaataaccctgggctgtccagccttaatagacttctcttacattttcgtcctgtagcacgctgcctgccaaagtagtcctggcagctggaccatctctgtaggatcgtaaaaaaatagaaaaaaagaaaaaaaaaagaaagaaagagggaaaaagagctggtggtttgatcatttctgccatgatgtttacaagatggcgaccaccaaagtcaaacgactaacctatctatgaacaacagtagtttctcagggtcactgtccttgaacccaacagtcccttatgagcgtcactgcccaccaaaggtcaatgtcaagagaggaagagagggaggaggggtaggactgcaggggccactccaaactcgcttaggtagaaactattggtgctcgactctcactaggctaaactcaagatttgaccaaatcgagtgatagggatcctggtgggaggagagagggcacatctccagaaaaatgaaaagcaatacaactttaccataaagcctttaaaaccagtaacgtgctgctcaaggaccaagagcaattgcagcagacccagcagcagcagcagcagcacaaacattgctgcctttgtccccacacagcctctaagcgtgctgacatcagattgttaagggcatttttatactcagaactgtcccatccccaggtccccaaacttatggacactgccttagcctcttggaaatcaggtagaccatattctaagttagactcttcccctccctcccacacttcccacccccaggcaaggctgacttctctgaatcagaaaagctattaaagtttgtgtgttgtgtccattttgcaaacccaactaagccaggaccccaatgcgacaagtagttcatgagtattcctagcaaatttctctctttcttcagttcagtagatttccttttttcttttcttttttttttttttttttttttggctgtgacctcttcaaaccgtggtacccccccttttctccccacgatgatatctatatatgtatctacaatacatatatctacacatacagaaagaagcagttctcacatgttgctagttttttgcttctctttcccccaccctactccctccaattccccccttaaacttccaaagcttcgtcttgtgtttgctgcagagtgattcgggggctgacctagaccagtttgcatgattcttctcttgtgatttggttgcactttagacatttttgtgccattatatttgcattatgtatttataatttaaatgatatttaggtttttggctgagtactggaataaacagtgagcatatctggtatatgtcattatttattgttaaattacattttttaagctccatgtgcatataaaggttatgaaacatatcatggtaatgacagatgcaagttattttatttgcttattttttataattaaagatgccatagcataatatgaagcctttggtgaattccttctaagataaaaataataataaagtgttacgttttattggtttcaaaaaaaaaaaaaaaaaaaa

SEQ ID NO: 2726 - DNA, 3158 bp, Homo sapiens
cctcgctcccggaccccacggctgcaaactgatctggcgcgcggggaggaggagagcgcaggcgagcgaacccgcgagagagggagagagcgagcgagcaacagcgagagcgagagcgagagagccgggaggcagagggagtagtgaccgccttccggagccgggattcatgcctgtcctcgggaccagcgaaggggactttacggctgagtatgagccaggctgctaggagccaggtacccccacgcctgcagtccccgcgccgtgcccggaatgcgagctggacgcagggctctcccaagttcccaccgagccgaataaaaagcgtccgcccgcagctctccgccaaagacggacattgactccaggactccacagaatggagcaagaatgagaggaaaaaggccggcagaaaagcatgaactggaggtttgttgagctcctctacttcctgtttatatggggccgtatctcagtgcagccctcccaccaggaaccagctgggacagaccaacatgtctccaaggaatttgattggctcatttcagacagggggcctttccaccactccaggagctacctatcctttgtggaaagacaccgtcaaggatttacaaccagatataaaatatacagggagtttgcccgttggaaggtgaggaacacagccatcgagaggagagatctggtccgccatccagtgcccctcatgccggagtttcaaaggagcatccgcctgcttggcaggagacctaccactcagcagttcatcgataccatcatcaaaaagtacggcacccacctgctcatctcagccacattgggaggggaggaggctttgaccatgtatatggacaaaagtcgcctcgacaggaagtcagggaatgccactcaaagtgttgaagctctgcaccagctcgcatcatcctactttgttgaccgtgatggtaccatgaggaggcttcatgagatccagatatcaactggagcaatcaaggtcacagagacacgcactgggcctctgggctgtaacagttatgacaatctggactctgtgagttccgtccttctgcaaagcacggagagcaaactgcaccttcaaggtcttcagataatctttcctcagtatctgcaagagaagtttgtccagtcggccttgagctatatcatgtgcaatggggagggggagtacctgtgccagaacagccagtgtcgctgccaatgtgccgaggagtttccgcagtgcaactgccccatcacggacatccagatcatggagtacacgctggccaacatggccaagtcttgggccgaagcttataaggacctggagaattcagatgagtttaaatcatttatgaagcgcctccccagcaaccacttcctgaccatcggaagcatccatcagcactggggcaatgactgggacctgcagaaccgctacaagctcctgcagagtgccacggaggcacagagacaaaagatccaacgcactgcccgcaagcttttcggcctcagtgtacgctgtcgccacaatcccaaccaccagctgcctagagagaggacaattcagcagtggcttgcaagggtccagtcactcctctactgtaatgagaatgggttttggggaaccttcctggagagccagcggagctgcgtgtgccacggcagcaccacgctgtgccagcgccccatcccctgcgtgataggcgggaacaacagctgcaccatgtgcagcctggccaacatctccctctgtggctcctgcaacaagggctacaagctgtatcgaggccgctgtgaaccacagaacgtggactcggagcggagcgagcagttcatcagctttgagactgacctggacttccaggacctggagctgaagtacctgctgcagaagatggactcacgcctctacgtccacaccaccttcatcagcaacgagatccgcctcgacaccttctttgaccctcggtggcgcaagcgcatgtccctcactctcaagagcaacaagaaccgcatggacttcatccacatggtgatcggcatgtccatgcgcatctgccagatgcgcaacagcagcctggaccccatgttctttgtctatgtcaacccctttagcgggagccattcggagggctggaacatgcccttcggggaatttggctacccacgctgggagaagatccgtctccaaaacagccagtgctacaactggactcttttgctgggcaatcggtggaaaacatttttcgagacggtccacatctacctacgtagtcggactcggctacctaccctactgcgaaatgagactggccagggccccgtggacctgtcggatccctccaagaggcagttctacatcaagatctcagacgtgcaggtgtttgggtatagcctgaggttcaacgccgacctcctgcgcagtgcagtgcagcaggtcaaccagtcctacacacagggcggccagttctattcctcttcgtcagtgatgctcctcttgttggatattcgggaccgaattaatcgcctggcccctcctgtggccccggggaaaccccagctggacttgttctcctgtatgctgaaacaccgcctgaaactgaccaacagcgagatcatcagggtgaaccacgccttggacctgtacaacacggagatcctcaaacagtcggaccagatgacagccaaactctgctaacccgggactccttgccatggacttttcctgttgttgtacacacacaacagaacaaaatgaagcaaaacaaaacaaaaaaacccacaaaaatttgtaaaatgtaattaatattcaaagaaaaggaggaaaatcttcatttgttggaaatgaaaacgttctagcaactgtataaaagcgttgggcatgtttgttatttctatactcactctgtcatgaagaagggtctcagccttttgtggagcattgagggagttgcttcttaggcctcaggtgctgtattgggggagaagggagaaagcatatgcaatgaattgtaaagatctctgctgtgcaggtgctaagattaaacactaaaaagaaagagagatatatgtaatgtacaactgacactgccatttttcctttttggaggaaatggacatagataaagaagatatttcttcggttaagattt

SEQ ID NO: 2727 - DNA, 2084 bp, Homo sapiens
gcggccgcgtcgaccacgcatggagaattttaccacccagagacacgcgagtggccctgtgcaagtttcaactgcgcggggggcggggaattccgcagacaggattctagaatttatgtcttgtgtggtaacatttcagccggtgggtggcggggattaggcgtgaagcggttcagcaggcagaggttctcggacgccctccggcgaagccacctgttgatgcttttgactttctgtccttgttcctcgtcccatctggagcatttccaattctggttttgcggagcagcaggtctgagcttgtccggcgagggtgggagttggtcccggcggagatccagtgggaagagccggcggctgcccgggcaactcccccactggaaaggattctgaaagaaatgaagtcagccctcagaaatgaagttgactgcctgctggctttctgttgactggcccggagctgtactgcaagacccttgtgagcttccctagtctaagagtaggatgtctgctgaagtcatccatcaggttgaagaagcacttgatacagatgagaaggagatgctgctctttttgtgccgggatgttgctatagatgtggttccacctaatgtcagggaccttctggatattttacgggaaagaggtaagctgtctgtcggggacttggctgaactgctctacagagtgaggcgatttgacctgctcaaacgtatcttgaagatggacagaaaagctgtggagacccacctgctcaggaaccctcaccttgtttcggactatagagtgctgatggcagagattggtgaggatttggataaatctgatgtgtcctcattaattttcctcatgaaggattacatgggccgaggcaagataagcaaggagaagagtttcttggaccttgtggttgagttggagaaactaaatctggttgccccagatcaactggatttattagaaaaatgcctaaagaacatccacagaatagacctgaagacaaaaatccagaagtacaagcagtctgttcaaggagcagggacaagttacaggaatgttctccaagcagcaatccaaaagagtctcaaggatccttcaaataacttcaggctccataatgggagaagtaaagaacaaagacttaaggaacagcttggcgctcaacaagaaccagtgaagaaatccattcaggaatcagaagcttttttgcctcagagcatacctgaagagagatacaagatgaagagcaagcccctaggaatctgcctgataatcgattgcattggcaatgagacagagcttcttcgagacaccttcacttccctgggctatgaagtccagaaattcttgcatctcagtatgcatggtatatcccagattcttggccaatttgcctgtatgcccgagcaccgagactacgacagctttgtgtgtgtcctggtgagccgaggaggctcccagagtgtgtatggtgtggatcagactcactcagggctccccctgcatcacatcaggaggatgttcatgggagattcatgcccttatctagcagggaagccaaagatgttttttattcagaactatgtggtgtcagagggccagctggaggacagcagcctcttggaggtggatgggccagcgatgaagaatgtggaattcaaggctcagaagcgagggctgtgcacagttcaccgagaagctgacttcttctggagcctgtgtactgcggacatgtccctgctggagcagtctcacagctcaccatccctgtacctgcagtgcctctcccagaaactgagacaagaaagaaaacgcccactcctggatcttcacattgaactcaatggctacatgtatgattggaacagcagagtttctgccaaggagaaatattatgtctggctgcagcacactctgagaaagaaacttatcctctcctacacataagaaaccaaaaggctgggcgtagtggctcacacctgtaatcccagcactttgggaggccaaggagggcagatcacttcaggtcaggagttcgagaccagcctggccaacatggtaaacgctgtccctagtaaaaatac

SEQ ID NO: 2728 - DNA, 1389 bp, Homo sapiens
atgtctgctgaagtcatccatcaggttgaagaagcacttgatacagatgagaaggagatgctgctctttttgtgccgggatgttgctatagatgtggttccacctaatgtcagggaccttctggatattttacgggaaagaggtaagctgtctgtcggggacttggctgaactgctctacagagtgaggcgatttgacctgctcaaacgtatcttgaagatggacagaaaagctgtggagacccacctgctcaggaaccctcaccttgtttcggactatagagtgctgatggcagagattggtgaggatttggataaatctgatgtgtcctcattaattttcctcatgaaggattacatgggccgaggcaagataagcaaggagaagagtttcttggaccttgtggttgagttggagaaactaaatctggttgccccagatcaactggatttattagaaaaatgcctaaagaacatccacagaatagacctgaagacaaaaatccagaagtacaagcagtctgttcaaggagcagggacaagttacaggaatgttctccaagcagcaatccaaaagagtctcaaggatccttcaaataacttcaggctccataatgggagaagtaaagaacaaagacttaaggaacagcttggcgctcaacaagaaccagtgaagaaatccattcaggaatcagaagcttttttgcctcagagcatacctgaagagagatacaagatgaagagcaagcccctaggaatctgcctgataatcgattgcattggcaatgagacagagcttcttcgagacaccttcacttccctgggctatgaagtccagaaattcttgcatctcagtatgcatggtatatcccagattcttggccaatttgcctgtatgcccgagcaccgagactacgacagctttgtgtgtgtcctggtgagccgaggaggctcccagagtgtgtatggtgtggatcagactcactcagggctccccctgcatcacatcaggaggatgttcatgggagattcatgcccttatctagcagggaagccaaagatgttttttattcagaactatgtggtgtcagagggccagctggaggacagcagcctcttggaggtggatgggccagcgatgaagaatgtggaattcaaggctcagaagcgagggctgtgcacagttcaccgagaagctgacttcttctggagcctgtgtactgcggacatgtccctgctggagcagtctcacagctcaccgtccctgtacctgcagtgcctctcccagaaactgagacaagaaagggggacaattcccggaagtggaattacagagtcaaaggacatgcatttttcaagcctcggatgcatcttactagatgtcctatag

SEQ ID NO: 2729 - DNA, 879 bp, Homo sapiens
atgtctgctgaagtcatccatcaggttgaagaagcacttgatacagatgagaaggagatgctgctctttttgtgccgggatgttgctatagatgtggttccacctaatgtcagggaccttctggatattttacgggaaagaggtaagctgtctgtcggggacttggctgaactgctctacagagtgaggcgatttgacctgctcaaacgtatcttgaagatggacagaaaagctgtggagacccacctgctcaggaaccctcaccttgtttcggactatagagtgctgatggcagagattggtgaggatttggataaatctgatgtgtcctcattaattttcctcatgaaggattacatgggccgaggcaagataagcaaggagaagagtttcttggaccttgtggttgagttggagaaactaaatctggttgccccagatcaactggatttattagaaaaatgcctaaagaacatccacagaatagacctgaagacaaaaatccagaagtacaagcagtctgttcaaggagcagggacaagttacaggaatgttctccaagcagcaatccaaaagagtctcaaggatccttcaaataacttcaggctccataatgggagaagtaaagaacaaagacttaaggaacagcttggcgctcaacaagaaccagtgaagaaatccattcaggaatcagaagcttttttgcctcagagcatacctgaagagagatacaagatgaagagcaagcccctaggaatctgcctgataatcgattgcattggcaatgagacaggttggagtgcaatggcgcaatctcagctcaccgcaatctccacctcccaggttcaggcgattctcctgcctcagcctcctgagtaa

SEQ ID NO: 2730 - DNA, 2532 bp, Homo sapiens
atgtcccggcccctgtcagaccaagagaaaagaaagcaaatcagtgtgcgtggcctggccggcgtggagaacgtgactgagctgaaaaagaacttcaaccggcacctgcatttcacactcgtaaaggaccgcaatgtggccaccccacgagactactactttgctctggcccataccgtgcgcgaccacctcgtggggcgctggatccgcacgcagcagcactactatgagaaggaccccaagaggatctactacctgtctttagagttctatatgggacggacgctacagaacaccatggtgaacctggccttagagaatgcctgtgacgaggccacctaccagctgggcctggacatggaggagctggaggaaattgaggaggatgcggggctgggcaacgggggcctgggccggctggcagcctgctttcttgactccatggcaacactgggcctggccgcctatggctacgggattcgctatgagtttgggatttttaaccagaagatctccgggggctggcagatggaggaggccgatgactggcttcgctacggcaacccctgggagaaggcccggcccgagttcacgctacctgtgcacttctacggccatgtggagcacaccagccagggtgccaagtgggtggacacacaggtggtactggccatgccctacgatacgcccgtgcctggctatcgcaacaatgttgtcaacaccatgcgcctctggtctgccaaggctcccaatgacttcaacctcaaggacttcaatgtcggtggctacatccaggctgtgttggaccgaaacctggcggagaacatctctcgtgtcctgtaccccaatgataatttcttcgaagggaaggagctgcggctgaagcaggagtatttcgtggtggctgccaccctccaggacatcatccgtcgcttcaagtcttccaagttcggctgccgtgatcccgtgcgcacgaacttcgatgccttcccagataaggtggccatccagctcaatgacacccacccctccctggccatccccgagctgatgaggatcctggtggacctggaacggatggactgggacaaggcgtgggatgtgacagtgaggacctgtgcctacaccaaccacacggtgctgcccgaggccctggagcgctggccggtgcacctcttggagacgctgctgccgcggcacctccagatcatctacgagatcaaccagcgcttcctcaaccgggtggcggccgcattcccaggggacgtagaccggctgcggcgcatgtcgctggtggaggagggcgcagtgaagcgcatcaacatggcacacctgtgcatcgcggggtcgcacgccgtcaacggcgtggcgcgcatccactccgagatcctcaagaagaccatcttcaaagacttctatgagctggagcctcataagttccagaataagaccaacggcatcacccctcggcgctggctggttctgtgtaaccccgggctggcagaggtcattgctgagcgcatcggggaggacttcatctctgacctggaccagctgcgcaaactgctctcctttgtggatgatgaagctttcattcgggatgtggccaaagtgaagcaggaaaacaagttgaagtttgctgcctacctagagagggaatacaaagtccacatcaaccccaactcactcttcgacatccaggtgaagcggattcacgaatataaacgacagctcctcaactgcctccatgtcatcaccctgtacaaccgcatcaagagggagcccaataagttttttgtgcctcggactgtgatgattggagggaaggctgcacctgggtaccacatggccaagatgatcatcagactcgtcacagccatcggggatgtggtcaaccatgacccggcagtgggtgaccgcctccgtgtcatcttcctggagaactaccgagtctcactggccgagaaagtgatcccagctgcagacctctctgagcagatctccactgcgggcactgaagcctcaggcaccggcaacatgaagttcatgctcaacggggctctgaccattggcaccatggacggggccaatgtggagatggcagaagaggcgggagaggaaaacttcttcatctttggcatgcgggtggaggatgtggataagcttgaccaaagagggtacaatgcccaggagtactacgatcgcattcctgagcttcggcaggtcattgagcagctgagcagtggcttcttctcccccaaacagcccgacctgttcaaggacattgtcaatatgctcatgcaccatgaccggtttaaagtcttcgcagattatgaagactacattaaatgccaggagaaagtcagcgccttgtacaagaacccaagagagtggacgcggatggtgatccggaacatagccacctctggcaagttctccagtgaccgcaccattgcccagtatgcccgggagatctggggtgtggagccttcccgccagcgcctgccagccccggatgaggccatctgagcc

SEQ ID NO: 2731 - DNA, 4827 bp, Homo sapiens
gcggtggcgctgcggagacccggtccagacgcctggcggccgccggcacacaaggcgctttctagctccctcccccgagcgcacagcccgcctccttccgcggcgcctgcagtggcaggcttgctctgccctaccgtgacgcgctccggagacgctctgcgggtcctggacaccgggtccgcggcgtggggacgacagacggaggcgaacgccatcggtagccggtccgcgagccatcgttcggggcgcagtcctctccccggctggccctcctttctccggggcattcgccaccgcttccctgggctgagacgaccggttcgtcgcctccttgcccgtgaccgtcgctagaactcagttgtgcgttgcggccagtcgccactgctgagtggaagcaaaatgtcagtcagtgtgcatgagaaccgcaagtccagggccagcagcggctccattaacatctatctgtttcacaagtcctcctacgctgacagcgtcctcactcacctgaatcttttacgccagcagcgtctcttcactgacgtccttctccatgccggaaataggaccttcccttgccaccgggcagtgctggctgcatgcagtcgctactttgaggccatgttcagtggtggcctgaaagagagccaggacagtgaggtcaactttgacaattccatccacccagaagtcttggagctgctgcttgactatgcgtactcctcccgggtcatcatcaatgaagaaaatgcagaatcgctcctggaagctggtgacatgctggagtttcaagacatccgggatgcatgtgcagagttcctggaaaagaacctgcatcccaccaactgcctgggcatgctgctgctgtctgatgcacaccagtgcaccaagctgtacgaactatcttggagaatgtgtctcagcaacttccaaaccatcaggaagaatgaagatttcctccagctgccccaggacatggtagtgcaactcttgtccagtgaagagctggagacagaggatgaaaggcttgtgtacgagtctgcaattaactggatcagctatgacctgaagaagcgctattgctacctcccagaactgttgcagacagtaaggctggcacttctgccagccatctatctcatggagaatgtggccatggaggaactcatcaccaagcagagaaagagtaaggaaattgtggaagaggccatcaggtgcaaactgaaaatcctgcagaatgacggtgtggtaaccagcctctgtgcccgacctcggaaaactggccatgccctcttccttctgggaggacagactttcatgtgtgacaagttgtatctggtagaccagaaggccaaagaaatcattcccaaggctgacattcccagcccaagaaaagagtttagtgcatgtgcgattggctgcaaagtgtacattactggggggcgggggtctgaaaatggggtctcgaaagatgtctgggtttatgataccctgcacgaggagtggtccaaggctgcccccatgctggtggccaggtttggccatggctctgctgaactgaagcactgcctgtatgtggttggggggcacacggccgcaactggctgcctcccggcctccccctcagtctctctaaagcaggtagaacattatgaccccacaatcaacaaatggaccatggtggccccactccgagaaggcgttagcaacgccgcagtagtgagtgccaaacttaagttatttgctttcggaggtaccagtgtcagtcatgacaagctccccaaagttcagtgttacgatcagtgtgaaaacaggtggactgtaccggccacctgtccccagccctggcgttacacagcagcagctgtgctggggaaccagatttttattatggggggtgatacagaattctctgcctgctctgcttataaattcaacagtgagacttaccagtggaccaaagtgggagatgtgacagcaaagcgcatgagctgccatgctgtggcctctggaaacaaactctacgtggttggaggatactttggcattcagcgatgcaagactttggactgctacgatccaacattagacgtgtggaacagcatcaccactgtcccgtactcgctgattcctactgcatttgtcagcacctggaaacatctgccttcttaaatgcagtacattctaaagagagtgagcatgagctcactccatcactcgatgagataatatgagatttctacttcggagaggccaagtctaatgaagagaaaaaaaggaaaagaagttgcaagactcgaataaaatctgctgcaccttgtaaatgctctaactggacatgaaggaaaggggcgagggaggggggtgggatttttggtgcaagtagcacatggtttaaatatgaatgaacaaacctgtgatctagtccttgtcttgtaattgtggattaatgtcaatgttaatcagcccctcaaagggagagaaaagctggaccttttcccttgctgtaccatattcagcatttgatttccatgggccccaccatttatgtgtagaatttgaaatggttgtcacctctctctgaggacagagcttgaagcctccacaccagctgctgctggagattcaaagcccaactgtgggtccgagagggaagctggctgggctggctgaagaatgaagaccactggactctccgttaatctctaaggggtctgctccccaggaacgtttctgaacaatggggactttgttggtagccatttggtagatgttcttttctatttataagtgactttaaactttcccttggctgttaagaagtttgttatagatttagctatttattgttcgatgcctgcatgctgaaacaatgcctacagctgtcttcacatgtatggacgtgtgtgaatggttgtacgttttgcacattttgtggctgttgagatgtgctttgctgcacaaacatgaaaatttttgagttacaatttggagcataactggagggtgggctggggaggggtggatttttaaaatgtcaagacagggaaggatgacaaaatggaaatttaaatgacatcctagaggtagagaaaccgtggagatcgcttttctcagactcaccaacttttaatgggatttcatggggtttggttgtgctgatagggtaaggggaggctgctttctgcccttctccccactcccatctgatttacttaattcagtctcagctgctgaaatttggaaaggaccaaattgctttacagtttttttctttgtgtagtatcttgaaatcctggaaaattctatggaatagttctgtatatagggcacaagtaaaggcattgtccaaagtttatttatttatttattaccctaagaatgctttgccataaccacatttaatgggaaaaacggcatgtatcacagatgtaaattaactcaccagatttactgggcctgaactcattctcttcttgctatatgatttagcaagttctagaaggtctccaagacaataattacattggcacaatgtatacttcagtgctcacccgtagcaaatctctttttaaaaaactctttggtgcacaagtaacacatttggccacaaaacaccaaagaattgtaggcagtggcccctattgagaagttttccggtagagttggaaatcagttgtgaatacattctttgctagttggagtgcttgtttactaagcatgtgccgtcgtaggtattagtgctagtctcaaataggtgcttcccctgaggtgcaggggaagaccaaagtttgcaactcgaactgctttcgtccatgtttctcacattgctgtattttagaaaataggggttaagactgataacaaccttttacattgtgactgtgtttgcattgtctaatgacagataaatccttaacatttctctccaccttagtactttagactaattgtgtttgtccgtccatgccatgaatgagtgggctgtagttgggcctaaataaatgagctgttggaagaaaagaatcacagtactttccagcagtcagtccctggttcctagatgtgttctaagcaatgcaaatgtctaattgtcccccagtgggcatagtcagtgtcgtttatattgtagcagttacagctctgtagtttatgatgcaaatctgccaagagagatgtatgtgtcactgcatggcttctgaaagcaggatgaattttctgcagctgtttcaaagttggggtctgttcttgaatcctctattaattactgtgtgtgagccagagggagctgtggtaagggttgggcccccagcctgtagggaactttctggactcccactctttgaatcgatataggcatttggtctcactacttgaccattctcaccctgtgaaacgtcccacactttgaagcaaatacaattcacagcacagtacacacaaaaaccttggcataagacagagaaggttcttcttattttgtgggctggttgctgtagaaacatataacaaagggcagccctccacttctggtataattgtgtagccccttttctttgggcttgacacctgtcttgaataagagtgattagagctgcataatgtccctctcttggctattgaccatgtggttcacgtacaaaactctgtataagttgaaggaaaatgttcatgttcatatgtacttgtttgctatgactacattttgaggttttgtaaaactgttatttttttttttttcacaatgtgaaactgaaggtcaataaattattagagattttctcttcaaaaaaaaaaaaaaaaaaaaaaaaaaaaaaaaaaaaaaaaaaa

SEQ ID NO: 2732 - DNA, 2880 bp, Homo sapiens; identical to SEQ ID NO: 114

SEQ ID NO: 2733 - DNA, 2472 bp, Homo sapiens
gtgagcgtgtgtgcgtgcgtctactttgtactgggaagaacacagcccatgtgctctgcatggacgttactgatactctgtttagcttgattttcgaaaagcaggcaagatgtccagcacaccacatgaccccttctattcttctcctttcggcccattttataggaggcatacaccatacatggtacagccagagtaccgaatctatgagatgaacaagagactgcagtctcgcacagaggatagtgacaacctctggtgggacgcctttgccactgaattttttgaagatgacgccacattaaccctttcattttgtttggaagatggaccaaagcgatacactatcggcaggaccctcatcccccgttactttagcactgtgtttgaaggaggggtgaccgacctgtattacattctcaaacactcgaaagagtcataccacaactcatccatcacggtggactgcgaccagtgtaccatggtcacccagcacgggaagcccatgtttaccaaggtatgtacagaaggcagactgatcttggagttcacctttgatgatctcatgagaatcaaaacatggcactttaccattagacaataccgagagttagtcccgagaagcatcctagccatgcatgcacaagatcctcaggtcctggatcagctgtccaaaaacatcaccaggatggggctaacaaacttcaccctcaactacctcaggttgtgtgtaatattggagccaatgcaggaactgatgtcgagacataaaacttacaacctcagtccccgagactgcctgaagacctgcttgtttcagaagtggcagaggatggtggctccgccagcagaacccacaaggcaaccaacaaccaaacggagaaaaaggaaaaattccaccagcagcacttccaacagcagcgctgggaacaatgcaaacagcactggcagcaagaagaagaccacagctgcaaacctgagtctgtccagtcaggtacctggtctaggagcgatcccgaactgcagcctcaaccctgggagggatggagacctgtgtcattcaacagcagtgaccccttctggccaatttaaggagaagcattgaggggccctgaaaggagtcacttccagtcctcctcagagatgtgatggtggtaggagagccaactctgatgggaggtgagtttggggacgaggacgaaaggctaatcactagattagaaaacacgcaatatgatgcggccaacggcatggacgacgaggaggacttcaacaattcacccgcgctggggaacaacagcccgtggaacagtaaacctcccgccactcaagagaccaaatcagaaaaccccccaccccaggcttcccaataagatgatcggcaccagaatccactgtcaataggcccgtgggtgatcattacaattgcaaatctttacttacaggagaggaaacagaagagataaaaacttttccatgcaaatatctatttctaaaccacaatgatctgattttctttcttctttctttttttctaattgagaggattattcccagtaagcttccatgaccctttcttggaggccttcacaggtaatacagatactggcactgattgtaattaaaatgagagaaaactctagcgcatcttctggcacggttttaacaacgtgtttgtgttgaatttcctttttatgcatcaaacgaaggccatattgtccataaatgctcagtgctcaggatctcattaatatgccgaacctaactacagatgactttttaatattgtaaaatattttctgctttttgacttgcatctgagagtttcttgtttcagtaaaaaaagaaaagacaaaaaaatcagctttggaaagtaatttaaatgtaccttattttttttttctttatgttttctttcattgggcaacagctaagagggcccagcaaggtaatttatggttgagctgatgtcaattggttcttgtcttgagtcgactcaatttagcccaagtgctgaaacaagaaatgtcatttttttcatcaaagacaccagggcagatttttaagtaaagaaagacaattggacccttaagaatttatgcatttgtaaagttgctgttgatccaaatattttcaagccatgtaatccattggttttgtgggcagtttaataaacctgaacctttgtgtgttttctaattgtacctgagttgaccatcctttctttttatagtatatttcttgtatgatattttgtaaagctctcacctggttcttttatggggacttttcgtttttgggcaactccagtgtatttatgtgaaactttataagagaattaatttttccatttgcatattaatatgttcctccacacatgtaaaggcacagtggctccgtgtgttaaaaaacagctgtattttatgtatgctttactgataagtgtgccaataataaactgtgttaatgacc

SEQ ID NO: 2734 - DNA, 3054 bp, Homo sapiens
tcctctgcgtcccgccccgggagtggctgcgaggctaggcgagccgggaaagggggcgccgcccagccccgagccccgcgccccgtgccccgagcccggagccccctgcccgcggcggcaccatgcgcgccgagccggcgtgaccggctccgcccgcggccgccccgcagctagcccggcgctctcgccggccacacggagcggcgcccgggagctatgagccatgaagccgcccggcagcagctcgcggcagccgcccctggcgggctgcagccttgccggcgcttcctgcggcccccaacgcggccccgccggctcggtgcctgccagcgccccggcccgcacgccgccctgccgcctgcttctcgtccttctcctgctgcctccgctcgccgcctcgtcccggccccgcgcctggggggctgctgcgcccagcgctccgcattggaatgaaactgcagaaaaaaatttgggagtcctggcagatgaagacaatacattgcaacagaatagcagcagtaatatcagttacagcaatgcaatgcagaaagaaatcacactgccttcaagactcatatattacatcaaccaagactcggaaagcccttatcacgttcttgacacaaaggcaagacaccagcaaaaacataataaggctgtccatctggcccaggcaagcttccagattgaagccttcggctccaaattcattcttgacctcatactgaacaatggtttgttgtcttctgattatgtggagattcactacgaaaatgggaaaccacagtactctaagggtggagagcactgttactaccatggaagcatcagaggcgtcaaagactccaaggtggctctgtcaacctgcaatggacttcatggcatgtttgaagatgataccttcgtgtatatgatagagccactagagctggttcatgatgagaaaagcacaggtcgaccacatataatccagaaaaccttggcaggacagtattctaagcaaatgaagaatctcactatggaaagaggtgaccagtggccctttctctctgaattacagtggttgaaaagaaggaagagagcagtgaatccatcacgtggtatatttgaagaaatgaaatatttggaacttatgattgttaatgatcacaaaacgtataagaagcatcgctcttctcatgcacataccaacaactttgcaaagtccgtggtcaaccttgtggattctatttacaaggagcagctcaacaccagggttgtcctggtggctgtagagacctggactgagaaggatcagattgacatcaccaccaaccctgtgcagatgctccatgagttctcaaaataccggcagcgcattaagcagcatgctgatgctgtgcacctcatctcgcgggtgacatttcactataagagaagcagtctgagttactttggaggtgtctgttctcgcacaagaggagttggtgtgaatgagtatggtcttccaatggcagtggcacaagtattatcgcagagcctggctcaaaaccttggaatccaatgggaaccttctagcagaaagccaaaatgtgactgcacagaatcctggggtggctgcatcatggaggaaacaggggtgtcccattctcgaaaattttcaaagtgcagcattttggagtatagagactttttacagagaggaggtggagcctgccttttcaacaggccaacaaagctatttgagcccacggaatgtggaaatggatacgtggaagctggggaggagtgtgattgtggttttcatgtggaatgctatggattatgctgtaagaaatgttccctctccaacggggctcactgcagcgacgggccctgctgtaacaatacctcatgtctttttcagccacgagggtatgaatgccgggatgctgtgaacgagtgtgatattactgaatattgtactggagactctggtcagtgcccaccaaatcttcataagcaagacggatatgcatgcaatcaaaatcagggccgctgctacaatggcgagtgcaagaccagagacaaccagtgtcagtacatctggggaacaaaggctgcagggtctgacaagttctgctatgaaaagctgaatacagaaggcactgagaagggaaactgcgggaaggatggagaccggtggattcagtgcagcaaacatgatgtgttctgtggattcttactctgtaccaatcttactcgagctccacgtattggtcaacttcagggtgagatcattccaacttccttctaccatcaaggccgggtgattgactgcagtggtgcccatgtagttttagatgatgatacggatgtgggctatgtagaagatggaacgccatgtggcccgtctatgatgtgtttagatcggaagtgcctacaaattcaagccctaaatatgagcagctgtccactcgattccaagggtaaagtctgttcgggccatggggtgtgtagtaatgaagccacctgcatttgtgatttcacctgggcagggacagattgcagtatccgggatccagttaggaaccttcacccccccaaggatgaaggacccaagggtcctagtgccaccaatctcataataggctccatcgctggtgccatcctggtagcagctattgtccttgggggcacaggctggggatttaaaaatgtcaagaagagaaggttcgatcctactcagcaaggccccatctgaatcagctgcgctggatggacaccgccttgcactgttggattctgggtatgacatactcgcagcagtgttactggaactattaagtttgtaaacaaaacctttgggtggtaatgactacggagctaaagttggggtgacaaggatggggtaaaagaaaactgtctcttttggaaataatgtcaaagaacacctttcaccacctgtcagtaaacgggggagggggcaaaagaccatgctataaaaagaactgttccagaatctttttttttccctaatggacgaaggaacaacacacacacaaaaattaaatgcaataaaggaatcattaaaaa

SEQ ID NO: 2735 - DNA, 633 bp, Homo sapiens
gccagcactagtcagctaactaagtgactcaaccaaggccttttttccttgttatctttgcagatacttcattttcttagcgtttctggagattacaacatcctgcggttccgtttctgggaactttactgatttatctcccccctcacacaaataagcattgattcctgcatttctgaagatctcaagatctggactactgttgaaaaaatttccagtgaggctcacttatgtctgtaaagatgggaaaaaaatacaagaacattgttctactaaaaggattagaggtcatcaatgattatcattttagaatggttaagtccttactgagcaacgatttaaaacttaatttaaaaatgagagaagagtatgacaaaattcagattgctgacttgatggaagaaaagttccgaggtgatgctggtttgggcaaactaataaaaattttcgaagatataccaacgcttgaagacctggctgaaactcttaaaaaagaaaagttaaaagtaaaaggaccagccctatcaagaaagaggaagaaggaagtggatgctacttcacctgcaccctccacaagcagcactgtcaaaactgaaggagcagaggcaactcctggagctcagaaaaaaaaaa

SEQ ID NO: 2736 - DNA, 3756 bp, Homo sapiens
atgagtacagaaagagactcagaaacgacatttgacgaggattctcagcctaatgacgaagtggttccctacagtgatgatgaaacagaagatgaacttgatgaccaggggtctgctgttgaaccagaacaaaaccgagtcaacagggaagcagaggagaaccgggagccattcagaaaagaatgtacatggcaagtcaaagcaaacgatcgcaagtaccacgaacaacctcactttatgaacacaaaattcttgtgtattaaggagagtaaatatgcgaataatgcaattaaaacatacaagtacaacgcatttacctttataccaatgaatctgtttgagcagtttaagagagcagccaatttatatttcctggctcttcttatcttacaggcagttcctcaaatctctaccctggcttggtacaccacactagtgcccctgcttgtggtgctgggcgtcactgcaatcaaagacctggtggacgatgtggctcgccataaaatggataaggaaatcaacaataggacgtgtgaagtcattaaggatggcaggttcaaagttgctaagtggaaagaaattcaagttggagacgtcattcgtctgaaaaaaaatgattttgttccagctgacattctcctgctgtctagctctgagcctaacagcctctgctatgtggaaacagcagaactggacggagaaaccaatttaaaatttaagatgtcacttgaaatcacagaccagtacctccaaagagaagatacattggctacatttgatggttttattgaatgtgaagaacccaataaccgactagataagtttacaggaacactattttggagaaacacaagttttcctttggatgctgataaaattttgttacgtggctgtgtaattaggaacaccgatttctgccacggcttagtcatttttgcaggtgctgacactaaaataatgaagaatagtgggaaaaccagatttaaaagaactaaaattgattacttgatgaactacatggtttacacgatctttgttgttcttattctgctttctgctggtcttgccatcggccatgcttattgggaagcacaggtgggcaattcctcttggtacctctatgatggagaagacgatacaccctcctaccgtggattcctcattttctggggctatatcattgttctcaacaccatggtacccatctctctctatgtcagcgtggaagtgattcgtcttggacagagtcacttcatcaactgggacctgcaaatgtactatgctgagaaggacacacccgcaaaagctagaaccaccacactcaatgaacagctcgggcagatccattatatcttctctgataagacggggacactcacacaaaatatcatgacctttaaaaagtgctgtatcaacgggcagatatatggggaccatcgggatgcctctcaacacaaccacaacaaaatagagcaagttgattttagctggaatacatatgctgatgggaagcttgcattttatgaccactatcttattgagcaaatccagtcagggaaagagccagaagtacgacagttcttcttcttgctcgcagtttgccacacagtcatggtggataggactgatggtcagctcaactaccaggcagcctctcccgatgaaggtgccctggtaaacgctgccaggaactttggctttgccttcctcgccaggacccagaacaccatcaccatcagtgaactgggcactgaaaggacttacaatgttcttgccattttggacttcaacagtgaccggaagcgaatgtctatcattgtaagaaccccagaaggcaatatcaagctttactgtaaaggtgctgacactgttatttatgaacggttacatcgaatgaatcctactaagcaagaaacacaggatgccctggatatctttgcaaatgaaactcttagaaccctatgcctttgctacaaggaaattgaagaaaaagaatttacagaatggaataaaaagtttatggctgccagtgtggcctccaccaaccgggacgaagctctggataaagtatatgaggagattgaaaaagacttaattctcctgggagctacagctattgaagacaagctacaggatggagttccagaaaccatttcaaaacttgcaaaagctgacattaagatctgggtgcttactggagacaaaaaggaaactgctgaaaatataggatttgcttgtgaacttctgactgaagacaccaccatctgctatggggaggatattaattctcttcttcatgcaaggatggaaaaccagaggaatagaggtggcgtctacgcaaagtttgcacctcctgtgcaggaatctttttttccacccggtggaaaccgtgccttaatcatcactggttcttggttgaatgaaattcttctcgagaaaaagaccaagagaaataagattctgaagctgaagttcccaagaacagaagaagaaagacggatgcggacccaaagtaaaaggaggctagaagctaagaaagagcagcggcagaaaaactttgtggacctggcctgcgagtgcagcgcagtcatctgctgccgcgtcacccccaagcagaaggccatggtggtggacctggtgaagaggtacaagaaagccatcacgctggccatcggagatggggccaatgacgtgaacatgatcaaaactgcccacattggcgttggaataagtggacaagaaggaatgcaagctgtcatgtcgagtgactattcctttgctcagttccgatatctgcagaggctactgctggtgcatggccgatggtcttacataaggatgtgcaagttcctacgatacttcttttacaaaaactttgcctttactttggttcatttctggtactccttcttcaatggctactctgcgcagactgcatacgaggattggttcatcaccctctacaacgtgctgtacaccagcctgcccgtgctcctcatggggctgctcgaccaggatgtgagtgacaaactgagcctccgattccctgggttatacatagtgggacaaagagacttactattcaactataagagattctttgtaagcttgttgcatggggtcctaacatcgatgatcctcttcttcatacctcttggagcttatctgcaaaccgtagggcaggatggagaggcaccttccgactaccagtcttttgccgtcaccattgcctctgctcttgtaataacagtcaatttccagattggcttggatacttcttattggacttttgtgaatgctttttcaatttttggaagcattgcactttattttggcatcatgtttgactttcatagtgctggaatacatgttctctttccatctgcatttcaatttacaggcacagcttcaaacgctctgagacagccatacatttggttaactatcatcctgactgttgctgtgtgcttactacccgtcgttgccattcgattcctgtcaatgaccatctggccatcagaaagtgataagatccagaagcatcgcaagcggttgaaggcggaggagcagtggcagcgacggcagcaggtgttccgccggggcgtgtcaacgcggcgctcggcctacgccttctcgcaccagcggggctacgcggacctcatctcctccgggcgcagcatccgcaagaagcgctcgccgcttgatgccatcgtggcggatggcaccgcggagtacaggcgcaccggggacagctga

SEQ ID NO: 2737 - DNA, 3344 bp, Homo sapiens
ctttcactaagggttactgtagtctgatgtgtccttcccaaggccacgaaatttgacaagctgcacttttcttttgctcaatgatttctgctttaagccaaagaactgcctataatttcactaagaatgtcttctaattcagatactggggatttacaagagtctttaaagcacggacttacacctattggtgctgggcttccggaccgacacggatcccccatccccgcccgcggtcgccttgtcatgctgcccaaagtggagacggaagccctgggactggctcgatcgcatggggaacagggccagatgccggaaaacatgcaagtgtctcaatttaaaatggtgaattactcctatgatgaagatctggaagagctttgtcccgtgtgtggagataaagtgtctgggtaccattatgggctcctcacctgtgaaagctgcaagggattttttaagcgaacagtccaaaataataaaaggtacacatgtatagaaaaccagaactgccaaattgacaaaacacagagaaagcgttgtccttactgtcgttttcaaaaatgtctaagtgttggaatgaagctagaagctgtaagggccgaccgaatgcgtggaggaaggaataagtttgggccaatgtacaagagagacagggccctgaagcaacagaaaaaagccctcatccgagccaatggacttaagctagaagccatgtctcaggtgatccaagctatgccctctgacctgaccatttcctctgcaattcaaaacatccactctgcctccaaaggcctacctctgaaccatgctgccttgcctcctacagactatgacagaagtccctttgtaacatcccccattagcatgacaatgccccctcacggcagcctgcaaggttaccaaacatatggccactttcctagccgggccatcaagtctgagtacccagactcctataccagctcacccgagtccataatgggctattcatatatggatagttaccagacgagctctccagcaagcatcccacatctgatactggaacttttgaagtgtgagccagatgagcctcaagtccaggctaaaatcatggcctatttgcagcaagagcaggctaaccgaagcaagcacgaaaagctgagcacctttgggcttatgtgcaaaatggcagatcaaactctcttctccattgtcgagtgggccaggagtagtatcttcttcagagaacttaaggttgatgaccaaatgaagctgcttcagaactgctggagtgagctcttaatcctcgaccacatttaccgacaagtggtacatggaaaggaaggatccatcttcctggttactgggcaacaagtggactattccataatagcatcacaagccggagccaccctcaacaacctcatgagtcatgcacaggagttagtggcaaaacttcgttctctccagtttgatcaacgagagttcgtatgtctgaaattcttggtgctctttagtttagatgtcaaaaaccttgaaaacttccagctggtagaaggtgtccaggaacaagtcaatgccgccctgctggactacacaatgtgtaactacccgcagcagacagagaaatttggacagctacttcttcgactacccgaaatccgggccatcagtatgcaggctgaagaatacctctactacaagcacctgaacggggatgtgccctataataaccttctcattgaaatgttgcatgccaaaagagcataagttacaacccctaggagctctgctttcaaaacaaaaagagattgggggagtggggagggggaagaagaacaggaagaaaaaaagtactctgaactgctccaagtaacgctaattaaaaacttgctttaaagatattgaatttaaaaaggcataataatcaaatactaatagcaaataaatgatgtatcagggtatttgtattgcaaactgtgaatcaaaggttcacagccccagaggattccatataaaagacattgtaatggagtggattgaactcacagatggataccaacacggtcagaagaaaaacggacagaacggttcttgtatatttaaactgatctccactatgaagaaatttaggaactaatcttattaattaggcttatacagcgggggatttgagcttacaggattcctccatggtaaagctgaactgaaacaattctcaagaatgcatcagctgtacctacaatagcccctccctcttcctttgaaggcccgagcacctctgccctgtggtcaccgaatctgtactaatggacctgtgtcagccacacccagtggtagctccaccaaatcatgaacagcctaatttgagtgtctgtgtcttagacctgcaaacagctaataggaaattctattaatatgttagcttgccatttaaatatgttctgagggttgttttgtctcgtgttcatgatgttaagaaaatgcaggcagtatccctcatcttatgtaagtgtgaattaatattaagggaaatgactacaaactttcaaagcaaatgctccatagctaaagcaacttagaccttatttctgctactgttgctgaaatgtggctttggcattgttggatttcataaaaaatttctggcaggaagtcttgttagtatacatcagtctttttcatcatccaagtttgtagttcatttaaaaatacaacattaaacacattttgctaggatgtcaaatagtcacagttctaagtagttggaaacaaaattgacgcatgttaatctatgcaaagagaaaggaaaggatgaggtgatgtattgactcaaggttcattcttgctgcaattgaacatcctcaagagttgggatggaaatggtgatttttacatgtgtcctggaaagatattaaagtaattcaaatcttccccaaaggggaaaggaagagagtgatactgacctttttaagtcatagaccaaagtctgctgtagaacaaatatgggaggacaaagaatcgcaaattcttcaaatgactattatcagtattattaacatgcgatgccacaggtatgaaagtcttgccttatttcacaattttaaaaggtagctgtgcagatgtggatcaacatttgtttaaaataaagtattaatactttaaagtcaaataagatatagtgtttacattctttaggtcctgaggggcagggggatctgtgatataacaaaatagcaaaagcggtaatttccttaatgttatttttctgattggtaattatttttaacagtacttaattattctatgtcgtgagacactaaaatcaaaaacgggaatctcatttagactttaattttttt

SEQ ID NO: 2738 - DNA, 3724 bp, Homo sapiens
  misc_feature (2877)..(2877): n is a, c, g, or t
  misc_feature (3380)..(3380): n is a, c, g, or t
gcctggcaccggggaccgttgcctgacgcgaggcccagctctacttttcgccccgcgtctcctccgcctgctcgcctcttccaccaactccaactccttctccctccagctccactcgctagtccccgactccgccagccctcggcccgctgccgtagcgccgcttcccgtccggtcccaaaggtgggaacgtgtccgccccggcccgcaccatggcacggttcggcttgcccgcgcttctctgcaccctggcagtgctcagcgccgcgctgctggctgccgagctcaagtcgaaaagttgctcggaagtgcgacgtctttacgtgtccaaaggcttcaacaagaacgatgcccccctccacgagatcaacggtgatcatttgaagatctgtccccagggttctacctgctgctctcaagagatggaggagaagtacagcctgcaaagtaaagatgatttcaaaagtgtggtcagcgaacagtgcaatcatttgcaagctgtctttgcttcacgttacaagaagtttgatgaattcttcaaagaactacttgaaaatgcagagaaatccctgaatgatatgtttgtgaagacatatggccatttatacatgcaaaattctgagctatttaaagatctcttcgtagagttgaaacgttactacgtggtgggaaatgtgaacctggaagaaatgctaaatgacttctgggctcgcctcctggagcggatgttccgcctggtgaactcccagtaccactttacagatgagtatctggaatgtgtgagcaagtatacggagcagctgaagcccttcggagatgtccctcgcaaattgaagctccaggttactcgtgcttttgtagcagcccgtactttcgctcaaggcttagcggttgcgggagatgtcgtgagcaaggtctccgtggtaaaccccacagcccagtgtacccatgccctgttgaagatgatctactgctcccactgccggggtctcgtgactgtgaagccatgttacaactactgctcaaacatcatgagaggctgtttggccaaccaaggggatctcgattttgaatggaacaatttcatagatgctatgctgatggtggcagagaggctagagggtcctttcaacattgaatcggtcatggatcccatcgatgtgaagatttctgatgctattatgaacatgcaggataatagtgttcaagtgtctcagaaggttttccagggatgtggaccccccaagcccctcccagctggacgaatttctcgttccatctctgaaagtgccttcagtgctcgcttcagaccacatcaccccgaggaacgcccaaccacagcagctggcactagtttggaccgactggttactgatgtcaaggataaactgaaacaggccaagaaattctggtcctcccttccgagcaacgtttgcaacgatgagaggatggctgcaggaaacggcaatgaggatgactgttggaatgggaaaggcaaaagcaggtacctgtttgcagtgacaggaaatggattagtcaaccagggcaacaacccagaggtccaggttgacaccagcaaaccagacatactgatccttcgtcaaatcatggctcttcgagtgatgaccagcaagatgaagaatgcatacaatgggaacgacgtggacttctttgatatcagtgatgaaagtagtggagaaggaagtggaagtggctgtgagtatcagcagtgcccttcagagtttgactacaatgccactgaccatgctgggaagagtgccaatgagaaagccgacagtgctggtgtccgtcctggggcacaggcctacctcctcactgtcttctgcatcttgttcctggttatgcagagagagtggagataattctcaaactctgagaaaaagtgttcatcaaaaagttaaaaggcaccagttatcacttttctaccatcctagtgactttgctttttaaatgaatggacaacaatgtacagtttttactatgtggccactggtttaagaagtgctgactttgttttctcattcagttttgggaggaaaagggactgtgcattgagttggttcctgctcccccaaaccatgttaaacgtggctaacagtgtaggtacagaactatagttagttgtgcatttgtgattttatcactctattatttgtttgtatgtttttttctcatttcgtttgtgggtttttttttccaactgtgatctcgccttgtttcttacaagcaaaccagggtcccttcttggcacgtaacatgtacgtatttctgaaatattaaatagctgtacagaagcaggttttatttatcatgttatcttattaaaagaaaaagcccaaaaagcagtaaaatttccatttctccctgttattttagttgccttatctggagagacgtggaggtgattttctttttttaaattattattaagacagaatgtgaaggcacaagcaggcttctgagccacttgtcagattgtattcaaagcatcaatccaagaggaggttatgtgtacttcatttattggtgatagttggaagagactgcagactactgctttgaatgagttgaattacataagctaagatcactataaggtccatttcttgaacccacttatacataaaatgtaacccatttagaaaaagattctggatatcatccccccttgaaagatagaaagcattcaggatgtcccagttatcacatgttcacacttgggtttaggggtgtttttttttaaaaccaggcaggttagctagcccaccctgtgctagttttcatgttcacgctgaccctatttgaattaatatcctttgttagagtggtcgagatttcaaacccaattatgtacanggagctgtctgagagctagccagaactggggtacagcctgggctcagggaatagctgtcaacactcgggcaaagtttttgtctgcagcaacgtgtatcaccatttgttttgggatccagtttttgttttaagagagtataaggtgtctcatttgagtctttttcttacctagccccctcttatcagtaaaacaaaggacttgccatggttcacagcaatgtgctacgatccaagatatcaaccaaggagcccacttaggggagaactaggtgtccagatttttgtatgtgttgtttttcttgggggatggggtggggtgggagtaggtagagctgagaatactacatcttagtggtgacctttagccacgtgggtgaagtggcaaaggccatggccatatctgttgtcccaggccaaagactaacaactgccttgggaatcccttccttgtgtccttaccaaatgatagctcataaaactctgataatgtaacaaatcacttncaaaggagttcccagaagtcttcagaaagactaaaattctgtctcttcctgctttagacagccattaagatcccaactaattttaccgaacctaaaacccacaaagaggttgtttgtgttattgttcaatcttcagttgtaagagtaattctctatttttatattgaaacataattacttgatagctcagggtctacacttcattcaactttttacaccaaattctgcagagtggtcaaaatggaatattgggggctgttgtaaacagaggcttaattttattagaagtagccagttatttattaaagcatgatgttaataaaataggcatattccaaaaaaaa

SEQ ID NO: 2739 - DNA, 484 bp, Homo sapiens
ccgttcgctccggacaccatggacaagttttggtggcacgcagcctggggactctgcctcgtgccgctgagcctggcgcagatcgatttgaatataacctgccgctttgcaggtgtattccacgtggagaaaaatggtcgctacagcatctctcggacggaggccgctgacctctgcaaggctttcaatagcaccttgcccacaatggcccagatggagaaagctctgagcatcggatttgagacctgcagtttgcattgcagtcaacagtcgaagaaggtgtgggcagaagaaaaagctagtgatcaacagtggcaatggagctgtggaggacagaaagccaagtggactcaacggagaggccagcaagtctcaggaaatggtgcatttggtgaacaaggagtcgtcagaaactccagaccagtttatgacagctgatgagacaaggaacctgcagaatgtggacatgaagattggggtgtaa

SEQ ID NO: 2740 - DNA, 4133 bp, Homo sapiens
ggtgcgcgccgcggcttgggggagagttgagcgcttttcccccctcttttttttttttttttcctcttcttcttaaacaaaccacaaacggatgtgagggaaggaaggtgtttcttttactcctgagcccagacacctcactctgttccgtctaagcttgttttgctgaacacttttttttaaaaaaggaaaaagaaaaggagttgcttgatgtgagagtgaaatggacgtaagattttatccacctccagcccagcccgccgctgcgcccgacgctccctgtctgggaccttctccctgcctggacccctactattgcaacaagtttgacggtgagaacatgtatatgagcatgacagagccgagccaggactatgtgccagccagccagtcctaccctggtccaagcctggaaagtgaagacttcaacattccaccaattactcctccttccctcccagaccactcgctggtgcacctgaatgaagttgagtctggttaccattctctgtgtcaccccatgaaccataatggcctgctaccatttcatccacaaaacatggacctccctgaaatcacagtctccaatatgctgggccaggatggaacactgctttctaattccatttctgtgatgccagatatacgaaacccagaaggaactcagtacagttcccatcctcagatggcagccatgagaccaaggggccagcctgcagacatcaggcagcagccaggaatgatgccacatggccagctgactaccattaaccagtcacagctaagtgctcaacttggtttgaatatgggaggaagcaatgttccccacaactcaccatctccacctggaagcaagtctgcaactccttcaccatccagttcagtgcatgaagatgaaggcgatgatacctctaagatcaatggtggagagaagcggcctgcctctgatatggggaaaaaaccaaaaactcccaaaaagaagaagaagaaggatcccaatgagccccagaagcctgtgtctgcctatgcgttattctttcgtgatactcaggccgccatcaagggccaaaatccaaacgctacctttggcgaagtctctaaaattgtggcttcaatgtgggacggtttaggagaagagcaaaaacaggtctataaaaagaaaaccgaggctgcgaagaaggagtacctgaagcaactcgcagcatacagagccagccttgtatccaagagctacagtgaacctgttgacgtgaagacatctcaacctcctcagctgatcaattcgaagccgtcggtgttccatgggcccagccaggcccactcggccctgtacctaagttcccactatcaccaacaaccgggaatgaatcctcacctaactgccatgcatcctagtctccccaggaacatagcccccaagccgaataaccaaatgccagtgactgtctctatagcaaacatggctgtgtcccctcctcctcccctccagatcagcccgcctcttcaccagcatctcaacatgcagcagcaccagccgctcaccatgcagcagccccttgggaaccagctccccatgcaggtccagtctgccttacactcacccaccatgcagcaaggatttactcttcaacccgactatcagactattatcaatcctacatctacagctgcacaagttgtcacccaggcaatggagtatgtgcgttcggggtgcagaaatcctcccccacaaccggtggactggaataacgactactgcagtagtgggggcatgcagagggacaaagcactgtaccttacttgagaatctgaacacctcttctttccactgaggaattcagggaagtgttttcaccatggattgctttgtacagtcaaggcagttctccattttattagaaaatacaagttgctaagcacttaggaccatttgagcttgtgggtcacccactctggaagaaatagtcatgcttctttattatttttttaatcctttatggacattgtttttcttcttccctgaaggaaatttggaccattcagattttatgttggttttttgctgtgaagtgctgcgctctagtaactgccttagcaactgtagatgtctcggataaaagtcctggattttccattggttttcataatgggtgtttatatgaaactactaaagactttttaaatggcttgatgtagcagtcatagcaagtttgtaaatagcatctatgttacactctcctagagtataaaatgtgaatgtttttgtagctaaattgtaattgaaactggctcattccagtttattgatttcacaataggggttaaattggcaaacattcatatttttacttcatttttaaaacaactgactgatagttctatattttcaaaatatttgaaaataaaaagtattcccaagtgattttaatttaaaaacaaattggctttgtctcattgatcagacaaaaagaaactagtattaagggaagcgcaaacacatttattttgtactgcagaaaaattgcttttttgtatcactttttgtgtaatggttagtaaatgtcatttaagtccttttatgtataaaactgccaaatgcttacctggtattttattagatgcagaaacagattggaaacagctaaattacaacttttacatatggctctgtcttattgtttcttcatactgtgtctgtatttaatctttttttatggaacctgttgcgcctatttatgaaataataaatataggtgtttgtaagtaaatttgttagtatttgaaagaggtttctttgatgttttaacttttgctggcaaaaaaaaattcacgcttggtgtgaatactttattatttagtttttacagtaacatgaataaagccaaacctgcttttcatttagcagcaaattaaagtaaccagtccttatttctgcatttctttggttgatgcaaacaaaaaactattatatttaagaactttatttcttcatacgacataacagaattgccctccaagtcacacaagctccaagactaaacaaacagacaggtcctctgtcttaaaaaggttacttcttggttctcagctggttctagtcaattctgaaccaccaccccccgccccccgcaaaaaagtaaaagtcaaaccaaacttcctcaagctgcatgcttttcacaaaatccagaaagcatttaagaattgaactaggggctggaagaagtgaaagggaagcatctaaaaatgaaaggtgagtaaccagatagcaaaagaaaagggaaagccatccaaatttgaaagctgttgatagaaattgagattcttgctgtcttttgtgcctctgcaagctactactcattccagaattcctgggtcttccaagaggattcttaaggtaccagagatttgctagggaaccaaaagtgcttgagaatctgcctgagggcttgcatagctttcacattaaaaaaagaaaaagctagcagatttactcctttttaggggatcatatcaagaaagttagtctggttggaaaccaagagaatggctgatgtctctttcttggaatatgtgaaataaatttagcagtttaactaaatacaaatatatgcattgtgtaatccactcagaattaaacagacaaaaggtatgcttgctttggaatgattttaggcattgtacaaccttgaatcacttgagcatgtaataactaataaataatgcagatccatgtgattattaaaatgactgtagctgagagctctaattttcctgtcttgaaactgtataagaactcatgtgattaagttcacagtttattgtttgtctgtttagtattttagaaatataccagcactactaattaactaatgtcttttatttattatattatgataaagtaaaaatttcacttgcattaagtctaaactgagaaggtaattactgggaggagaatgagcagctttgactttgacaggcggtttgtgcaggaaagcacagtgccgtgttgtttacagcttttctagagcagctgtgcgaccagggtagagagtgttgaaattcaataccaaatacagtaaaaacaaatgtaaataaaagaaaacacatcatcaataaaactgttattatgcgtg

SEQ ID NO: 2741 - DNA, 4762 bp, Homo sapiens
cccgccccggcccagccgcgtcccggagccgtcgggcatggagccgtggaagcagtgcgcgcagtggctcatccattgcaaggtgctgcccaccaaccaccgggtgacctgggactcggctcaggtgttcgaccttgcgcagaccctccgcgatggagtcctgctctgccagctgcttaacaacctccgggcgcactccatcaacctgaaggagatcaacctgaggccgcagatgtcccagtttctctgtttgaagaacataaggacatttctcacggcctgttgtgagacgtttggaatgaggaaaagtgaacttttcgaggcatttgacttgtttgatgttcgtgactttggagaggttatagaaacattatcacgactttctcgaacacctatagcattggccacaggaatcaggcccttcccaacagaagaaagcattaatgatgaagacatctacaaaggccttcctgatttaatagatgaaacccttgtggaagatgaagaagatctctatgactgtgtttatggggaagatgaaggtggagaagtctatgaggacttaatgaaggcagaggaagcacatcagcccaaatgtccagaaaatgatatacgaagttgttgtctagcagaaattaagcagacagaagaaaaatatacagaaactttggagtcaatagaaaaatatttcatggcaccactaaaaagatttctgacagcagcagaatttgattcagtattcatcaacattcctgaacttgtaaaacttcatcggaacctaatgcaagagattcatgattccattgtaaataaaaatgaccagaacttgtaccaagtttttattaactacaaggaaagattggttatttacgggcagtactgcagtggagtggagtcagccatctctagtttagactacatttctaagtcaaaagaagatgtcaaactgaaattagaggaatgttccaaaagagcaaataatgggaaatttactcttcgagacttgcttgtggttcctatgcaacgtgttttaaagtaccaccttctcctccaggaactggtcaaacataccactgatccgactgagaaggcaaatctgaaactggctcttgatgccatgaaggacttggcacaatatgtgaatgaagtgaaaagagataatgagacccttcgtgaaattaaacagtttcagctatctatagagaatttgaaccaaccagttttgctttttggacgacctcagggagatggtgaaattcgaataaccactctagacaagcataccaaacaagaaaggcatatcttcttatttgatttggcagtgatcgtatgtaagagaaaaggtgataactatgaaatgaaggaaataatagatcttcagcagtacaagatagccaataatcctacaaccgataaagaaaacaaaaagtggtcttatggcttctacctcatccatacccaaggacaaaatgggttagaattttattgcaaaacaaaagatttaaagaagaaatggctagaacagtttgaaatggctttgtctaacataagaccagactatgcagactccaatttccacgacttcaagatgcataccttcactcgagtcacatcctgcaaagtctgccagatgctcctgaggggaacattttatcaaggctatttatgttttaagtgtggagcgagagcacacaaagaatgtttgggaagagtagacaattgtggcagagttaattctggtgaacaagggacactcaaactaccagagaaacggaccaatggactgcgaagaactcctaaacaggtggatccaggtttaccaaagatgcaggtcattaggaactattctggaacaccacccccagctctgcatgaaggaccccctttacagctccaggccggggataccgttgaacttctgaaaggagatgcacacagtctgttttggcagggcagaaatttagcatctggagaggttggattttttccaagtgatgcagtcaagccttgcccatgtgtgcccaaaccagtagattattcttgccaaccctggtatgctggagcaatggaaagattgcaagcagagaccgaacttattaatagggtaaatagtacttaccttgtgaggcacaggaccaaagagtcaggagaatatgcaattagcattaagtacaataatgaagcaaagcacatcaagattttaacaagagatggcttttttcacattgcagaaaatagaaaatttaaaagtttaatggaacttgtggagtactacaagcatcattctctcaaggaagggttcagaaccttagatacaactctgcagtttccatacaaggagccagaacattcagctggacagaggggtaatagagcaggcaacagcttgttaagtccaaaagtgctgggcattgccatcgctcggtatgacttctgtgcaagagatatgagagagttgtccttgttgaaaggagatgtggtgaagatttacacaaagatgagtgcaaatggctggtggagaggagaagtaaatggcagggtgggctggtttccatccacatatgtggaagaggatgaataaattcaaatcccgtgttgcaccctgcaccaaaaatttcagagaagggataaatagaagcctgcacagcatcgtgaattaactgaagtgtttaaaaagctgcatttctggctgttcaacatcctccctccttagcccctcctaagtcttaatgctgagatttctaaagatgctggtactgacagattaatggcttgcctagagctgtgcaagaaacagcctgccagtctgtcattgtcagggaccagggcaaaaccaagagctgttcttcccagaagagccctgcaaacacattggttcgtgcttccctttacttcttctggtcagataccatgaatgccagtcatcagtaaatcttaatacacttttgctttattctcacatgccattcaccagattatttgatggtacaaagaagcagaagtgtaattttccttttcccagcatgacgaaaaattggagttctgccatttgagcagcttactggagagatccagccttacttgtcttaaattgtccaacaaggtgactcattgcccggcaaacacttttaccctcagatgttactcatgatattataaaatatgaggccagtgctcaggtttgcatcataagtgagctatccctgaagggttttaattacttatttggtgtcctgattatatttgcaaacttctttataaaaggtgaaaaaagcacacaaaagagagggtgtcttcatattaaaccttcacaaccttcatgatttcataggattattttggaaatatagcacttgactttatgaaaggatctgggctaggtatattaggggtagttgccaataacctgaagaagctggcattgtttacagaaacagatcaagggctataatttatgtcattttatagcagcagtatctattaatacatgccttttcctcccatccacctcccccgcacacacacaaagatgacctgggacatgatttttttattcccacattttcttggagcacaaacaactttgttgaggattttggaaggaaagcacaactgggtcctttattcatttctgggacagaaagagggtcagtggacttttgtgggcctccagcttctctcagagtctccccctctgcagcccatcctgggagtgtattaactggagggaagatgggtcttgcagtacatttgttttgcccagccatcactcttttttgtgaggagcctaaatacattcttcctggggtccagagtccccattcaaggcagtcaagttaagacactaacttggccctttcctgatggaaatatttcctccatagcagaagttgtgttctgacaagactgagagagttacatgttgggaaaaaaaagaagcattaacttagtagaactgaaccaggagcattaagttctgaaattttgaatcatctctgaaatgaagcaggtgtagcctgccctctcatcaatccgtccgtctgggtgccagaactcaaggttcagtggacacatccccctgttagagaccctcatgggctaggacttttcatctaggatagattcaagacctttacctcagaattatgtaaactgtgattgtgttttagaaaaattattatttgctaaaaccatttaagtctttgtatatgtgtaaatgatcacaaaaatgtattttataaaatgttctgtacaataaagttacacctcaaagtgtactcttggaatggattctttcctgtaaagtcttatctgcgactctgtctcgggaatgttttgtctgttgccgtcagccgaactttgttatggagggagcagcctcacacaagcagaaacactcctgtggatggtattgtagcatgtattgtttattttagtcaatagaccctctccttataaatggtgtttagtcttcctgttgcatttcatgggcctgggggtttcctrgcagaggatattggagcccctttttgtgacattaccaattacatctttgtccacgtttaatactttgttttggaaaatttaaatgctgcagatttgtgtagagttctaataccaaagacagaagtaaatgttttccatatactttgtcttgcctgtatgcagcccttgtgtaatatggtgaattagagtggtatttcactttgtattattttgtaaatatgtcaatataataaatagtgactaaaaaaaaaaaaaa

SEQ ID NO: 2742 - DNA, 2236 bp, Homo sapiens
ggggactcaaggctggcctggctcaagtgaacagcacgtccaggaggcgacctcgtccgcgggtttgcattctggggtggacgagctgggggttcggtccgagcccggtgggaggctcccggagcgcagcctgggcccagcccaccccgcgccggcggccatggcaggcaccctggacctggacaagggctgcacggtggaggagctgctccgcgggtgcatcgaagccttcgatgactccgggaaggtgcgggacccgcagctggtgcgcatgttcctcatgatgcacccctggtacatcccctcctctcagctggcggccaagctgctccacatctaccaacaatcccggaaggacaactccaattccctgcaggtgaaaacgtgccacctggtcaggtactggatctccgccttcccagcggagtttgacttgaacccggagttggctgagcagatcaaggagctgaaggctctgctagaccaagaagggaaccgacggcacagcagcctaatcgacatagacagcgtccctacctacaagtggaagcggcaggtgactcagcggaaccctgtgggacagaaaaagcgcaagatgtccctgttgtttgaccacctggagcccatggagctggcggagcatctcacctacttggagtatcgctccttctgcaagatcctgtttcaggactatcacagtttcgtgactcatggctgcactgtggacaaccccgtcctggagcggttcatctccctcttcaacagcgtctcacagtgggtgcagctcatgatcctcagcaaacccacagccccgcagcgggccctggtcatcacacactttgtccacgtggcggagaagctgctacagctgcagaacttcaacacgctgatggcagtggtcgggggcctgagccacagctccatctcccgcctcaaggagacccacagccacgttagccctgagaccatcaagctctgggagggtctcacggaactagtgacggcgacaggcaactatggcaactaccggcgtcggctggcagcctgtgtgggcttccgcttcccgatcctgggtgtgcacctcaaggacctggtggccctgcagctggcactgcctgactggctggacccagcccggacccggctcaacggggccaagatgaagcagctctttagcatcctggaggagctggccatggtgaccagcctgcggccaccagtacaggccaaccccgacctgctgagcctgctcacggtgtctctggatcagtatcagacggaggatgagctgtaccagctgtccctgcagcgggagccgcgctccaagtcttcgccaaccagccccacgagttgcaccccaccaccccggcccccggtattggaggagtggacctcggctgccaaacccaagctggatcaggccctcgtggtggagcacatcgagaagatggtggagtctgtgttccggaactttgacgtcgatggggatggccacatctcacaggaagaattccagatcatccgtgggaacttcccttacctcagcgcctttggggacctcgaccagaaccaggatggctgcatcagcagggaggagatggtttcctatttcctgcgctccagctctgtgttgggggggcgcatgggcttcgtacacaacttccaggagagcaactccttgcgccccgtcgcctgccgccactgcaaagccctgatcctgggcatctacaagcagggcctcaaatgccgagcctgtggagtgaactgccacaagcagtgcaaggatcgcctgtcagttgagtgtcggcgcagggcccagagtgtgagcctggaggggtctgcaccctcaccctcacccatgcacagccaccatcaccgcgccttcagcttctctctgccccgccctggcaggcgaggctccaggcctccagagatccgtgaggaggaggtacagacggtggaggatggggtgtttgacatccacttgtaatagatgctgtggttggatcaaggactcattcctgccttggagaaaatacttcaaccagagcagggagcctgggggtgtcggggcaggaggctggggatgggggtgggatatgagggtggcatgcagctgagggcagggccagggctggtgtccctaaggttgtacagactcttgtgaatatttgtattttccagatggaataaaaaggcccgtgtaattaaccttcaaaaaaaaaaaaaaaaaaaa

SEQ ID NO: 2743 - DNA, 2435 bp, Homo sapiens
acctggccgccatgcgcctctcctcctccccacctcgtggcccgcagcagctctccagctttggctccgtggactggctctcccagagcagctgctcagggccgacccacacccccaggcctgccgacttctccctggggagcctccctggcccgggccagacatccggcgcccgggagccccctcaggccgtcagcatcaaggaggccgccgggtcctcaaatctgcctgcgccggagaggaccatggccgggttgagtaaggagccaaataccttgcgggccccccgtgtccgcacagccttcaccatggagcaggtccgcaccttggagggcgtcttccagcaccaccagtacctgagccctctggagcggaagaggctggccagggagatgcagctctcagaggtccagataaaaacctggtttcagaatcgccgcatgaaacacaaacggcaaatgcaggacccccagctgcacagccccttctcggggtctctccatgcgcccccagctttctactcaacgtcttctggccttgccaatggcctgcagctgctgtgcccttgggcacccctgtccgggccccaggctctgatgctgccccctggctccttctggggtctctgccaagtggcacaagaggccctggcatctgcgggagcttcctgctgcgggcagcctctggcgtcccacccccctaccccaggccggccttcgctgggaccagccctgtccacggggccccggggcctgtgtgctatgccacagacgggggatgcattttgaggaggcacctctgactcccacactcgcggtcttgctgatcgcacctggctcctacctggaggactcagttgttctgtttacatcctggtggcacctctcaccctgacccacacaaaggttctggagattactggagaatatatataaatatatatatgtacgtatatatgtaaatacacatatacgtatatataaatatatatatacatatatgtgtgtgtgtatatatatatatatatatattttttttttttttttttttgagacggagtgttgctctgtcacccaggctggagtgcaatgacgcaatctcggctcactgcaacctccgcctcctgggttcaagcaattctccagcctcagcctcccaagtagctaggattacagacacccgccaccacgcccggctaattttttctatttttagtagaaatggggtttcaccatgttagccaggctggtctcaaactcctgaccctgtgatccgcccgcctcggcctcccaaagtgctgggattacgggcatgagccactgcacccggccctgagaatatatttattaaagccacctcttcactgaaagttaccgaaagagtcggtttaggaaggaaacgaagggtcagtgaacagagtcaaatgcagaagtgggcttgtcatgggtagggctttcggcgtacgataaaaggatcatttgttttttaaaaggggttggaaaaactgattttccagttggaaacagtaaaggttgtaagctttgtgtgtacaaaagaaaacagggaatgcaggtgtgtttatagcgttgtggttcaagtccctcttaacaagaactccaaagctggaaagcaggagggaacaaaggtgaacatgaaggcgaggatgctggggccctgcagtgcgctctaggctgtgcgtgagccgggactgtacccacagcttgctgagggctgctcttcttgggccagggaaagcagggcagccgggacctgcggctgtgcctggactgaagctgtcccgcaggtccccaccctccaacacgtgctcacctgtccccctcctcgcagcagcctcgggacaaaacaatgactcaaggacagcacttctcgcagaaggtctggaagtgcccagaatgggaggcacggaagcccctcccggggaggactcccgcgttgatggaccgttcttggtgcagactcctgactgcgtgcatgaaacctgagacaagtgcaattccttccatgtcgccccagagtgcccaggaggcaggcagtgcggggtgcccaggcagacgggttcagcctacagaactggaggcgacctgtgaaacccacccgggcaccccaacaggaacagaagcgtggtcctgcggctgcgtccccagcgagtttcactttccccttgctcgtttctcccttgttgtaagtgtttacaactggcatgtgcttttaaacgtcaggtaagaggggaacagctgctgtacatcgtcctggcgagtgacaatgtgacagaagcctgggcgaggccctcggagggcagcagctggacaggggctactgggtttggcctggacagcactgatttgtggatgtggatgggggcacgttgtccgtgataaaagtacaagtgcccctcacaaaaaaaaaaaaaaaaa

SEQ ID NO: 2744 - DNA, 4950 bp, Homo sapiens; identical to SEQ ID NO: 796

SEQ ID NO: 2745 - DNA, 2254 bp, Homo sapiens
gatccctcccatctcacagtacctcacaggtctcttcccccgagcagtgcattgctggagcgaggagaagctcacgaatcagctgcaggtctctgttttgaaaaagcagagatacagaggcagaggaaaggggtggactcctatgtgacctgttcttagagcaagacaatcaccatctgaattccagaagccctgttcatggttggggatattttctcgactgcatggaatcagaaagaagcaaaaggatgggaaatgcctgcattcccctgaaaagaattgcttatttcctatgtctcttatctgcgcttttgctgactgaggggaagaaaccagcgaagccaaaatgccctgccgtgtgtacttgtaccaaagataatgctttatgtgagaatgccagatccattccacgcaccgttcctcctgatgttatctcattatcctttgtgagatctggttttactgaaatctcagaagggagttttttattcacgccatcgctgcagctcttgttattcacatcgaactcctttgatgtgatcagtgatgatgcttttattggtcttccacatctagagtatttattcatagaaaacaacaacatcaagtcaatttcaagacatactttccggggactaaagtcattaattcacttgagccttgcaaacaacaatctccagacactcccaaaagatattttcaaaggcctggattctttaacaaatgtggacctgaggggtaattcatttaattgtgactgtaaactgaaatggctagtggaatggcttggccacaccaatgcaactgttgaagacatctactgcgaaggccccccagaatacaagaagcgcaaaatcaatagtctctcctcgaaggatttcgattgcatcattacagaatttgcaaagtctcaagacctgccttatcaatcattgtccatagacactttttcttatttgaatgatgagtatgtagtcatcgctcagccttttactggaaaatgcattttccttgaatgggaccatgtggaaaagaccttccggaattatgacaacattacaggcacatccactgtagtatgcaagcctatagtcattgaaactcagctctatgttattgtggcccagctgtttggtggctctcacatctataagcgagacagttttgcaaataaattcataaaaatccaggatattgaaattctcaaaatccgaaaacccaatgacattgaaacattcaagattgaaaacaactggtactttgttgttgctgacagttcaaaagctggttttactaccatttacaaatggaacggaaacggattctactcccatcaatccttacacgcgtggtacagggacactgatgtggaatatctagaaatagtcagaacacctcagacactcagaacgcctcatttaattctgtctagtagttcccagcgtcctgtaatttatcagtggaacaaagcaacacaattattcactaaccaaactgacattcctaacatggaggatgtgtacgcagtgaagcacttctcagtgaaaggggacgtgtacatttgcttgacaagattcattggtgattccaaagtcatgaaatggggaggctcctcgttccaggatattcagaggatgccatcgcgaggatccatggtgttccagcctcttcaaataaataattaccaatatgcaattcttggaagtgattactcctttactcaagtgtataactgggatgcagagaaagccaaatttgtgaaatttcaggaattaaatgttcaggcaccaagatcattcacacatgtgtccattaataagcgtaattttctttttgcttccagttttaagggaaatacacagatttacaaacatgtcatagttgacttaagcgcatgagacaccaaattctgtggctgccatcagaaattttctacagtacatgacccggatgaactcaatgcatgatgactcttcttatcacacttgcaaatgaatgcctttcaaacattgagactgctagaaccaagcactaccagtatctccatccttaactgtccagtccagtgatgtgggaagttaccttttataagacaaaatttaattgtgtaactgttctttgcagtgaagatgtgtaaataagcgtttaatggtatctgttactccaaaaagaaatattaatatgtacttttccatttatttattcatgtgtacagaaacaactgccaaataaaatgtttacattttctttcata

SEQ ID NO: 2746 - DNA, 1172 bp, Homo sapiens
tttttttaaagagagaaaagggaatttcttgtgtttgaaactaagcaaacctcagatgagtctattcccttcatgtcagatatggggaatggtatcatatcacagttcataattactaaggatgaaaataggggcccaacttaatagtcatacgtaaacactacccaaaaattaacacttaagccaatgtgaatgttacgttgacagatcctcagacccagaaatcttcccatttgtaaaataggattagactagcccaaattttctccttttggaagaaatgctccatgctcaaacaacatagagcatatttgctatgtgcagtagggcagctttgtttatatgttacatattttatcaccgatgtattttttcctctggggctcatgctttttccctctctctagttcagatggtttgtcaacagtgaccctggttggaatcatagttggggtcttactagccatcggcttcattggtggaatcatcgttgtggttatgcgaaaaatgtcgggaaggtactcggaggtaaatagcttacacccatgtgataggcaaatgaaagccatcgtgtctagaactcaaatctttgaactaatagaaatctctgatataagctgggtgtggtggctcgtgcctgtagtctcagctgctgggcaactgcagaccagcctgggcaacatagtaagaccctgtctcaaaaaaataatctctggtacaatggtcatgttccaaagttccttacttgggcctcttgagtgcagtggctcacacctggaatcccagtgctttgagaggctgaggaggcaggaggttcacttgtgcccaggaatttgaggctgcagtgagctatgattgtgccactgcactccagcctgggtgacagagcaagactgtgctctcttaaaaataagaaagagcctcttcatcttcaaaaggactacatctgaagtttccccagaaggacaaatgtctacttagaccttataaatttccaaaataagagagtcagagccagaggtggcttgtaagttgacttctgttgagatctgaccacatttgatctcttgttttaattttccaactaactgaacttggaagaaaacccaaaccaagttttaatctgatgcctaatcagcccgtctccaaccatcagagaaaaggcttctaga

SEQ ID NO: 2747 - DNA, 865 bp, Homo sapiens
gctgcctagggtctggaaagctcgggcaccctccctctccggggctcctgctcccacccctccggcccccccaccgtcgcgctcctccaggctgggcctgtggccgcggtgcttttaattttcccccagctcagaatcttgctgctcggcccccaggagagcaacaactcaacgggaacgatgtggaaggtgtcagctctgctcttcgttttgggaagcgcgtcgctctgggtcctggcagaaggagccagcacaggccagccagaagatgacactgagactacaggtttggaaggcggcgttgccatgccaggtgccgaagatgatgtggtgactccaggaaccagcgaagaccgctataagtctggcttgacaactctggtggcaacaagtgtcaacagtgtaacaggcattcgcatcgaggatctgccaacttcagaaagcacagtccacgcgcaagaacaaagtccaagcgccacagcctcaaacgtggccaccagtcactccacggagaaagtggatggagacacacagacaacagttgagaaagatggtttgtcaacagtgaccctggttggaatcatagttggggtcttactagccatcggtttcattggtggaatcatcgttgtggttatgcgaaaaatgtcgggaaggtactcgccctaaagagctgaagggttacgccctgcttgccaacgtgctttaaaaaaagaccgtttctgactctgtggccctgtccctgagctcgtggggagaagatgaccctgggaacatttgcgggcccattcagattccacggtgactttccgtttgccaaattaaccgaggaaagacctttcaccagatttggttcttaaacttt

SEQ ID NO: 2748 - DNA, 5233 bp, Homo sapiens
  misc_feature (355)..(355): n is a, c, g, or t
tgccccgcgcgctctgctacgggcccgctgggcctccgcgccttctagcttccggagcccactttgatcggggccataatacctattgagatcccctcttctgtcttgtaccttcgccactggcatcggatttgcagaagcctgcgtgggatcagaggaccgccctccccacaacaaccggcccctgcatcttagcagccgttggaagccccagctcttttaccgccaagttcatccttgggagacagaagacgcgtgatctcctctccgctgctcttggggtctccttgcagccctggccaggcggattcatcctcaggacctaaagttgcccaaggagctcctgctctgccanaggagggtggaaagggcggtgggaggcgtgtgcctgagtgggctctactgccttgttccatattattttgtgcacattttccctggcactctgggttgctagccccgccgggcactgggcctcagacactgcgcggttccctcggagcagcaagctaaagaaagcccccagtgccggcgaggaaggaggcggcggggaaagatgcgcggcgttggctggcagatgctgtccctgtcgctggggttagtgctggcgatcctgaacaaggtggcaccgcaggcgtgcccggcgcagtgctcttgctcgggcagcacagtggactgtcacgggctggcgctgcgcagcgtgcccaggaatatcccccgcaacaccgagagactggatttaaatggaaataacatcacaagaattacgaagacagattttgctggtcttagacatctaagagttcttcagcttatggagaataagattagcaccattgaaagaggagcattccaggatcttaaagaactagagagactgcgtttaaacagaaatcaccttcagctgtttcctgagttgctgtttcttgggactgcgaagctatacaggcttgatctcagtgaaaaccaaattcaggcaatcccaaggaaagctttccgtggggcagttgacataaaaaatttgcaactggattacaaccagatcagctgtattgaagatggggcattcagggctctccgggacctggaagtgctcactctcaacaataacaacattactagactttctgtggcaagtttcaaccatatgcctaaacttaggacttttcgactgcattcaaacaacctgtattgtgactgccacctggcctggctctccgactggcttcgccaaaggcctcgggttggtctgtacactcagtgtatgggcccctcccacctgagaggccataatgtagccgaggttcaaaaacgagaatttgtctgcagtggtcaccagtcatttatggctccttcttgtagtgttttgcactgccctgccgcctgtacctgtagcaacaatatcgtagactgtcgtgggaaaggtctcactgagatccccacaaatcttccagagaccatcacagaaatacgtttggaacagaacacaatcaaagtcatccctcctggagctttctcaccatataaaaagcttagacgaattgacctgagcaataatcagatctctgaacttgcaccagatgctttccaaggactacgctctctgaattcacttgtcctctatggaaataaaatcacagaactccccaaaagtttatttgaaggactgttttccttacagctcctattattgaatgccaacaagataaactgccttcgggtagatgcttttcaggatctccacaacttgaaccttctctccctatatgacaacaagcttcagaccatcgccaaggggaccttttcacctcttcgggccattcaaactatgcatttggcccagaacccctttatttgtgactgccatctcaagtggctagcggattatctccataccaacccgattgagaccagtggtgcccgttgcaccagcccccgccgcctggcaaacaaaagaattggacagatcaaaagcaagaaattccgttgttcaggtacagaagattatcgatcaaaattaagtggagactgctttgcggatctggcttgccctgaaaagtgtcgctgtgaaggaaccacagtagattgctctaatcaaaagctcaacaaaatcccggagcacattccccagtacactgcagagttgcgtctcaataataatgaatttaccgtgttggaagccacaggaatctttaagaaacttcctcaattacgtaaaataaactttagcaacaataagatcacagatattgaggagggagcatttgaaggagcatctggtgtaaatgaaatacttcttacgagtaatcgtttggaaaatgtgcagcataagatgttcaagggattggaaaagcctcaaaacttgatgttgagaagcaatcgaataacctgtgtggggaatgacagtttcataggactcagttctgtgcgtatgctttctttgtatgataatcaaattactacagttgcaccaggggcatttgatactctccattctttatctactctaaacctcttggccaatccttttaactgtaactgctacctggcttggttgggagagtggctgagaaagaagagaattgtcacgggaaatcctagatgtcaaaaaccatacttcctgaaagaaatacccatccaggatgtggccattcaggacttcacttgtgatgacggaaatgatgacaatagttgctccccactttctcgctgtcctactgaatgtacttgcttggatacagtcgtccgatgtagcaacaagggtttgaaggtcttgccgaaaggtattccaagagatgtcacagagttgtatctggatggaaaccaatttacactggttcccaaggaactctccaactacaaacatttaacacttatagacttaagtaacaacagaataagcacgctttctaatcagagcttcagcaacatgacccagctcctcaccttaattcttagttacaaccgtctgagatgtattcctcctcgcacctttgatggattaaagtctcttcgattactttctctacatggaaatgacatttctgttgtgcctgaaggtgctttcaatgatctttctgcattatcacatctagcaattggagccaaccctctttactgtgattgtaacatgcagtggttatccgactgggtgaagtcggaatataaggagcctggaattgctcgttgtgctggtcctggagaaatggcagataaacttttactcacaactccctccaaaaaatttacctgtcaaggtcctgtggatgtcaatattctagctaagtgtaacccctgcctatcaaatccgtgtaaaaatgatggcacatgtaatagtgatccagttgacttttaccgatgcacctgtccatatggtttcaaggggcaggactgtgatgtcccaattcatgcctgcatcagtaacccatgtaaacatggaggaacttgccacttaaaggaaggagaagaagatggattctggtgtatttgtgctgatggatttgaaggagaaaattgtgaagtcaacgttgatgattgtgaagataatgactgtgaaaataattctacatgtgtcgatggcattaataactacacatgcctttgcccacctgagtatacaggtgagttgtgtgaggagaagctggacttctgtgcccaggacctgaacccctgccagcacgattcaaagtgcatcctaactccaaagggattcaaatgtgactgcacaccagggtacgtaggtgaacactgcgacatcgattttgacgactgccaagacaacaagtgtaaaaacggagcccactgcacagatgcagtgaacggctatacgtgcatatgccccgaaggttacagtggcttgttctgtgagttttctccacccatggtcctccctcgtaccagcccctgtgataattttgattgtcagaatggagctcagtgtatcgtcagaataaatgagccaatatgtcagtgtttgcctggctatcagggagaaaagtgtgaaaaattggttagtgtgaattttataaacaaagagtcttatcttcagattccttcagccaaggttcggcctcagacgaacataacacttcagattgccacagatgaagacagcggaatcctcctgtataagggtgacaaagaccatatcgcggtagaactctatcgggggcgtgttcgtgccagctatgacaccggctctcatccagcttctgccatttacagtgtggagacaatcaatgatggaaacttccacattgtggaactacttgccttggatcagagtctctctttgtccgtggatggtgggaaccccaaaatcatcactaacttgtcaaagcagtccactctgaattttgactctccactctatgtaggaggcatgccagggaagagtaacgtggcatctctgcgccaggcccctgggcagaacggaaccagcttccacggctgcatccggaacctttacatcaacagtgagctgcaggacttccagaaggtgccgatgcaaacaggcattttgcctggctgtgagccatgccacaagaaggtgtgtgcccatggcacatgccagcccagcagccaggcaggcttcacctgcgagtgccaggaaggatggatggggcccctctgtgaccaacggaccaatgacccttgccttggaaataaatgcgtacatggcacctgcttgcccatcaatgcgttctcctacagctgtaagtgcttggagggccatggaggtgtcctctgtgatgaagaggaggatctgtttaacccatgccaggcgatcaagtgcaagcatgggaagtgcaggctttcaggtctggggcagccctactgtgaatgcagcagtggatacacgggggacagctgtgatcgagaaatctcttgtcgaggggaaaggataagagattattaccaaaagcagcagggctatgctgcttgccaaacaaccaagaaggtgtcccgattagagtgcagaggtgggtgtgcaggagggcagtgctgtggaccgctgaggagcaagcggcggaaatactctttcgaatgcactgacggctcctcctttgtggacgaggttgagaaagtggtgaagtgcggctgtacgaggtgtgtgtcctaaacacactcccggcagctctgtctttggaaaaggttgtatacttcttgaccatgtgggactaatgaatgcttcatagtggaaatatttgaaatatattgtaaaatacagaac

SEQ ID NO: 2749 - DNA, 2236 bp, Homo sapiens; identical to SEQ ID NO: 2742

SEQ ID NO: 2750 - DNA, 2290 bp, Homo sapiens
gaattccctcttaactcttgaagtaaataaataatctttgctggcaggactatgctgaatctccttaggcactctctaattagatgtcctaggtcctcccaattcttagtccttttatacctgtttttctccttctcttattccatttagtttttcaattcatacaaaactgtatccaggccatcacctatcattctatacaacaaatgtttcttctaacatccccacaatatcaccccttaccacaagacctcccttcagcttaatctctcccactctaggttcccacgctgcccctaatcccgcttgaagcagccctgagaaacatcgcccattctctctccataccaccccccaaaaattttcgccaccccaacacttcaacactattttatttttcttattaatataagaaggcaggcatgtcaggcctctgagcccaagccaagccatcgcaacccctgtgacttgcacctatacgcccagatggcctgaagtaactgaagaatcacaaaagaagtgaatatgccttgccccaccttaactgatgacattccaccacaaaagaagtgtaaatggccggtccttgccttaactgatgacattaccttgtgaaagtcctcttcctggctcatcctggctcaaaaagcacccccactgagcaccttgagacccccactcctgcccgccagagaacaaaccccctttgactgtaattttcctttacctacccaaatcctataaaacggccccacccttatctcccttcactgactctcttttcggactcagcccgcctgcacccaggtgaaataaacagctttattgctcacacaaagcctgtttggtggtctcttcacacggacgcacatgaaatttagttgtatccataaggcatatggaggagactaattcctcttccaaagacatgtaccagagtcctggagaggctgagggctggaggtggaagaaaggctctgacaggggtcagaatctgttcaggaaacatagcaaatgcctgatacttttaattagagaaaggtttgaatctccacattcatatatttgcagtccagtgacctttcagtttttttatgcccaaagtgtcaagcatgttaatgttaccattgactgcctccctgaaggtgcagctaccaggggaactgccaggacttcaaagcccacaaccaaaagccagaaaacactaccaagtacaagccccggacactggacccagagcacaccctgggcatctgctctgagatcctctccctggacagagacagctgctccttcagaaacagaggagaccctgaacacaggcaggcctcctgagcttccagccagggccacagccacatggttcagtgcctcccacactctcccagccttggctaccaggagggtggccagaactcagtggttgacagctgacagacagacgtgggcttccatatcgtccgtgccctgggctcagaccatcagtgagaaaaaacctggagggtctctctgggaaactcgttcttccccaccgactactgcagggaccgaggaagccatgaacactacaagccttttggcgcctgctgctgagataatggccacacctggcagcccatcccaggccagccctacctcgggagcattcacccatggcacacagactccgagtccaaccaaggcaacagcccccagatatccacaaacaggtgatctctctgcagagtggccattcactgctggtgaagagccagtcctggtcccaagaccccatcaagtttcaaggtgtcctcagccactcttcaaggtgggagctatggcagctgctcctctcaccctggctattcagaggctcaacccatgcctgatggagctgtgccaattcttccagcaatgcctctgcatgagccagaggagtcccaggacagaggacatgagatactgtcttgaatactattcctggtttctgaagaatgcaacatatatctgtcagagggtgaaaagggtgtcccactcgcacaccttaaagcaaaagtgccttgagaatatctgcaagtctgtgtgaggccttgaaaataacactagggcataacaattacttcaggggatacgccatccaccctggctcttgtcccaagtgggctacatttgaagaattcacccaggctccagctagatcatcagttaatttaaagtggttattcttggaagtagcattttttttccctctcctgtgaatctgtgcaaaacattgaaggtagaagttttcttgttaaaaaaaaaggaattc

SEQ ID NO: 2751 - DNA, 3014 bp, Homo sapiens
gcggagcccacggagcccacggaggagcccacggaggagccccagcgtccgaacgggcagaccccctcgagccgcgaaggagcccgagaagcagccacgatgtgcggaatctttgcctacatgaactacagagtcccccggacgaggaaggagatcttcgaaaccctcatcaagggcctgcagcggctggagtacagaggctacgactcggcaggtgtggcgatcgatgggaataatcacgaagtcaaagaaagacacattcagctggtcaagaaaagggggaaagtcaaggctctcgatgaagaactttacaaacaagacagcatggacttaaaagtggagtttgagacacacttcggcattgcccacacgcgctgggccacccacggggtccccagtgctgtcaacagccaccctcagcgctcagacaaaggcaacgaatttgttgtcatccacaatgggatcatcacaaattacaaagatctgaggaaatttctggaaagcaaaggctacgagtttgagtcagaaacagatacagagaccatcgccaagctgattaaatatgtgttcgacaacagagaaactgaggacattacgttttcaacgttggtcgagagagtcattcagcagttggaaggtgcattcgcgctggttttcaagagtgtccactacccaggagaagccgttgccacacggagaggcagccccctgctcatcggagtccggagcaaatacaagctctccacagaacagatccctatcttatacaggacgtgcactctggagaatgtgaagaatatctgtaagacacggatgaagaggctggacagctccgcctgcctgcatgctgtgggcgacaaggccgtggaattcttctttgcttctgatgcaagcgctatcatagagcacaccaaccgggtcatcttcctggaggacgatgacatcgccgcagtggctgatgggaaactctccattcaccgggtcaagcgctcggccagtgatgacccatctcgagccatccagaccttgcagatggaactgcagcaaatcatgaaaggtaacttcagtgcgtttatgcagaaggagatcttcgaacagccagaatcagttttcaatactatgagaggtcgggtgaattttgaaaccaacacagtgctcctgggtggcttgaaggaccacttgaaggagattcgacgatgccgacggctcatcgtgattggctgtggaaccagctaccacgctgccgtggctacgcggcaagttttggaggaactgactgagcttcctgtgatggttgaacttgctagtgattttctggacaggaacacacctgtgttcagggatgacgtttgctttttcatcagccagtcaggcgagaccgcggacaccctcctggcgctgcgctactgtaaggaccgcggcgctctcaccgtgggcgtcaccaacaccgtgggcagctccatctctcgcgagaccgactgcggcgtccacatcaacgcagggccggagatcggcgtggccagcaccaaggcttataccagtcagttcatctctctggtgatgtttggtttgatgatgtctgaagaccgaatttcactacaaaacaggaggcaagagatcatccgtggcttgagatctttacctgagctgatcaaggaagtgctgtctctggaggagaagatccacgacttggccctggagctctacacgcagagatcgctgctggtgatggggcggggctacaactatgccacctgcctggaaggagccctgaaaattaaagagataacctacatgcactcagaaggcatcctggctggggagctgaagcacgggcccctggcactgattgacaagcagatgcccgtcatcatggtcattatgaaggatccttgcttcgccaaatgccagaacgccctgcagcaagtcacggcccgccagggtcgccccattatactgtgctccaaggacgatactgaaagttccaagtttgcgtataagacaattgagctgccccacactgtggactgcctccagggcatcctgagcgtgattccgctgcagctgctgtccttccacctggctgttctccgaggatatgacgttgacttccccagaaatctggccaagtctgtaactgtggaatgaggctgagaccgtgacaagaccatcaccacctttcatctgattccagacctgtcccaacagcagggatgctacatgggaagagaagtggacatcccacatgttctgcgtgctcctgtagagcttgacagcttccacgtgccttctacccaagtgcttttgcttacagcagatactgtttctctgtgtcctgaagtcgccagaggagaagggaatcattgtttacacatggggatcagagcagacttctccactactgtgcaatagagatacagctctcttcagagtaactgtgaaccttttataaccaacactagagttagttttaaaagacaagatatttataatgacgactgtatagcttttaagttatttttctagtatgtggctttctgtagccgtggtaacggccaaactgttcatcctagctacccatgctctgtgtccaggcttgctcctggcaggtggcattcatctcagatgtgagcacaaggcattggccctctggactcctttctccttttctttcctctctaggctgctcctgaatcctgttctctgacatccgtggagcccctcctgcatccacctatgcctcctataagtccagttgaaatctcagcctccttcaacattttcttctcgtgtgtggcccacatccctccacttctccaacttctgtttaatctgatcacggctctttttaagccctggcagcattttggtccctgctccttgcccatagtaaaacagcttgaaatatcccatgcaagagagtagtttcaagtgggcgactctgctctctatttaaaagcgtgcacaatcaaaagtactatgcaattttaggacaataaagaacatacagttcc

SEQ ID NO: 2752 - DNA, 3443 bp, Homo sapiens
gagcaacctcagcttctagtatccagactccagcgccgccccgggcgcggaccccaaccccgacccagagcttctccagcggcggcgcagcgagcagggctccccgccttaacttcctccgcggggcccagccaccttcgggagtccgggttgcccacctgcaaactctccgccttctgcacctgccacccctgagccagcgcgggcgcccgagcgagtcatggccaacgcggggctgcagctgttgggcttcattctcgccttcctgggatggatcggcgccatcgtcagcactgccctgccccagtggaggatttactcctatgccggcgacaacatcgtgaccgcccaggccatgtacgaggggctgtggatgtcctgcgtgtcgcagagcaccgggcagatccagtgcaaagtctttgactccttgctgaatctgagcagcacattgcaagcaacccgtgccttgatggtggttggcatcctcctgggagtgatagcaatctttgtggccaccgttggcatgaagtgtatgaagtgcttggaagacgatgaggtgcagaagatgaggatggctgtcattgggggtgcgatatttcttcttgcaggtctggctattttagttgccacagcatggtatggcaatagaatcgttcaagaattctatgaccctatgaccccagtcaatgccaggtacgaatttggtcaggctctcttcactggctgggctgctgcttctctctgccttctgggaggtgccctactttgctgttcctgtccccgaaaaacaacctcttacccaacaccaaggccctatccaaaacctgcaccttccagcgggaaagactacgtgtgacacagaggcaaaaggagaaaatcatgttgaaacaaaccgaaaatggacattgagatactatcattaacattaggaccttagaattttgggtattgtaatctgaagtatggtattacaaaacaaacaaacaaacaaaaaacccatgtgttaaaatactcagtgctaaacatggcttaatcttattttatcttctttcctcaatataggagggaagattttaccatttgtattactgcttcccattgagtaatcatactcaaatgggggaaggggtgctccttaaatatatatagatatgtatatatacatgtttttctattaaaaatagacagtaaaatactattctcattatgttgatactagcatacttaaaatatctctaaaataggtaaatgtatttaattccatattgatgaagatgtttattggtatattttctttttcgtccttatatacatatgtaacagtcaaatatcatttactcttcttcattagctttgggtgcctttgccacaagacctagcctaatttaccaaggatgaattctttcaattcttcatgcgtgcccttttcatatacttattttattttttaccataatcttatagcacttgcatcgttattaagcccttatttgttttgtgtttcattggtctctatctcctgaatctaacacatttcatagcctacattttagtttctaaagccaagaagaatttattacaaatcagaactttggaggcaaatctttctgcatgaccaaagtgataaattcctgttgaccttcccacacaatccctgtactctgacccatagcactcttgtttgctttgaaaatatttgtccaattgagtagctgcatgctgttcccccaggtgttgtaacacaactttattgattgaatttttaagctacttattcatagttttatatccccctaaactacctttttgttccccattccttaattgtattgttttcccaagtgtaattatcatgcgttttatatcttcctaataaggtgtggtctgtttgtctgaacaaagtgctagactttctggagtgataatctggtgacaaatattctctctgtagctgtaagcaagtcacttaatctttctacctcttttttctatctgccaaattgagataatgatacttaaccagttagaagaggtagtgtgaatattaattagtttatattactctcattctttgaacatgaactatgcctatgtagtgtctttatttgctcagctggctgagacactgaagaagtcactgaacaaaacctacacacgtaccttcatgtgattcactgccttcctctctctaccagtctatttccactgaacaaaacctacacacataccttcatgtggttcagtgccttcctctctctaccagtctatttccactgaacaaaacctacgcacataccttcatgtggctcagtgccttcctctctctaccagtctatttccattctttcagctgtgtctgacatgtttgtgctctgttccattttaacaactgctcttacttttccagtctgtacagaatgctatttcacttgagcaagatgatgtatggaaagggtgttggcactggtgtctggagacctggatttgagtcttggtgctatcaatcaccgtctgtgtttgagcaaggcatttggctgctgtaagcttattgcttcatctgtaagcggtggtttgtaattcctgatcttcccacctcacagtgatgttgtggggatccagtgagatagaatacatgtaagtgtggttttgtaatttgaaaagtgctatactaagggaaagaattgaggaattaactgcatacgttttggtgttgcttttcaaatgtttgaaaataaaaaaatgttaagaaatgggtttcttgccttaaccagtctctcaagtgatgagacagtgaagtaaaattgagtgcactaaacgaataagattctgaggaagtcttatcttctgcagtgagtatggcccaatgctttctgtggctaaacagatgtaatgggaagaaataaaagcctacgtgttggtaaatccaacagcaagggagatttttgaatcataataactcataaggtgctatctgttcagtgatgccctcagagctcttgctgttagctggcagctgacgctgctaggatagttagtttggaaatggtacttcataataaactacacaaggaaagtcagccaccgtgtcttatgaggaattggacctaataaattttagtgtgccttccaaacctgagaatatatgcttttggaagttaaaatttaaatggcttttgccacatacatagatcttcatgatgtgtgagtgtaattccatgtggatatcagttaccaaacattacaaaaaaattttatggcccaaaatgaccaacgaaattgttacaatagaatttatccaattttgatctttttatattcttctaccacacctggaaacagaccaatagacattttggggttttataatgggaatttgtataaagcattactctttttcaataaattgttttttaatttaaaaaaaggaaaaaaaaaaaaaaaaa

SEQ ID NO: 2753 - DNA, 1658 bp, Homo sapiens
actccaaagctcaagtcggcccccgtcttttctttccacacccctgtgcccgtcgcatgctggccgggtgagcggccgggccgaggattcgggtgcccggggccgcgtcgccccgtcgggtactgagctgagcgcaccatggccggctgctgctgcctgtccgcggaggagaaggagtcgcagcgcatcagcgcggagatcgagcgacagcttcgtcgggacaagaaggacgcgcgccgtgagcttaagctgctgctgctgggaactggtgaaagtgggaaaagcacctttatcaagcagatgagaattatccatgggtctggttacagcgacgaagacagaaaggggttcacgaagctggtttaccaaaacatattcaccgccatgcaagccatgatcagagcgatggacacgctaaggatacagtatgtgtgtgaacagaataaggaaaatgcccagataatcagagaagtggaagtggacaaggtctccatgctctccagggagcaggtggaggccatcaagcagctctggcaagatccaggcatccaggagtgttacgacaggaggagggagtaccagctgtcggactctgccaaatattacctgactgacattgaccgcatcgccacaccatcattcgtgcctacccaacaagatgtgcttcgcgtccgagtgcccaccaccggcatcattgagtatccatttgacttggaaaacatcatctttcggatggtggatgttggtggccaacgatcggaaagacggaagtggattcactgctttgagagtgtcacctccattattttcttggttgctctgagtgaatatgaccaggtcctggctgagtgtgacaacgagaatcgcatggaagagagcaaagccttatttaaaaccatcatcacctacccctggtttctgaattcgtctgtgattttattcttgaacaagaaggatcttttggaagagaaaatcatgtactctcatctaattagctatttcccagaatacacaggaccgaaacaggatgtcagagctgccagagactttatcctgaagctttaccaagatcagaatcctgacaaagagaaagtcatctactctcacttcacatgtgctacagatacagacaatattcgctttgtgtttgctgctgtcaaagacacaattctacagctaaacctaagggaattcaaccttgtctaaaagctgctgcccactcctcccctataacagaagatgtgatttgcaaactccttgttttatttgcaagtgcttctgacatcaccagagccagtcccatgccaggaactaaggatgtcatgtagatcgtggggacagagatgggtgatggaacttggaagatatttgagtttaccaacatactttaaaagtccttacatcccaaattgtgtttataattattttcttgacttttggctataagattttgtgtaatttttgaatttggtgttttctagaatttttaaaagccactttgatttagttttaaatatgtttaaaaatagcgattaaaattatgtaagcaaggagcctgttagtttatagatcatgccttcaaacctctagagttaatttgggtgacttttttaaaaataagaatgttaatgggtttgaagctttttattaaaccttgt

SEQ ID NO: 2754 - DNA, 1891 bp, Homo sapiens
ggacgccgggctaggggcgcgtcatgtggccgctcacggtcccgccgccgctgctgctgctgctgtgctcaggcctggccggacagactctcttccagaacccagaagagggctggcagctgtacacctcagcccaggcccctgacgggaaatgcatctgcacggccgtgatcccagcgcagagtacctgctctcgagatggcaggagtcgggagctgcggcaactgatggagaaggtccagaacgtctcccagtccatggaggtccttgagttgcggacgtatcgcgacctccagtatgtacgcggcatggagaccctcatgcggagcctggatgcgcagctccgggcagctgatgggtccctctcggccaagagcttccaggagctgaaggacaggatgatggaactgttgcccctgagctcggtcctggagcagtacaaggcagacacgcggaccattgtacgcttgcgggaggaggtgaggaatctctccggcagtctggcggccattcaggaggagatgggtgcctacgggtatgaggacctgcagcaacgggtgatggccctggaggcccggctccacgcctgcgcccagaagctgggctgtgggaagctgaccggggtcagtaaccccatcaccgttcgggccatggggtcccgcttcggctcctggatgactgacacgatggcccccagtgcggatagccgggtctggtacatggatggctattacaaaggccgccgggtcctggagttccgtaccctgggagacttcatcaaaggccagaactttatccagcacctgctgccccagccgtgggcgggcacgggccacgtggtgtacaacggctccctgttctataacaagtaccagagcaacgtggtggtcaaataccacttccgctcgcgctctgtgctggtgcagaggagcctcccgggcgccggttacaacaacaccttcccctactcctggggcggcttctccgacatggacttcatggtggacgagagcgggctctgggctgtgtacaccaccaaccagaacgcgggcaacatcgtggtcagccggctggacccgcacaccctcgaggtcatgcggtcctgggacaccggctaccccaagcgcagcgctggcgaggccttcatgatctgcggtgtgctctacgtgaccaactcccacctggctggggccaaggtctacttcgcctattttaccaacacgtccagttacgagtacacggacgtgcccttccacaaccagtattcccacatctcgatgctggattacaacccccgggagcgcgccctctatacctggaacaacggccaccaggtgctctacaatgtcaccctgtttcacgtcatcagcacctctggggacccctgagccaatgctgtggctcgggctgctgcctggggggcctccgggggctgggggcccttttcattctgcctgtgtccctcaagggtgatctctctgtctctgtcacgccctttctccccgcctttttgctgggcttttgttctctgcctatgtatttctgtctattttttcaatttcccctcttctcctttattgatctctgcttttaatacaccacttctttctttctgcctttttatggatgtctttttctttttatggctctggttctccagttctttccgtctctgcctctctctgtctctctctctctgtccttccacccctccctccttgcttcccacccattcctcatccctcactcccacccccacccccacccccaggagttgagtgcatggatctgtttctttttttatttacactttttctttccggtttgccggaataaacaggacctttgacaaaaaaaaaaaaaaaaaaaaaaaaaaaaaaaaaaaaaaaaa

SEQ ID NO: 2755 - DNA, 4670 bp, Homo sapiens
gcggcgcgcacactgctcgctgggccgcggctcccgggtgtcccaggcccggccggtgcgcagagcatggcgggtgcgggcccgaagcggcgcgcgctagcggcgccggcggccgaggagaaggaagaggcgcgggagaagatgctggccgccaagagcgcggacggctcggcgccggcaggcgagggcgagggcgtgaccctgcagcggaacatcacgctgctcaacggcgtggccatcatcgtggggaccattatcggctcgggcatcttcgtgacgcccacgggcgtgctcaaggaggcaggctcgccggggctggcgctggtggtgtgggccgcgtgcggcgtcttctccatcgtgggcgcgctctgctacgcggagctcggcaccaccatctccaaatcgggcggcgactacgcctacatgctggaggtctacggctcgctgcccgccttcctcaagctctggatcgagctgctcatcatccggccttcatcgcagtacatcgtggccctggtcttcgccacctacctgctcaagccgctcttccccacctgcccggtgcccgaggaggcagccaagctcgtggcctgcctctgcgtgctgctgctcacggccgtgaactgctacagcgtgaaggccgccacccgggtccaggatgcctttgccgccgccaagctcctggccctggccctgatcatcctgctgggcttcgtccagatcgggaagggtgatgtgtccaatctagatcccaacttctcatttgaaggcaccaaactggatgtggggaacattgtgctggcattatacagcggcctctttgcctatggaggatggaattacttgaatttcgtcacagaggaaatgatcaacccctacagaaacctgcccctggccatcatcatctccctgcccatcgtgacgctggtgtacgtgctgaccaacctggcctacttcaccaccctgtccaccgagcagatgctgtcgtccgaggccgtggccgtggacttcgggaactatcacctgggcgtcatgtcctggatcatccccgtcttcgtgggcctgtcctgcttcggctccgtcaatgggtccctgttcacatcctccaggctcttcttcgtggggtcccgggaaggccacctgccctccatcctctccatgatccacccacagctcctcacccccgtgccgtccctcgtgttcacgtgtgtgatgacgctgctctacgccttctccaaggacatcttctccgtcatcaacttcttcagcttcttcaactggctctgcgtggccctggccatcatcggcatgatctggctgcgccacagaaagcctgagcttgagcggcccatcaaggtgaacctggccctgcctgtgttcttcatcctggcctgcctcttcctgatcgccgtctccttctggaagacacccgtggagtgtggcatcggcttcaccatcatcctcagcgggctgcccgtctacttcttcggggtctggtggaaaaacaagcccaagtggctcctccagggcatcttctccacgaccgtcctgtgtcagaagctcatgcaggtggtcccccaggagacatagccaggaggccgagtggctgccggaggagcatgcgcagaggccagttaaagtagatcacctcctcgaacccactccggttccccgcaacccacagctcagctgcccatcccagtccctcgccgtccctcccaggtcgggcagtggaggctgctgtgaaaactctggtacgaatctcatccctcaactgagggccagggacccaggtgtgcctgtgctcctgcccaggagcagcttttggtctccttgggccctttttcccttccctcctttgtttacttatatatatattttttttaaacttaaattttgggtcaacttgacaccactaagatgattttttaaggagctgggggaaggcaggagccttcctttctcctgccccaagggcccagaccctgggcaaacagagctactgagacttggaacctcattgctacgacagacttgcactgaagccggacagctgcccagacacatgggcttgtgacattcgtgaaaaccaaccctgtgggcttatgtctctgccttagggtttgcagagtggaaactcagccgtagggtggcactgggagggggtgggggatctgggcaaggtgggtgattcctctcaggaggtgcttgaggccccgatggactcctgaccataatcctagccctgagacaccatcctgagccagggaacagccccagggttggggggtgccggcatctcccctagctcaccaggcctggcctctgggcagtgtggcctcttggctatttctgtgtccagttttggaggctgagttctggttcatgcagacaaagccctgtccttcagtcttctagaaacagagacaagaaaggcagacacaccgcggccaggcacccatgtgggcgcccaccctgggctccacacagcagtgtcccctgccccagaggtcgcagctaccctcagcctccaatgcattggcctctgtaccgcccggcagccccttctggccggtgctgggttcccactcccggcctaggcacctccccgctctccctgtcacgctcatgtcctgtcctggtcctgatgcccgttgtctaggagacagagccaagcactgctcacgtctctgccgcctgcgtttggaggcccctgggctctcacccagtccccacccgcctgcagagagggaactagggcaccccttgtttctgttgttcccgtgaatttttttcgctatgggaggcagccgaggcctggccaatgcggcccactttcctgagctgtcgctgcctccatggcagcagccaaggacccccagaacaagaagacccccccgcaggatccctcctgagctcggggggctctgccttctcaggccccgggcttcccttctccccagccagaggtggagccaagtggtccagcgtcactccagtgctcagctgtggctggaggagctggcctgtggcacagccctgagtgtcccaagccgggagccaacgaagccggacacggcttcactgaccagcggctgctcaagccgcaagctctcagcaagtgcccagcggagcctgccgcccccacctgggcaccgggaccccctcaccatccagtgggcccggagaaacctgatgaacagtttggggactcaggaccagatgtccgtctctcttgcttgaggaatgaagacctttattcacccctgccccgttgcttcccgctgcacatggacagacttcacagcgtctgctcataggacctgcatccttcctggggacgaattccactcgtccaagggacagcccacggtctggaggccgaggaccaccagcaggcaggtggactgactgtgttgggcaagacctcttccctctgggcctgttctcttggctgcaaataaggacagcagctggtgccccacctgcctggtgcattgctgtgtgaatccaggaggcagtggacatcgtaggcagccacggccccgggtccaggagaagtgctccctggaggcacgcaccactgcttcccactggggccggcggggcccacgcacgacgtcagcctcttaccttcccgcctcggctaggggtcctcgggatgccgttctgttccaacctcctgctctgggacgtggacatgcctcaaggatacagggagccggcggcctctcgacggcacgcacttgcctgttggctgctgcggctgtgggcgagcatgggggctgccagcgtctgttgtggaaagtagctgctagtgaaatggctggggccgctggggtccgtcttcacactgcgcaggtctcttctgggcgtctgagctggggtgggagctcctccgcagaaggttggtggggggtccagtctgtgatccttggtgctgtgtgccccactccagcctggggaccccacttcagaaggtaggggccgtgtcccgcggtgctgactgaggcctgcttccccctccccctcctgctgtgctggaattccacagggaccagggccaccgcaggggactgtctcagaagacttgatttttccgtccctttttctccacactccactgacaaacgtccccagcggtttccacttgtgggcttcaggtgttttcaagcacaacccaccacaacaagcaagtgcattttcagtcgttgtgcttttttgttttgtgctaacgtcttactaatttaaagatgctgtcggcaccatgtttatttatttccagtggtcatgctcagccttgctgctctgcgtggcgcaggtgccatgcctgctccctgtctgtgtcccagccacgcagggccatccactgtgacgtcggccgaccaggctggacaccctctgccgagtaatgacgtgtgtggctgggaccttctttattctgtgttaatggctaacctgttacactgggctgggttgggtagggtgttctggcttttttgtggggtttttatttttaaagaaacactcaatcatcctaaaaaaaaaaaaaaaaaaaaaaaaaaaaaaaaaaaaaaaaaaaaaaaaaaaaaaaaaaaaaaaaaaaaaaaaaaaaaaaaaaaaaaaaaaaaaaaaaaaaaaaaaaaaaaaaaaaaaaaaaaaaaaaaaaa

SEQ ID NO: 2756 - DNA, 2032 bp, Homo sapiens; identical to SEQ ID NO: 1510

SEQ ID NO: 2757 - DNA, 1399 bp, Homo sapiens; identical to SEQ ID NO: 676

SEQ ID NO: 2758 - DNA, 473 bp, Homo sapiens; identical to SEQ ID NO: 541

SEQ ID NO: 2759 - DNA, 1124 bp, Homo sapiens; identical to SEQ ID NO: 2543

SEQ ID NO: 2760 - DNA, 2062 bp, Homo sapiens; identical to SEQ ID NO: 1933

SEQ ID NO: 2761 - DNA, 2858 bp, Homo sapiens; identical to SEQ ID NO: 1464

SEQ ID NO: 2762 - DNA, 897 bp, Homo sapiens; identical to SEQ ID NO: 580

SEQ ID NO: 2763 - DNA, 1909 bp, Homo sapiens
tattagtaatatgctgcctttggaagatgaaaacaaactagtgccaaggaggcgtattcttcaatatttggaatagacgtgttctcaagacaatggcttcaaaggtctcctgtttgtatgttttgacagttgtgtgctgggccagcgctctctggtacttgagtataactcgccctacttcttcttacactggctccaaaccattcagccacctaacagttgccaggaaaaacttcacctttggcaacataagaactcgacctatcaacccacattcttttgaatttcttatcaacgagcccaataaatgtgagaaaaacattccttttcttgttatcctcatcagcaccactcacaaggaatttgatgcccgtcaggcaatcagagagacgtggggggatgagaacaactttaaggggatcaagatagccaccctgttcctcctgggcaagaatgctgatcctgttctcaatcagatggtggagcaagagagccaaatcttccatgatatcatcgtggaggactttattgactcctaccataaccttaccctcaaaacattaatggggatgagatgggtggccactttttgttcaaaagccaagtatgtcatgaaaacagacagcgacatttttgtaaacatggacaatcttatttataaattactgaaaccctccaccaagccacgaagaaggtattttactggctatgtcattaatggaggaccgattcgggatgtccgcagtaaatggtatatgcccagggatttgtacccagacagtaactacccacctttctgttcggggactggctacatcttttcagccgatgtagctgaactcatttacaagacctcactccacacaaggctgcttcaccttgaagacgtatatgtgggactgtgtcttcgaaagctgggcatacatcctttccagaacagtggcttcaatcactggaaaatggcctacagtttgtgtaggtatcgccgagttatcactgtgcatcagatctctccagaagaaatgcacagaatctggaatgacatgtcaagcaagaaacatctcagatgttaggatttttaccaatgtaaatatgtttcttttctttttttaagaaatgggacctaaggtgttggtattttccaggtgtcgggggaaatgaactggtgaaggggttttgtaaagtttttgcttcctgctataagttcttttcttggattaccaatttatgaatgttagactctggtcatagaaacaataaatgagttagaagggccagatttcattctcagtcccagagcattgctatttatctcaaaaagtgacttccaaacaactcttaggattgacgtaccgtgcatctgagataaaaatttggttctgggaaactgaaactcacagtaatgtgtcatatcatccctgcaaaaattaatacacaaatagaaaccattttcaaaagcaattcagaaaggatgcacagtcaggaagacacactggatgtgattattaatatcgtgtgtgttgttacattatatttttacatatattcccatgtaatgtgtacagtctttgcagttccaccaagaaatgaacttggtacctgcagagtggctgcagttaaatagatgggagtttaaatttgagaatcaaacattctatgtgtttggaagacaactctgcttgctcatccaaggattaaatctggtcagcaggtggaatgtgtataaaatgctacttaacaaagtaaacaaaagattttttttttctttttttttctttcttttttgttttgctctttcagaacaaacattaaatggtgcctccaaggaaactttgccaaatataatctcacctgcttccttccagacagtgtcgctaagtgcatttcacagtttttggatctggcaggc

SEQ ID NO: 2764 - DNA, 2389 bp, Homo sapiens
taatgagagggaaaacaagtatgaagctgtgtggctgaaaccgtcttggcaagttagggaaagaaaacggaagtcactggggctgatcacagtgctaagcatgagagcactgcaagatgaggtcacggaggtgggcagggaccggcttgtgccaggccttgctggcagggtgaagagtttgccttttctctgcgtacaatggaaaggagaagaggttttaagcaagagaatggcttggtcatgtgtatgtctttgagacaccctggctagtctatgtatgatgcaaaaggtgggtggggcagggtgacaagaaaatactgttccggagcttcctgtggctgtgcctataagaggtggtggtggtggtgtggaaggaggtgtggcagtgaataaacagagatgtagaaacagcgtgtacatatattttaaggaacactgaggacgtgatgctggaatttgtgatgagagagtggaaaaaatccaggaaacttctaggacagaggctattcaacaagctcatgaagatgaccttctatgggcattttgtagccggggaggaccaggagtccatccagcccctgcttcggcactacagggccttcggtgtcagcgccatcctggactatggagtggaggaggacctgagccccgaggaggcagagcacaaggagatggagtcctgcacctcagctgcggagagggatggcagtggcacgaataagcgggacaagcaataccaggcccaccgggccttcggggaccgcaggaatggtgtcatcagtgcccgcacctacttctacgccaatgaggccaagtgcgacagccacatggagacattcttgcgctgcatcgaagcctcaggtagagtcagcgatgacggcttcatagccattaagctcacagcactggggagaccccagtttctgctgcagttctcagaggtgctggccaagtggaggtgcttctttcaccaaatggctgtggagcaagggcaggcgggcctggctgccatggacaccaagctggaggtggcggtgctgcaggaaagtgtcgcaaagttgggcatcgcatccagggctgagattgaggactggttcacggcagagaccctgggagtgtctggcaccatggacctgctggactggagcagcctcatcgacagcaggaccaagctgtccaagcacctggtagtccccaacgcacagacaggacagctggagcccctgctgtcccggttcactgaggaggaggagctacagatgaccaggatgctacagcggatggatgtcctggccaagaaagccacagagatgggcgtgcggctgatggtggatgccgagcagacctacttccagccggccatcagccgcctgacgctggagatgcagcggaagttcaatgtggagaagccgctcatcttcaacacataccagtgctacctcaaggatgcctatgacaatgtgaccctggacgtggagctggctcgccgtgagggctggtgttttggggccaagctggtgcggggcgcatacctggcccaggagcgagcccgtgcggcagagatcggctatgaggaccccatcaaccccacgtacgaggccaccaacgccatgtaccacaggtgcctggactacgtgttggaggagctgaagcacaacgccaaggccaaggtgatggtggcctcccacaatgaggacacagtgcgcttcgcactgcgcaggatggaggagctgggcctgcatcctgctgaccaccaggtgtactttggacagctgctaggcatgtgtgaccagatcagcttcccgctgggccaggccggctaccccgtgtacaagtacgtgccctatggccccgtgatggaggtgctgccctacttgtcccgccgtgccctggagaacagcagcctcatgaagggcacccatcgggagcggcagttgctgtggctggagctcttgaggcggctccgaactggcaacctcttccatcgccctgcctagcacccgccagcacaccctcagcctccagcaccccccgcccccgcccaggccatcaccacagctgcagccaaccccatcctcacacagattcaccttttttcaccccacacttgcagagctgctggaggtgaggtcaggtgcctcccagccctgcccagagtatgggcactcaggtgtgggccgaacctgatacctgcctgggacagccactggaaacttttgggaactctcctcgaatgtgtggcccaaggcccccacctctgtgacccccatgtccttggacctagaggattgtccaccttctgccaaggccagcccacacagcccgagccccttggggagcagtggccgggctggggaggcctgcctggtcaataaaccactgttcctgc

SEQ ID NO: 2765 - DNA, 4758 bp, Homo sapiens
atgcgcggcgttggctggcagatgctgtccctgtcgctggggttagtgctggcgatcctgaacaaggtggcaccgcaggcgtgcccggcgcagtgctcttgctcgggcagcacagtggactgtcacgggctggcgctgcgcagcgtgcccaggaatatcccccgcaacaccgagagactggatttaaatggaaataacatcacaagaattacgaagacagattttgctggtcttagacatctaagagttcttcagcttatggagaataagattagcaccattgaaagaggagcattccaggatcttaaagaactagagagactgcgtttaaacagaaatcaccttcagctgtttcctgagttgctgtttcttgggactgcgaagctatacaggcttgatctcagtgaaaaccaaattcaggcaatcccaaggaaagctttccgtggggcagttgacataaaaaatttgcaactggattacaaccagatcagctgtattgaagatggggcattcagggctctccgggacctggaagtgctcactctcaacaataacaacattactagactttctgtggcaagtttcaaccatatgcctaaacttaggacttttcgactgcattcaaacaacctgtattgtgactgccacctggcctggctctccgactggcttcgcaaaaggcctcgggttggtctgtacactcagtgtatgggcccctcccacctgagaggccataatgtagccgaggttcaaaaacgagaatttgtctgcagtgatgaggaagaaggtcaccagtcatttatggctccttcttgtagtgttttgcactgccctgccgcctgtacctgtagcaacaatatcgtagactgtcgtgggaaaggtctcactgagatccccacaaatcttccagagaccatcacagaaatacgtttggaacagaacacaatcaaagtcatccctcctggagctttctcaccatataaaaagcttagacgaattgacctgagcaataatcagatctctgaacttgcaccagatgctttccaaggactacgctctctgaattcacttgtcctctatggaaataaaatcacagaactccccaaaagtttatttgaaggactgttttccttacagctcctattattgaatgccaacaagataaactgccttcgggtagatgcttttcaggatctccacaacttgaaccttctctccctatatgacaacaagcttcagaccatcgccaaggggaccttttcacctcttcgggccattcaaactatgcatttggcccagaacccctttatttgtgactgccatctcaagtggctagcggattatctccataccaacccgattgagaccagtggtgcccgttgcaccagcccccgccgcctggcaaacaaaagaattggacagatcaaaagcaagaaattccgttgttcaggtacagaagattatcgatcaaaattaagtggagactgctttgcggatctggcttgccctgaaaagtgtcgctgtgaaggaaccacagtagattgctctaatcaaaagctcaacaaaatcccggagcacattccccagtacactgcagagttgcgtctcaataataatgaatttaccgtgttggaagccacaggaatctttaagaaacttcctcaattacgtaaaataaactttagcaacaataagatcacagatattgaggagggagcatttgaaggagcatctggtgtaaatgaaatacttcttacgagtaatcgtttggaaaatgtgcagcataagatgttcaagggattggaaagcctcaaaactttgatgttgagaagcaatcgaataacctgtgtggggaatgacagtttcataggactcagttctgtgcgtttgctttctttgtatgataatcaaattactacagttgcaccaggggcatttgatactctccattctttatctactctaaacctcttggccaatccttttaactgtaactgctacctggcttggttgggagagtggctgagaaagaagagaattgtcacgggaaatcctagatgtcaaaaaccatacttcctgaaagaaatacccatccaggatgtggccattcaggacttcacttgtgatgacggaaatgatgacaatagttgctccccactttctcgctgtcctactgaatgtacttgcttggatacagtcgtccgatgtagcaacaagggtttgaaggtcttgccgaaaggtattccaagagatgtcacagagttgtatctggatggaaaccaatttacactggttcccaaggaactctccaactacaaacatttaacacttatagacttaagtaacaacagaataagcacgctttctaatcagagcttcagcaacatgacccagctcctcaccttaattcttagttacaaccgtctgagatgtattcctcctcgcacctttgatggattaaagtctcttcgattactttctctacatggaaatgacatttctgttgtgcctgaaggtgctttcaatgatctttctgcattatcacatctagcaattggagccaaccctctttactgtgattgtaacatgcagtggttatccgactgggtgaagtcggaatataaggagcctggaattgctcgttgtgctggtcctggagaaatggcagataaacttttactcacaactccctccaaaaaatttacctgtcaaggtcctgtggatgtcaatattctagctaagtgtaacccctgcctatcaaatccgtgtaaaaatgatggcacatgtaatagtgatccagttgacttttaccgatgcacctgtccatatggtttcaaggggcaggactgtgatgtcccaattcatgcctgcatcagtaacccatgtaaacatggaggaacttgccacttaaaggaaggagaagaagatggattctggtgtatttgtgctgatggatttgaaggagaaaattgtgaagtcaacgttgatgattgtgaagataatgactgtgaaaataattctacatgtgtcgatggcattaataactacacatgcctttgcccacctgagtatacaggtgagttgtgtgaggagaagctggacttctgtgcccaggacctgaacccctgccagcacgattcaaagtgcatcctaactccaaagggattcaaatgtgactgcacaccagggtacgtaggtgaacactgcgacatcgattttgacgactgccaagacaacaagtgtaaaaacggagcccactgcacagatgcagtgaacggctatacgtgcatatgccccgaaggttacagtggcttgttctgtgagttttctccacccatggtcctccctcgtaccagcccctgtgataattttgattgtcagaatggagctcagtgtatcgtcagaataaatgagccaatatgtcagtgtttgcctggctatcagggagaaaagtgtgaaaaattggttagtgtgaattttataaacaaagagtcttatcttcagattccttcagccaaggttcggcctcagacgaacataacacttcagattgccacagatgaagacagcggaatcctcctgtataagggtgacaaagaccatatcgcggtagaactctatcgggggcgtgttcgtgccagctatgacaccggctctcatccagcttctgccatttacagtgtggagacaatcaatgatggaaacttccacattgtggaactacttgccttggatcagagtctctctttgtccgtggatggtgggaaccccaaaatcatcactaacttgtcaaagcagtccactctgaattttgactctccactctatgtaggaggcatgccagggaagagtaacgtggcatctctgcgccaggcccctgggcagaacggaaccagcttccacggctgcatccggaacctttacatcaacagtgagctgcaggacttccagaaggtgccgatgcaaacaggcattttgcctggctgtgagccatgccacaagaaggtgtgtgcccatggcacatgccagcccagcagccaggcaggcttcacctgcgagtgccaggaaggatggatggggcccctctgtgaccaacggaccaatgacccttgccttggaaataaatgcgtacatggcacctgcttgcccatcaatgcgttctcctacagctgtaagtgcttggagggccatggaggtgtcctctgtgatgaagaggaggatctgtttaacccatgccaggcgatcaagtgcaagcatgggaagtgcaggctttcaggtctggggcagccctactgtgaatgcagcagtggatacacgggggacagctgtgatcgagaaatctcttgtcgaggggaaaggataagagattattaccaaaagcagcagggctatgctgcttgccaaacaaccaagaaggtgtcccgattagagtgcagaggtgggtgtgcaggagggcagtgctgtggaccgctgaggagcaagcggcggaaatactctttcgaatgcactgacggctcctcctttgtggacgaggttgagaaagtggtgaagtgcggctgtacgaggtgtgtgtcctaaacacactcccggcagctctgtctttggaaaaggttgtatacttcttgaccatgtgggactaatgaatgcttcatagtggaaatatttgaaatatattgtaaaatacagaacagacttatttttattatgagaataaagactttttttctgcatttggaaaaaaaaaaaaaaaaaactcga

SEQ ID NO: 2766 - DNA, 2653 bp, Homo sapiens; identical to SEQ ID NO: 2397

SEQ ID NO: 2767 - DNA, 4950 bp, Homo sapiens; identical to SEQ ID NO: 796

SEQ ID NO: 2768 - DNA, 1056 bp, Homo sapiens
  misc_feature (868)..(868): n is a, c, g, or t
  misc_feature (870)..(871): n is a, c, g, or t
cgcgaggcccgggttgagcgggaggcgcgatcggtccggtcggtggctccccgcggcggggccgggcccgatctcgggcgggaaccgagcgcagagccggtagcgggaaggatgaccacgctcacacgacaagacctcaactttggccaagtggtggccgctgtgctctgcgagttcctggaggtggctgtgcatctcatcctctacgtgcgcgaggtctaccccgtgggcatcttccagaaacgcaagaagtacaacgtgccggtccagatgtcctgccacccggagctgaatcagtatatccaggacacgctgcactgcgtcaagccactcctggagaagaatgatgtggagaaagtggtggtggtgattttggataaagagcaccgcccagtggagaaattcgtctttgagatcacccagcctccactgctgtccatcagctcagactcgctgttgtctcatgtggagcagctgctccgggccttcatcctgaagatcagcgtgtgcgatgccgtcctggaccacaaccccccaggctgtaccttcacagtcctggtgcacacgagagaagccgccactcgcaacatggagaagatccagktcatcaaggatttcccctggatcctggcggatgagcaggatgtccacatgcatgacccccggctgataccactaaaaaccatgacgtcggacattttaaagatgcagctttacgtggaagagcgcgctcataaaggcagctgagggggcacctgccaccccactgatgcccaaactgtcagactttgggggatccccgcctagggcagtgctgcatggctgccctgattccaagtgctcttatcgcctctgtgtgtggatcgcnynncccagcccggggccgctcargtctgcttggaggatgcctcccccaggagggcagtgagggatgccgcaacctcgacttctcagcctcctggggttccgccggccaacactgtctgtctcaaatactgtgctgtgagttgtttcaataaaggggcccaagggctgggctgaaaaaaaaaaaaaaaa

SEQ ID NO: 2769 - DNA, 7008 bp, Homo sapiens
gagcgctccaagatggcgcccaccgcagtcccgcccgccgcatcctcggcgcctttgcagtccggccgcgcctcccgggccccgcgttagggccgccgctgcctccctcgccgccgccgctgccagctgacctgtcctggacgcagcataactaacgaagctgctgcaggatgagaagatggcagcgcggctgcttgcaccaccaggccctgatagtttcaagcctttcacccctgagtcactggcaaacattgagaggcgcattgctgagagcaagctcaagaaaccaccaaaggccgatggcagtcatcgggaggacgatgaggacagcaagcccaagccaaacagcgacctggaagcagggaagagtttgcctttcatctacggggacatcccccaaggcctggttgcagttcccctggaggactttgacccatactatttgacgcagaaaacctttgtagtattaaacagagggaaaactctcttcagatttagtgccacgcctgccttgtacattttaagtccttttaacctgataagaagaatagctattaaaattttgatacattcagtatttagcatgatcattatgtgcactattttgaccaactgtgtattcatgacttttagtaaccctcctgactggtcgaagaatgtggagtacacgttcacagggatttatacatttgaatcactagtgaaaatcattgcaagaggtttctgcatagatggctttacctttttacgggatccatggaactggttagatttcagtgtcatcatgatggcgtatataacagagtttgtaaacctaggcaatgtttcagctctacgcactttcagggtactgagggctttgaaaactatttcggtaatcccaggcctgaagacaattgtgggtgccctgattcagtctgtgaagaaactgtcagatgtgatgatcctgacagtgttctgcctgagtgtttttgccttgatcggactgcagctgttcatggggaaccttcgaaacaagtgtgttgtgtggcccataaacttcaacgagagctatcttgaaaatggcaccaaaggctttgattgggaagagtatatcaacaataaaacaaatttctacacagttcctggcatgctggaacctttactctgtgggaacagttctgatgctgggcaatgcccagagggataccagtgtatgaaagcaggaaggaaccccaactatggttacacaagttttgacacttttagctgggccttcttggcattatttcgccttatgacccaggactattgggaaaacttgtatcaattgactttacgagcagccgggaaaacatacatgatcttcttcgtcttggtcatctttgtgggttctttctatctggtgaacttgatcttggctgtggtggccatggcttatgaagaacagaatcaggcaacactggaggaggcagaacaaaaagaggctgaatttaaagcaatgttggagcaacttaagaagcaacaggaagaggcacaggctgctgcgatggccacttcagcaggaactgtctcagaagatgccatagaggaagaaggtgaagaaggagggggctcccctcggagctcttctgaaatctctaaactcagctcaaagagtgcaaaggaaagacgtaacaggagaaagaagaggaagcaaaaggaactctctgaaggagaggagaaaggggatcccgagaaggtgtttaagtcagagtcagaagatggcatgagaaggaaggcctttcggctgccagacaacagaatagggaggaaattttccatcatgaatcagtcactgctcagcatcccaggctcgcccttcctctcccgccacaacagcaagagcagcatcttcagtttcaggggacctgggcggttccgagacccgggctccgagaatgagttcgcggatgacgagcacagcacggtggaggagagcgagggccgccgggactccctcttcatccccatccgggcccgcgagcgccggagcagctacagcggctacagcggctacagccagggcagccgctcctcgcgcatcttccccagcctgcggcgcagcgtgaagcgcaacagcacggtggactgcaacggcgtggtgtccctcatcggcggccccggctcccacatcggcgggcgtctcctgccagaggctacaactgaggtggaaattaagaagaaaggccctggatctcttttagtttccatggaccaattagcctcctacgggcggaaggacagaatcaacagtataatgagtgttgttacaaatacactagtagaagaactggaagagtctcagagaaagtgcccgccatgctggtataaatttgccaacactttcctcatctgggagtgccacccctactggataaaactgaaagagattgtgaacttgatagttatggacccttttgtggatttagccatcaccatctgcatcgtcctgaatacactgtttatggcaatggagcaccatcctatgacaccacaatttgaacatgtcttggctgtaggaaatctggttttcactggaattttcacagcggaaatgttcctgaagctcatagccatggatccctactattatttccaagaaggttggaacatttttgacggatttattgtctccctcagtttaatggaactgagtctagcagacgtggaggggctttcagtgctgcgatctttccgattgctccgagtcttcaaattggccaaatcctggcccaccctgaacatgctaatcaagattattggaaattcagtgggtgccctgggcaacctgacactggtgctggccattattgtcttcatctttgccgtggtggggatgcaactctttggaaaaagctacaaagagtgtgtctgcaagatcaaccaggactgtgaactccctcgctggcatatgcatgactttttccattccttcctcattgtctttcgagtgttgtgcggggagtggattgagaccatgtgggactgcatggaagtggcaggccaggccatgtgcctcattgtctttatgatggtcatggtgattggcaacttggtggtgctgaacctgtttctggccttgctcctgagctccttcagtgcagacaacctggctgccacagatgacgatggggaaatgaacaacctccagatctcagtgatccgtatcaagaagggtgtggcctggaccaaactaaaggtgcacgccttcatgcaggcccactttaagcagcgtgaggctgatgaggtgaagcctctggatgagttgtatgaaaagaaggccaactgtatcgccaatcacaccggtgcagacatccaccggaatggtgacttccagaagaatggcaatggcacaaccagcggcattggcagcagcgtggagaagtacatcattgatgaggaccacatgtccttcatcaacaaccccaacttgactgtacgggtacccattgctgtgggcgagtctgactttgagaacctcaacacagaggatgttagcagcgagtcggatcctgaaggcagcaaagataaactagatgacaccagctcctctgaaggaagcaccattgatatcaaaccagaagtagaagaggtccctgtggaacagcctgaggaatacttggatccagatgcctgcttcacagaaggttgtgtccagcggttcaagtgctgccaggtcaacatcgaggaagggctaggcaagtcttggtggatcctgcggaaaacctgcttcctcatcgtggagcacaactggtttgagaccttcatcatcttcatgattctgctgagcagtggcgccctggccttcgaggacatctacattgagcagagaaagaccatccgcaccatcctggaatatgctgacaaagtcttcacctatatcttcatcctggagatgttgctcaagtggacagcctatggcttcgtcaagttcttcaccaatgcctggtgttggctggacttcctcattgtggctgtctctttagtcagccttatagctaatgccctgggctactcggaactaggtgccataaagtcccttaggaccctaagagctttgagacccttaagagccttatcacgatttgaagggatgagggtggtggtgaatgccttggtgggcgccatcccctccatcatgaatgtgctgctggtgtgtctcatcttctggctgattttcagcatcatgggagttaacttgtttgcgggaaagtaccactactgctttaatgagacttctgaaatccgatttgaaattgaagatgtcaacaataaaactgaatgtgaaaagcttatggaggggaacaatacagagatcagatggaagaacgtgaagatcaactttgacaatgttggggcaggatacctggcccttcttcaagtagcaaccttcaaaggctggatggacatcatgtatgcagctgtagattcccggaagcctgatgagcagcctaagtatgaggacaatatctacatgtacatctattttgtcatcttcatcatcttcggctccttcttcaccctgaacctgttcattggtgtcatcattgataacttcaatcaacaaaagaaaaagttcggaggtcaggacatcttcatgaccgaagaacagaagaagtactacaatgccatgaaaaagctgggctcaaagaagccacagaaacccattccccgccccttgaacaaaatccaaggaatcgtctttgattttgtcactcagcaagcctttgacattgttatcatgatgctcatctgccttaacatggtgacaatgatggtggagacagacactcaaagcaagcagatggagaacatcctctactggattaacctggtgtttgttatcttcttcacctgtgagtgtgtgctcaaaatgtttgcgttgaggcactactacttcaccattggctggaacatcttcgacttcgtggtagtcatcctctccattgtgggaatgttcctggcagatataattgagaaatactttgtttccccaaccctattccgagtcatccgattggcccgtattgggcgcatcttgcgtctgatcaaaggcgccaaagggattcgtaccctgctctttgccttaatgatgtccttgcctgccctgttcaacatcggccttctgctcttcctggtcatgttcatcttctccatttttgggatgtccaattttgcatatgtgaagcacgaggctggtatcgatgacatgttcaactttgagacatttggcaacagcatgatctgcctgtttcaaatcacaacctcagctggttgggatggcctgctgctgcccatcctaaaccgcccccctgactgcagcctagataaggaacacccagggagtggctttaagggagattgtgggaacccctcagtgggcatcttcttctttgtaagctacatcatcatctctttcctaattgtcgtgaacatgtacattgccatcatcctggagaacttcagtgtagccacagaggaaagtgcagaccctctgagtgaggatgactttgagaccttctatgagatctgggagaagttcgaccccgatgccacccagttcattgagtactgtaagctggcagactttgcagatgccttggagcatcctctccgagtgcccaagccaaataccattgagctcatcgctatggatctgccaatggtgagcggggatcgcatccactgcttggacatcctttttgccttcaccaagcgggtcctgggagatagcggggagttggacatcctgcggcagcagatggaagagcggttcgtggcatccaatccttccaaagtgtcttacgagccaatcacaaccacactgcgtcgcaagcaggaggaggtatctgcagtggtcctgcagcgtgcctaccggggacatttggcaaggcggggcttcatctgcaaaaagacaacttctaataagctggagaatggaggcacacaccgggagaaaaaagagagcaccccatctacagcctccctcccgtcctatgacagtgtaactaaacctgaaaaggagaaacagcagcgggcagaggaaggaagaagggaaagagccaaaagacaaaaagaggtcagagaatccaagtgttagaggagaacaaaaattcagtattatacagatctaaaactcgcaagtgaaagattgtttacaaacttcctgaatattatcaatgcagaacagctgtggagactctaacctgaagatctataccaaacgtcgtctgcttaccacgtaacacagctgcatcttgagcagtgacctgccaagggcaaaggaccccgctccctagacttacagattttctaatgcttgggcaggtggttactgcatgttccacatcagtcaatgcaacttaggacaaaactaaccagatacagaaacagaagagaggctgccgggaccagcatatttccgttgcagccaaatggattttattttttcattttattgattctcagaagcagaaagcatcactttaaaagttcgtttgttcatgcaaactatatttgcattcttacattagttaagctaagcagcaaaaagaaaacacacacacacactcacatttagcccatgtcatttaattgtcagtttctttgacataaagcgcatcttctccacatgggcttcacgtggtttggagatgggtgggggaaaacaatcaggtttcttcaggctgaggaggacttgctcaggccgattccaaacattgtgctcgttcaatgcgtagaaatgatttgcatgatggcatgccgtgatcagaagtcatgcatgagatccatacaccacaggacactactaatctagtcccttgcactgggtcagcctttggacaggacccagccctgcaccgttcactgtatttggagaaaatggtaagagttccataccgggctacaattctttgagttcttaaaagtccttcatacaccttctgggtagggaaacaaccaactaattgactaacaccaccaacg

SEQ ID NO: 2770 - DNA, 1944 bp, Homo sapiens
  misc_feature (1938)..(1938): n is a, c, g, or t
gcggccgcgtcgacgctagaggggctgcttgcgccaggcgccggccgccccactgcgggtccctggcggccggtgtctgaggagtcggagagccgaggcggccagaccgtgcgccccgcgcttctcccgaggccgttccgggtctgaactgtaacagggaggggcctcgcaggagcagcagcgggcgagttaaagtatgctgggagcggtgaagatggaagggcacgagccgtccgactggagcagctactatgcagagcccgagggctactcctccgtgagcaacatgaacgccggcctggggatgaacggcatgaacacgtacatgagcatgtcggcggccgccatgggcagcggctcgggcaacatgagcgcgggctccatgaacatgtcgtcgtacgtgggcgctggcatgagcccgtccctggcggggatgtcccccggcgcgggcgccatggcgggcatgggcggctcggccggggcggccggcgtggcgggcatggggccgcacttgagtcccagcctgagcccgctcggggggcaggcggccggggccatgggcggcctggccccctacgccaacatgaactccatgagccccatgtacgggcaggcgggcctgagccgcgcccgcgaccccaagacctacaggcgcagctacacgcacgcaaagccgccctactcgtacatctcgctcatcaccatggccatccagcagagccccaacaagatgctgacgctgagcgagatctaccagtggatcatggacctcttccccttctaccggcagaaccagcagcgctggcagaactccatccgccactcgctctccttcaacgactgtttcctgaaggtgccccgctcgcccgacaagcccggcaagggctccttctggaccctgcaccctgactcgggcaacatgttcgagaacggctgctacctgcgccgccagaagcgcttcaagtgcgagaagcagctggcgctgaaggaggccgcaggcgccgccggcagcggcaagaaggcggccgccggagcccaggcctcacaggctcaactcggggaggccgccgggccggcctccgagactccggcgggcaccgagtcgcctcactcgagcgcctccccgtgccaggagcacaagcgagggggcctgggagagctgaaggggacgccggctgcggcgctgagccccccagagccggcgccctctcccgggcagcagcagcaggccgcggcccacctgctgggcccgccccaccacccgggcctgccgcctgaggcccacctgaagccggaacaccactacgccttcaaccacccgttctccatcaacaacctcatgtcctcggagcagcagcaccaccacagccaccaccaccaccaaccccacaaaatggacctcaaggcctacgaacaggtgatgcactaccccggctacggttcccccatgcctggcagcttggccatgggcccggtcacgaacaaaacgggcctggacgcctcgcccctggccgcagatacctcctactaccagggggtgtactcccggcccattatgaactcctcttaagaagacgacggcttcaggcccggctaactctggcaccccggatcgaggacaagtgagagagcaagtgggggtcgagactttggggagacggtgttgcagagacgcaagggagaagaaatccataacacccccaccccaacacccccaagacagcagtcttcttcacccgctgcagccgttccgtcccaaacagagggccacacagataccccacgttctatataaggaggaaaacgggaaagaatataaagttaaaaaaaagcctccggtttccactactgtgtagactcctgcttcttcaagcacctgcagattctgatttttttgttgttgttgttctcctccattgctgttgttgcagggaagtnttactt

SEQ ID NO: 2771 - DNA, 1372 bp, Homo sapiens
gcacgagggcgcttttgtctccggtgagttttgtggcgggaagcttctgcgctggtgcttagtaaccgactttcctccggactcctgcacgacctgctcctacagccggcgatccactcccggctgttcccccggagggtccagaggcctttcagaaggagaaggcagctctgtttctctgcagaggagtagggtcctttcagccatgaagcatgtgttgaacctctacctgttaggtgtggtactgaccctactctccatcttcgttagagtgatggagtccctagaaggcttactagagagcccatcgcctgggacctcctggaccaccagaagccaactagccaacacagagcccaccaagggccttccagaccatccatccagaagcatgtgataagacctccttccatactggccatattttggaacactgacctagacatgtccagatgggagtcccattcctagcagacaagctgagcaccgttgtaaccagagaactattactaggccttgaagaacctgtctaactggatgctcattgcctgggcaaggcctgtttaggccggttgcggtggctcatgcctgtaatcctagcactttgggaggctgaggtgggtggatcacctgaggtcaggagttcgagaccagcctcgccaacatggcgaaaccccatctctactaaaaatacaaaagttagctgggtgtggtggcagaggcctgtaatcccagttccttgggaggctgaggcgggagaattgcttgaacccggggacggaggttgcagtgaaccgagatcgcactgctgtacccagcctgggccacagtgcaagactccatctcaaaaaaaaaaagaaaagaaaaagcctgtttaatgcacaggtgtgagtggattgcttatggctatgagataggttgatctcgcccttaccccggggtctggtgtatgctgtgctttcctcagcagtatggctctgacatctcttagatgtcccaacttcagctgttgggagatggtgatattttcaaccctacttcctaaacatctgtctggggttcctttagtcttgaatgtcttatgctcaattatttggtgttgagcctctcttccacaagagctcctccatgtttggatagcagttgaagaggttgtgtgggtgggctgttgggagtgaggatggagtgttcagtgcccatttctcattttacattttaaagtcgttcctccaacatagtgtgtattggtctgaagggggtggtgggatgccaaagcctgctcaagttatggacattgtggccaccatgtggcttaaatgattttttctaactaataaagtggaatatatatttcaaaaaaaaaaaaaaaaaa

SEQ ID NO: 2772 - DNA, 3060 bp, Homo sapiens
ggtagtaacagattatgggcaacagtccttttaattaatctaccgtcatcatggctaatgaggactgtcccaaggctgctgatagtcctttttcatcagataaacatgcccaactcatcttggcccaaatcaataagatgagaaatggacagcatttctgtgatgtgcagctgcaagttggacaggaaagttttaaagctcatcggctggttttggctgccagcagtccttactttgcagctttgttcactggaggaatgaaagagtcctcaaaagatgttgtaccgattctaggaattgaagcaggaatctttcagatacttctagatttcatttacacaggtatagtgaacataggtgtgaataatgtccaggagttgattattgcagcagacatgctacagttgactgaagttgttcatctttgctgtgaatttctgaaaggacaaattgatccactgaactgcattggaatttttcagttctctgagcaaattgcctgccatgatctcttggaattctcagaaaactacattcatgtccatttcttggaggttcatagtggagaagagttcctggcacttacgaaagatcagctgatcaaaattttgcgaagtgaagagcttagcattgaggatgaataccaggtcttcttagctgcaatgcaatggattctgaaagatttgggaaaaagaagaaaacatgtggtggaagtgctagacccaattcgattccctttattacctcctcagagacttttaaagtatatagaaggagtatccgattttaatcttcgtgttgcattgcaaacacttctgaaagagtactgtgaagtatgcaaatctcccaaagagaacaagttttgtagttttctgcagacatctaaggttcgacctcggaagaaagcaagaaagtacctgtatgcagtaggtggatatactcggttgcaggggggtcgctggagtgatagcagagccctcagctgtgtagaacgttttgacacctttagccagtactggaccactgtgtcttcacttcatcaggctcgaagtgggctgggagtaacagttctgggagggatggtctacgctattggaggtgaaaaggattcaatgatttttgattgtactgaatgctatgatccagttactaaacagtggacaactgtagcttcgatgaatcatccccgctgcggcttaggagtgtgtgtgtgttatggggctatctatgctttgggtggatgggttggagctgagatagggaacaccattgaacgatttgatcctgatgaaaataaatgggaagtagttggtaacatggctgtgtcacgctactactttgggtgctgtgaaatgcaaggtttaatttatgtaattgggggcatcagcaatgaaggaatagaacttcgttcttttgaagtctatgatccactttctaagcgttggtctccacttcctccaatgggaaccaggagagcatatcttggtgtggctgcactcaatgactgcatctattctgttggaggatggaatgagacccaagatgctcttcatactgtagaaaaatattcctttgaagaggaaaagtgggttgaagttgcctcaatgaaagtgcctagagcaggcatgtgtgttgtggcagtcaatggtcttctgtatgtttctggaggtcgatcttccagccatgattttttggctccaggtaccttggactcagttgaagtttataaccctcattcagatacatggacagaaattggtaacatgatcaccagtcgttgtgaagggggcgttgctgtgctatgaaatataaagcataacagagcacaaggaacattttgaaaatgcaggacctgaccttttgcaaagcaaacatagatttggtgataagaccctctgattctgtgagttttccatgtatttggtagataaatgactaacgaggctgggcgcagtggcctcatgcctataatcccagcactttggaaggctgaggcagggggatcgcttgagcccaggaatttgaggttgtagtgagctacgatcatgccactgcactccactctgggcaacagaatgagatcctgtctcttaaagaaaaaaaataaactcaagaatgatttttctaaaaatatgagtgagaatggatatggaatatatcccaattaataaagagctcacacagatttgccaggtttactaataatagaaatgccatttatgctgtagaattctccagtttaagtgtagacaactcctattttacaaatttgtagaaattatttactagaagcttcctggcaaatagtccctttagctacttctccagtgcagtataaattgtaacataaaactttatgtgatataggaatagtgtcaatgacacagtttaaagacctctatattcacaattatatccagagcataattttccatggccatagtttgagccacagagaaagccaatgaaatagattcctacttttatttaatgccaagagttttcactagccccaaactttttattggcagcagatatcctaggaggggtgtttgggaaatatctagctattttaatagatagatacctttttgcttgatgataagtttttgcttgctcatattttttgtcttgatcctgagaatgcaagtaaggaattaataggaggttcttagtgaccagatgttgtaatgggctatacagtccagcaggcagtatgcacctagaaatttctcccttttttaggctgggcatggtggctcacgcctgtagtcccagcactttgagaggccgaggtgagacgggaagatggcttgaactcgggagttcgagactagcctgggcaacgtgatgagactccgtctctaccaaaaaatatataaaaattagccgggcgttgtggcttgtacctgtggtcccatctgcttgggaggctgaggttgcaggatcgcttgagcccaggaggtcagggctgcagtgagccgagattgtgccactgcacaccggcctgggtgacagcatgagaacctgtctcaaaaaaaaaaaaaaaaaaaaaaaaaa

SEQ ID NO: 2773 - DNA, 592 bp, Homo sapiens
tggcgggtggcttctttctcctcggcttcctcttcggttaaaagccaactgcaaggtctaatgactgcaggatctagctatccattgtttctggccgcctatgcgtgcactgggtgtctggcagagaggctggggtggtttataaaatcctccaatgaagctactaacattactccaaagcataatatgaaagcatttttggatgaattgaaagctgagaacatcaagaagttcttatataattttacacagataccacatttagcaggaacagaacaaaactttcagcttgcaaagcaaattcaatcccagtggaaagaatttggcctggattctgttgagctagcacattatgatgtcctgttgtcctacccaaataagactcatcccaactacatctcaataattaatgaagatggaaatgagattttcaacacatcattatttgaaccacctcctccaggatatgaaaatgtttcggatattgtaccacctttcagtgctttctctcctcaaggaatgccagaggtaaaaacacagtgcaacaaataaaaatgacaaaaaaaaaaaaaaaaaaaaaaaaaaaaaaaaa

SEQ ID NO: 2774 - DNA, 1010 bp, Homo sapiens
gggaaccgagagcagagccggtagcgggaaggatgaccacgctcacacgacaagacctcaactttggccaagtggtggccgatgtgctctgcgagttcctggaggtggctgtgcatctcatcctctacgtgcgcgaggtctaccccgtgggcatcttccagaaacgcaagaagtacaacgtgccggtccagatgtcctgccacccggagctgaatcagtatatccaggacacgctgcactgcgtcaagccactcctggagaagaatgatgtggagaaagtggtggtggtgattttggataaagagcaccgcccagtggagaaattcgtctttgagatcacccagcctccactgctgtccatcagctcagactcgctgttgtctcatgtggagcagctgctccgggccttcatcctgaagatcagcgtgtgcgatgccgtcctggaccacaaccccccaggctgtaccttcacagtcctggtgcacacgagagaagccgccactcgcaacatggagaagatccaggtcatcaaggatttcccctggatcctggcggatgagcaggatgtccacatgcatgacccccggctgataccactaaaaaccatgacgtcggacattttaaagatgcagctttacgtggaagagcgcgctcataaaggcagctgagggggcacctgccaccccactgatgcccaaactgtcagactttgggggatccccgcctagggcagtgctgcatggctgccctgattccaagtgctcttatcgcctctgtgtgtggatcgcccgccccagcccggggccgctcaggtctgcttggaggatgcctcccccaggagggcagtgagggatgccgcaacctcgacttctcagcctcctggggttccgccggccaacactgtctgtctcaaatactgtgctgtgagttgtttcaataaaggggccccaagggctgggctgaaaaaaaaaaaaaaaaaaaaaaaaaaaaaaaaaaaaaaaaaaaaaaaa

SEQ ID NO: 2775 - DNA, 2623 bp, Homo sapiens
gggatgccgaggagccggggcggccgcgccgcgccggggccgccgccgccgccgccgccgccgggccaggccccgcgctggagccgctggcgggtccctgggcggctgctgctgctgctgctgcccgcgctctgctgcctcccgggcgccgcgcgggcggcggcggcggcggcgggggcagggaaccgggcagcggtggcggtggcggtggcgcgggcggacgaggcggaggcgcccttcgccgggcagaactggttaaagtcctatggctatctgcttccctatgactcacgggcatctgcgctgcactcagcgaaggccttgcagtcggcagtctccactatgcagcagttttacgggatcccggtcaccggtgtgttggatcagacaacgatcgagtggatgaagaaaccccgatgtggtgtccctgatcacccccacttaagccgtaggcggagaaacaagcgctatgccctgactggacagaagtggaggcaaaaacacatcacctacagcattcacaactataccccaaaagtgggtgagctagacacgcggaaagctattcgccaggctttcgatgtgtggcagaaggtgaccccactgacctttgaagaggtgccataccatgagatcaaaagtgaccggaaggaggcagacatcatgatcttttttgcttctggtttccatggcgacagctccccatttgatggagaagggggattcctggcccatgcctacttccctggcccagggattggaggagacacccactttgactccgatgagccatggacgctaggaaacgccaaccatgacgggaacgacctcttcctggtggctgtgcatgagctgggccacgcgctgggactggagcactccagcgaccccagcgccatcatggcgcccttctaccagtacatggagacgcacaacttcaagctgccccaggacgatctccagggcatccagaagatctatggacccccagccgagcctctggagcccacaaggccactccctacactccccgtccgcaggatccactcaccatcggagaggaaacacgagcgccagcccaggccccctcggccgcccctcggggaccggccatccacaccaggcaccaaacccaacatctgtgacggcaacttcaacacagtggccctcttccggggcgagatgtttgtctttaaggatcgctggttctggcgtctgcgcaataaccgagtgcaggagggctaccccatgcagatcgagcagttctggaagggcctgcctgcccgcatcgacgcagcctatgaaagggccgatgggagatttgtcttcttcaaaggtgacaagtattgggtgtttaaggaggtgacggtggagcctgggtacccccacagcctgggggagctgggcagctgtttgccccgtgaaggcattgacacagctctgcgctgggaacctgtgggcaagacctactttttcaaaggcgagcggtactggcgctacagcgaggagcggcgggccacggaccctggctaccctaagcccatcaccgtgtggaagggcatcccacaggctccccaaggagccttcatcagcaaggaaggatattacacctatttctacaagggccgggactactggaagtttgacaaccagaaactgagcgtggagccaggctacccgcgcaacatcctgcgtgactggatgggctgcaaccagaaggaggtggagcggcggaaggagcggcggctgccccaggacgacgtggacatcatggtgaccatcaacgatgtgccgggctccgtgaacgccgtggccgtggtcatcccctgcatcctgtccctctgcatcctggtgctggtctacaccatcttccagttcaagaacaagacaggccctcagcctgtcacctactataagcggccagtccaggaatgggtgtgagcagcccagagccctctctatccacttggtctggccagccaggcccttcctcaccagggtctgaggggcagctctggccagtgctcaccagggccagcagggccctaggctggggtcgtacagctgaagttgtgggtgcattggcctaggctgagcgtggggcagggaattatgggggctgtgcccagggtgggtgtctggcacccagctgccagccttctgtcctgggcaaactactccctacttaagggaataggccaggctccatccggaggcagggaccatgccaggaggagcccctgtggtcacggcatcctgtggtgtccatgaggtaccacagctccactcctggctggaacccggcaccctctgtgggaagccagcactagctctcatcccccatccgggagataccaccagtcctggtccccttttgccaacacctgctggtcagatgtccccctacccccaccccactgtcctccaaggctacaggacccctgcttctgacacagtgagcaacaagcctgggtttccctgctggcagacggcagatccctcaggaaacctgctccacttgtcagggtctcttcggagacccaggatttagggtcacatgctgcaggcagggctgtggcccagctgggtctgacaaggacccgtgtcacatcgtgaatattta

SEQ ID NO: 2776 - DNA, 4960 bp, Homo sapiens
gtggctttgggtccccaggattctggatcgtggttgcatctggagagaaaaaaggatcaatcgacacgttttagaagtgtccgtgggtgaataaaaaaggagggggggggtgcaaaactggggttgcggatgcttaaagcaaaaaaagagaaaaggaagcgtcttgaatcctggaacaagaattaccgggtgctcgagatttcaaaaaagcgtctagaaactggtaaatacttggaccatttcagcttgaatttgacggcgaagtgttgtagagaccgtctccttgaatcattgcaaagggaccggggaaagatgagggggctccctctgtggatttatcttgctgagggatatagacctgcagctaactggatttgatttataagagagaaatctgcagtcaatgcccactcttgccacactgctaatatggaaaacagaatgttcaataggatatggtctgataaatagtgatgattgaagatgctgctccaatacatgtgaaatcaatgggagatatctgctgtccgaagatctttcagagcttttctcgacaagctcccctgtaagaaatcggaggtatattctaccattatacagtctttctcaagtggatataaatacgtttgcctcactgtaaccagacaactagacaactaatgtgggaccatggcactgcccagatgcacgtggccaaattatgtttggagagcagtgatggcatgcttggtacaccggggattgggtgccccattgactctctgtatgttgggatgtttgcttcaggctggccatgtgctatcacaaaaattggatgatgtggacccactggtggctaccaactttggaaagataagagggattaagaaggaactcaataatgaaattttggggcctgttattcaatttcttggggttccatatgcagccccaccaacaggggaacgtcgttttcagcctccagaaccaccatctccctggtcagatatcagaaatgccactcaatttgctcctgtgtgtccccagaatatcattgatggcagattgccagaagtcatgcttcctgtgtggtttactaataacttggatgtggtttcatcatatgtgcaagaccagagcgaagactgcctatatttaaatatatatgtcccgactgaggatgatattcgggacagtgggggtcccaaaccagtgatggtgtatatccatggtggctcatatatggaaggtactggaaatttatatgatggaagtgtcttggcaagttatggcaatgtgatcgtcatcacagtcaactatcgacttggagtactcggtttcttgagtacaggcgatcaggctgcaaaggggaactatggactccttgatctcatacaagctttaagatggactagtgaaaacattggattctttggtggtgaccccttaagaatcactgtttttggatctggtgctgggggttcatgtgtcaacctgctgactttatcccattattctgaaggtaaccgttggagcaattcaaccaaaggactttttcaacgagcaatagctcaaagtggaacagccctttccagctgggctgttagttttcaacctgcaaaatatgctagaatgttggccacaaaagttggttgcaatgtttcagatacagtagagttagtggaatgcctacagaagaagccttacaaagaacttgttgaccaagatattcaaccagctcgataccacatagcctttggacctgtgattgatggtgatgtaataccagacgacccccagatattgatggagcaaggagagtttctcaactatgatataatgttaggagtgaaccaaggggaagggttaaaatttgttgaaaatatagtagatagcgatgatggtatatcagctagtgattttgactttgctgtttcaaattttgttgataatttatatggatatcctgaaggcaaagatgttttgagagaaaccattaagttcatgtatactgactgggctgaccgtcataaccctgaaaccagaagaaagacattactggctttgtttacggaccatcagtgggtggcaccagctgtagccacagcggatcttcactcaaactttggttcacctacgtacttctatgccttttaccatcattgccaaacagatcaggttccagcttgggctgatgcagcccacggagacgaggttccctatgtactgggaatccccatgattggccctacagagttatttccttgcaatttctccaaaaatgatgtgatgctgagtgcagttgtaatgacatactggacaaattttgctaaaactggtgacccaaatcaaccagtccctcaagacacgaaattcattcataccaaacccaaccgttttgaagaagtagcatggaccagatattcccagaaagaccaactttatctccatattggattaaaaccaagagttaaagaacattacagagccaataaggtgaacctctggttggagttggtacctcatctgcataatctcaatgacatttctcagtatacctctacaacaactaaagtgccatcaactgacatcactttcagacctacgagaaaaaattctgtacctgtcacgtcagcctttcccactgccaagcaggatgatcccaaacaacaaccaagtccattttcagtggatcaaagggactactcaacagagctgagtgtcactattgcagttggagcatcactgctgtttctgaacatcttggcctttgcagccctgtactacaaaaaggataagaggagacatgatgttcacaggagatgcagccctcagcgcactactaccaatgatctaacccatgcacaagaagaggaaatcatgtccctccaaatgaagcacactgatttggatcatgaatgtgagtccattcatccacatgaggtggttcttcggaccgcctgtcccccagattacacactagctatgaggaggtcacctgatgatgttcccttaatgacacccaacaccattacaatgattcccaacactataccagggattcagcccttacacacattcaatacatttactggaggacagaacaatactctgccccatccccatccccacccccattcacattcaacaaccagggtatagccagataagagaaacaaactattttttttgatggattgcagtaaacgatcactgaagattccttggctttcaacctacaagacttactatttaaataaggaggaatattatgtgaatatacatatcaagaactttgggggttttgaaaaaaatgaattgtatatatacaaatcaactttaaaaacaaatttcaattgcttgaagcaattgttctgaatgatactttttcattcacattcaagaattaattttttgaagatttaagttacataatggaattaggcatgtggaacaccaaacaggaaagaactatgtctgaaatataaaaaataaaaataaaaaaacaactatgaatatgcacaagggacacaccagtggaatgtcagataattttcaccagtttttatttggagccgttttattgtgtagaccatatttacatatttggataagtacacaaagcgtcaatgctgttaatggccttagcaaaggctcatgctgaaatttgccagtaaaacaaagaagtttaaagactggcaggtacaccattatcacataagtgctgtcagtataaagttgtggggataaaggaaactggatatttttagcacgatgtgcatgataatttatatgcttggtggctgtgctgctgattaagccgtaattaaaattcttctcatcccattggagtttttaatagaagcttcctccatcaattggcagaacctaaagaagattttaaggggcaaaagtaattacaataaaataattcacagtagtttcaatatagaaggaattagctattaaaggtatttgaagaaactataggtatagtggtgaatactcgctgatatgaatcccagaaaaaatttcctgtttttaatgttcttttcaatcccatctagataatttatagaaatataaccctaattggacatgtggtagaggatctataagttgctgtgtttttttgttactctgtattttgttccttttggtaaggtgaagtgtgtccaaagagttacttgcaacagtctttcatgatatgaggatgcccccgtattaccactctgattatagttctgagttctttgatttactcatgctgcatgacaaaatgtttactaataacaattcattataaagttatatccctctttacatcacttatctttctcactgaggttcattcactggaatttactcacgcaatctcagtagagtacaacgtagatacagaacctaggagagtcaacatctggaggattttagtctttcttacacatatgtgtgattttaaacgaatattctcagaccacaggaaactcttcatccccctgttgtttaccagtaacagtatatcacagacctttccaaatgtttgtatatgtaatcagatgtacatttatattgaaaaacaaatgagatggacttaaagagcacatcctgataaatactttctctctcacctgtactatatttctattagactaaagttatgtgattttttttttacattttttcagatgactagcaattttgatagtttataagataatgcaaagaactttctctgacaaactaactgcagtaacagaaacctttcttttcagttactctttttcaagaatgaaagattattatacaaaaaattgtatactacttgatggaaccaactttgtacatcttggccatgtcactggtcattgtgtgaaataaagataatctggataatgactattagtccaatgctaagaaacatgatctttgctcattaaagagctaaaatgtttattgctgttttgtctttcttttttct

SEQ ID NO: 2777 - DNA, 1518 bp, Homo sapiens
gcctgagaccctcctgcagccttctcaagggacagccccactctgcctcttgctcctccagggcagcaccatgcagcccctgtggctctgctgggcactctgggtgttgcccctggccagccccggggccgccctgaccggggagcagctcctgggcagcctgctgcggcagctgcagctcaaagaggtgcccaccctggacagggccgacatggaggagctggtcatccccacccacgtgagggcccagtacgtggccctgctgcagcgcagccacggggaccgctcccgcggaaagaggttcagccagagcttccgagaggtggccggcaggttcctggcgttggaggccagcacacacctgctggtgttcggcatggagcagcggctgccgcccaacagcgagctggtgcaggccgtgctgcggctcttccaggagccggtccccaaggccgcgctgcacaggcacgggcggctgtccccgcgcagcgcccgggcccgggtgaccgtcgagtggctgcgcgtccgcgacgacggctccaaccgcacctccctcatcgactccaggctggtgtccgtccacgagagcggctggaaggccttcgacgtgaccgaggccgtgaacttctggcagcagctgagccggccccggcagccgctgctgctacaggtgtcggtgcagagggagcatctgggcccgctggcgtccggcgcccacaagctggtccgctttgcctcgcagggggcgccagccgggcttggggagccccagctggagctgcacaccctggaccttggggactatggagctcagggcgactgtgaccctgaagcaccaatgaccgagggcacccgctgctgccgccaggagatgtacattgacctgcaggggatgaagtgggccgagaactgggtgctggagcccccgggcttcctggcttatgagtgtgtgggcacctgccggcagcccccggaggccctggccttcaagtggccgtttctggggcctcgacagtgcatcgcctcggagactgactcgctgcccatgatcgtcagcatcaaggagggaggcaggaccaggccccaggtggtcagcctgcccaacatgagggtgcagaagtgcagctgtgcctcggatggtgcgctcgtgccaaggaggctccagccataggcgcctagtgtagccatcgagggacttgacttgtgtgtgtttctgaagtgttcgagggtaccaggagagctggcgatgactgaactgctgatggacaaatgctctgtgctctctagtgagccctgaatttgcttcctctgacaagttacctcacctaatttttgcttctcaggaatgagaatctttggccactggagagcccttgctcagttttctctattcttattattcactgcactatattctaagcacttacatgtggagatactgtaacctgagggcagaaagcccaatgtgtcattgtttacttgtcctgtcactggatctgggctaaagtcctccaccac

SEQ ID NO: 2778 - DNA, 5533 bp, Homo sapiens
cttgactcaatcctgcaagcaagtgtgtgtgtgtccccatcccccgccccgttaacttcatagcaaataacaaatacccataaagtcccagtcgcgcagcccctccccgcgggcagcgcactatgctgctcgggtgggcgtccctgctgctgtgcgcgttccgcctgcccctggccgcggtcggccccgccgcgacacctgcccaggataaagccgggcagcctccgactgctgcagcagccgcccagccccgccggcggcagggggaggaggtgcaggagcgagccgagcctcccggccacccgcaccccctggcgcagcggcgcaggagcaaggggctggtgcagaacatcgaccaactctactccggcggcggcaaggtgggctacctcgtctacgcgggcggccggaggttcctcttggacctggagcgagatggttcggtgggcattgctggcttcgtgcccgcaggaggcgggacgagtgcgccctggcgccaccggagccactgcttctatcggggcacagtggacgctagtccccgctctctggctgtctttgacctctgtgggggtctcgacggcttcttcgcggtcaagcacgcgcgctacaccctaaagccactgctgcgcggaccctgggcggaggaagaaaaggggcgcgtgtacggggatgggtccgcacggatcctgcacgtctacacccgcgagggcttcagcttcgaggccctgccgccgcgcgccagctgcgaaacccccgcgtccacaccggaggcccacgagcatgctccggcgcacagcaacccgagcggacgcgcagcactggcctcgcagctcttggaccagtccgctctctcgcccgctgggggctcaggaccgcagacgtggtggcggcggcggcgccgctccatctcccgggcccgccaggtggagctgcttctggtggctgacgcgtccatggcgcggttgtatggccggggcctgcagcattacctgctgaccctggcctccatcgccaataggctgtacagccatgctagcatcgagaaccacatccgcctggccgtggtgaaggtggtggtgctaggcgacaaggacaagagcctggaagtgagcaagaacgctgccaccacactcaagaacttttgcaagtggcagcaccaacacaaccagctgggagatgaccatgaggagcactacgatgcagctatcctgtttactcgggaggatttatgtgggcatcattcatgtgacaccctgggaatggcagacgttgggaccatatgttctccagagcgcagctgtgctgtgattgaagacgatggcctccacgcagccttcactgtggctcacgaaatcggacatttacttggcctctcccatgacgattccaaattctgtgaagagacctttggttccacagaagataagcgcttaatgtcttccatccttaccagcattgatgcatctaagccctggtccaaatgcacttcagccaccatcacagaattcctggatgatggccatggtaactgtttgctggacctaccacgaaagcagatcctgggccccgaagaactcccaggacagacctacgatgccacccagcagtgcaacctgacattcgggcctgagtactccgtgtgtcccggcatggatgtctgtgctcgcctgtggtgtgctgtggtacgccagggccagatggtctgtctgaccaagaagctgcctgcggtggaagggacgccttgtggaaaggggagaatctgcctgcagggcaaatgtgtggacaaaaccaagaaaaaatattattcaacgtcaagccatggcaactggggatcttggggatcctggggccagtgttctcgctcatgtggaggaggagtgcagtttgcctatcgtcactgtaataaccctgctcccagaaacaacggacgctactgcacagggaagagggccatctaccgctcctgcagtctcatgccctgcccacccaatggtaaatcatttcgtcatgaacagtgtgaggccaaaaatggctatcagtctgatgcaaaaggagtcaaaacttttgtggaatgggttcccaaatatgcaggtgtcctgccagcggatgtgtgcaagctgacctgcagagccaagggcactggctactatgtggtattttctccaaaggtgaccgatggcactgaatgtaggccgtacagtaattccgtctgcgtccgggggaagtgtgtgagaactggctgtgacggcatcattggctcaaagctgcagtatgacaagtgcggagtatgtggaggagacaactccagctgtacaaagattgttggaacctttaataagaaaagtaagggttacactgacgtggtgaggattcctgaaggggcaacccacataaaagttcgacagttcaaagccaaagaccagactagattcactgcctatttagccctgaaaaagaaaaacggtgagtaccttatcaatggaaagtacatgatctccacttcagagactatcattgacatcaatggaacagtcatgaactatagcggttggagccacagggatgacttcctgcatggcatgggctactctgccacgaaggaaattctaatagtgcagattcttgcaacagaccccactaaaccattagatgtccgttatagcttttttgttcccaagaagtccactccaaaagtaaactctgtcactagtcatggcagcaataaagtgggatcacacacttcgcagccgcagtgggtcacgggcccatggctcgcctgctctaggacctgtgacacaggttggcacaccagaacggtgcagtgccaggatggaaaccggaagttagcaaaaggatgtcctctctcccaaaggccttctgcgtttaagcaatgcttgttgaagaaatgttagcctgtggttatgatcttatgcacaaagataactggaggattcagcaccgatgcagtcgtggtgaacaggaggtctacctaacgcacagaaagtcatgcttcagtgacattgtcaacaggagtccaattatgggcagaatctgctctctgtgaccaaaagaggatgtgcactgcttcacgtgacagtggtgaccttgcaatatagaaaaacttgggagttattgaacatcccctgggattacaagaaacactgatgaatgtaaaatcaggggacatttgaagatggcagaactgtctcccccttgtcacctacctctgatagaatgtctttaatggtatcataatcattttcacccataatacacagtagcttcttcttactgtttgtaaatacattctcccttggtatgtcactttatatcccctggttctattaaaatatccatatatatttctataaaaaaagtgtttgaccaaagtaggtctgcagctatttcaacttccttccgtttccagaaagagctgtggatattttactggaaattaagaacttgctgctgttttaataagatgtagtatattttctgactacaggagataaaatttcagtcaaaaaaccattttgacagcaagtatcttctgagaaattttgaaaagtaaatagatctcagtgtatctagtcacttaaatacatacacgggttcatttacttaaaacctttgactgcctgtatttttttcaggtagctagccaaattaatgcataatttcagatgtagaagtagggtttgcgtgtgtgtgtgtgatcatactcaagagtctaaaaactagtttccttgtgttggaaatttaaaaggaaaaaaatcgtatttcactgtgttttcaatttatattttcacaactactttctctctccagagctttcatctgatatctcacaatgtatgatatacgtacaaaacacacagcaagttttctatcatgtccaacacattcaacactggtatacctcctaccagcaagcctttaaaatgcgtttgtgtttgcttatttgttttgttcaagggttcagtaagacctacaatgttttgtatttcttgacttattttattagaaacattaaagatcacttggtagttagccacattgagaagtggttatcattgttaatgtggttaatgccaaaaagtggttaatattaataagactgtttccacaccataggcaataatttcttaatttaaaaaatctaagtatattcctattgtactaaatatttttcccaactggaaagcacttgattgtacccgtaagtgtttgagtgatgacatgtgatgattttcagaaagttgttgtttttgtttccatagcctgtttaagtaggttgtaagtttgaatagttagacatggaaattattttataagcacacacctaaagatatctttttagatgataaaatgtacacccccccatcaccaacctcacaacttagaaaatctaagttgtttgatttcattgggatttcttttgttgtgaaacactgcaaagccaatttttctttataaaaattcatagtaatcctgccaaatgtgcctattgttaaagatttgcatgtgaagatcttagggaaccactgtttgagttctacaagctcatgagagtttatttttattataagatgtttttaatataaaagaattatgtaactgatcactatattacatcatttcagtgggccaggaaaatagatgtcttgctgttttcagtattttcttaagaaattgcttttaaaacaaataattgttttacaaaaccaataattatcctttgaattttcatagactgactttgctttcgacgtagaaatttttttttcttaataaattatcactttgagaaatgaggcctgtacaaggctgataacctatatgtgatggagatcacccaatgccaagggcagaaagcaaacctagttaaataggtgagaaaaaaaataataatcccagtgccatttgtctgtgcaaagagaattaggagagaggttaatgttacttttttccattttggaaataattttaatcaagtaactcaaatgtgacaaaatttatttttattttttgtggttatattcccaacaacattaaaaaatactcgaggcataaatgtagttgtctcctactctgcttctcttactatactcatacatttttaatatggtttatcaatgattcatgtttccctcaaatagtgatggtttacacctgtcatggaaacaatcctagagagctcagagcaattaaaccactattccatgcttttaagtagttttctccacctttttcttatgagtctcactagattgactgaggaatgtatgtctaaattcctggagaagatgatatggattggaaactgaaattcagagaaatggagtgttcaatagataccacgaattgtgaacaaagggaaaattctatacaactcaatctaagtcagtccactttgacttcgtactgtctttcacctttccattgttgcatcttgaattttttaaaatgtctagaattcaggatgctaggggctacttctccaaaaaaaaaaaaaaaaaaaaaaaaaaaa

SEQ ID NO: 2779 - DNA, 2518 bp, Homo sapiens
aattccagcctgcagggctgataagcgaggcattagtgagattgagagagactttaccccgccgtggtggttggagggcgcgcagtagagcagcagcacaggcgcgggtcccgggaggccggctctgctcgcgccgagatgtggaatctccttcacgaaaccgactcggctgtggccaccgcgcgccgcccgcgctggctgtgcgctggggcgctggtgctggcgggtggcttctttctcctcggcttcctcttcgggtggtttataaaatcctccaatgaagctactaacattactccaaagcataatatgaaagcatttttggatgaattgaaagctgagaacatcaagaagttcttatataattttacacagataccacatttagcaggaacagaacaaaactttcagcttgcaaagcaaattcaatcccagtggaaagaatttggcctggattctgttgagctagcacattatgatgtcctgttgtcctacccaaataagactcatcccaactacatctcaataattaatgaagatggaaatgagattttcaacacatcattatttgaaccacctcctccaggatatgaaaatgtttcggatattgtaccacctttcagtgctttctctcctcaaggaatgccagagggcgatctagtgtatgttaactatgcacgaactgaagacttctttaaattggaacgggacatgaaaatcaattgctctgggaaaattgtaattgccagatatgggaaagttttcagaggaaataaggttaaaaatgcccagctggcaggggccaaaggagtcattctctactccgaccctgctgactactttgctcctggggtgaagtcctatccagatggttggaatcttcctggaggtggtgtccagcgtggaaatatcctaaatctgaatggtgcaggagaccctctcacaccaggttacccagcaaatgaatatgcttataggcgtggaattgcagaggctgttggtcttccaagtattcctgttcatccaattggatactatgatgcacagaagctcctagaaaaaatgggtggctcagcaccaccagatagcagctggagaggaagtctcaaagtgccctacaatgttggacctggctttactggaaacttttctacacaaaaagtcaagatgcacatccactctaccaatgaagtgacaagaatttacaatgtgataggtactctcagaggagcagtggaaccagacagatatgtcattctgggaggtcaccgggactcatgggtgtttggtggtattgaccctcagagtggagcagctgttgttcatgaaattgtgaggagctttggaacactgaaaaaggaagggtggagacctagaagaacaattttgtttgcaagctgggatgcagaagaatttggtcttcttggttctactgagtgggcagaggagaattcaagactccttcaagagcgtggcgtggcttatattaatgctgactcatctatagaaggaaactacactctgagagttgattgtacaccgctgatgtacagcttggtacacaacctaacaaaagagctgaaaagccctgatgaaggctttgaaggcaaatctctttatgaaagttggactaaaaaaagtccttccccagagttcagtggcatgcccaggataagcaaattgggatctggaaatgattttgaggtgttcttccaacgacttggaattgcttcaggcagagcacggtatactaaaaattgggaaacaaacaaattcagcggctatccactgtatcacagtgtctatgaaacatatgagttggtggaaaagttttatgatccaatgtttaaatatcacctcactgtggcccaggttcgaggagggatggtgtttgagctagccaattccatagtgctcccttttgattgtcgagattatgctgtagttttaagaaagtatgctgacaaaatctacagtatttctatgaaacatccacaggaaatgaagacatacagtgtatcatttgattcacttttttctgcagtaaagaattttacagaaattgcttccaagttcagtgagagactccaggactttgacaaaagcaacccaatagtattaagaatgatgaatgatcaactcatgtttctggaaagagcatttattgatccattagggttaccagacaggcctttttataggcatgtcatctatgctccaagcagccacaacaagtatgcaggggagtcattcccaggaatttatgatgctctgtttgatattgaaagcaaagtggacccttccaaggcctggggagaagtgaagagacagatttatgttgcagccttcacagtgcaggcagctgcagagactttgagtgaagtagcctaagaggattctttagagaatccgtattgaatttgtgtggtatgtcactcagaaagaatcgtaatgggtatattgataaattttaaaattggtatatttgaaataaagttgaatattatatataaaaaaa

SEQ ID NO: 2780 - DNA, 1148 bp, Homo sapiens
cttctttaaatttctttctaggatgttcacttcttctccacaatgaatgagtgtcactatgacaagcacatggactttttttataataggagcaacactgatactgtcgatgactggacaggaacaaagcttgtgattgttttgtgtgttgggacgtttttctgcctgtttatttttttttctaattctctggtcatcgcggcagtgatcaaaaacagaaaatttcatttccccttctactacctgttggctaatttagctgctgccgatttcttcgctggaattgcctatgtattcctgatgtttaacacaggcccagtttcaaaaactttgactgtcaaccgctggtttctccgtcaggggcttctggacagtagcttgactgcttccctcaccaacttgctggttatcgccgtggagaggcacatgtcaatcatgaggatgcgggtccatagcaacctgaccaaaaagagggtgacactgctcattttgcttgtctgggccatcgccatttttatgggggcggtccccacactgggctggaattgcctctgcaacatctctgcctgctcttccctggcccccatttacagcaggagttaccttgttttctggacagtgtccaacctcatggccttcctcatcatggttgtggtgtacctgcggatctacgtgtacgtcaagaggaaaaccaacgtcttgtctccgcatacaagtgggtccatcagccgccggaggacacccatgaagctaatgaagacggtgatgactgtcttaggggcgtttgtggtatgctggaccccgggcctggtggttctgctcctcgacggcctgaactgcaggcagtgtggcgtgcagcatgtgaaaaggtggttcctgctgctggcgctgctcaactccgtcgtgaaccccatcatctactcctacaaggacgaggacatgtatggcaccatgaagaagatgatctgctgcttctctcaggagaacccagagaggcgtccctctcgcatcccctccacagtcctcagcaggagtgacacaggcagccagtacatagaggatagtattagccaaggtgcagtctgcaataaaagcacttcctaaactctggatgcctctcggcccacccaggtgatgactgtcttagg

SEQ ID NO: 2781 - DNA, 2628 bp, Homo sapiens
tttgtgtggactgagtgttttggccatcccggtccactctcacaggctccgttaagtgacatgaactctcaggaggactgagccagaagcggacagggcaagacgagctgtgcttgaaggaagaggggcagaaaatcgagggtcagggactgagaagctactccggtttagaaaccccagagacacccgtgtagatgggtacatcacggcttctctcccacgttaagacttaataaagaaagcctgatctttgaccagatggcagtaacatttgaagatgtgactattatttttacatgggaggagtggaaattcctggattcttctcaaaaaagactctacagggaggtcatgtgggagaactacacaaatgtcatgtcagtagaaaactggaatgagagctacaaatcccaagaagaaaaattcagatacttagaatatgaaaatttttcctactggcaaggctggtggaatgctggcgcccagatgtatgagaatcagaactatggggaaactgttcaagggacagattccaaagacctcacacagcaagatcgttcccagtgtcaggaatggttaatactctccacacaagtaccagggtatgggaactatgaactgacttttgaaagcaaaagtctcaggaacttaaaatataaaaattttatgccttggcagtccttagaaacaaaaaccactcaagactatggtagagaaatctacatgagtggttcacatggttttcaagggggcagataccgtcttggcatatccaggaaaaacctctccatggaaaaagaacagaagctcatagttcagcattcttatatcccagtggaggaagcccttccacagtatgttggggtgatatgtcaagaagacctactgagagattcaatggaagaaaagtactgtggatgtaataaatgtaaaggaatttattattggaactcacggtgtgttttccacaagagaaatcaacctggagaaaacctctgtcaatgctccatccgtaaagcatgcttctctcagagatcagacttgtatagacatccaagaaaccacataggtaagaagctgtacggatgtgatgaagttgacggtaactttcatcagagctccggagttcactttcatcagagagttcacataggggaggtaccttatagctgtaatgcatgtggtaagagcttcagccagatctctagtcttcacaatcatcaaagagtccacacagaagagaaattctataaaattgagtgtgataaagacctcagtagaaattcattacttcacattcaccagagacttcacataggagagaagccttttaaatgtaatcagtgtggtaagagttttaatcggagttcagtacttcatgttcatcagagagtccacacaggagaaaaaccatataagtgtgatgagtgtggtaagggtttcagccagagctcaaatcttcgaattcatcagttagtacacacaggagagaagtcttataaatgtgaagactgtggtaaaggctttacccagcgctcaaatcttcaaattcatcagagagtgcatacaggagagaaaccttataaatgtgatgactgtggaaaggactttagtcacagctcagatcttcgcattcatcagagagtccatacaggggagaaaccctatacttgtcctgaatgtgggaagggcttcagtaagagttcaaagcttcacactcatcaaagagtacatactggagagaaaccctacaaatgtgaagagtgtggcaagggattcagtcagcgttcacatcttctcattcatcagagagtccatacaggagaaaagccctataaatgtcatgattgtggaaagggttttagtcacagttctaatcttcacattcatcagagggtccatacaggagagaagccttatcaatgtgctaagtgtggtaaaggtttcagtcatagctcagctcttcgaattcatcaaagagtccatgcaggagagaaaccttacaaatgccgtgaatattataagggatttgatcataattcacatcttcacaataatcatagaagaggaaacttataaatattgttcatttagttaacagctttaatcaaagtttacctaacctttaaaccctataaatcctgctgttaaggaaatcttataaataacacaagtaatcccaagcaacatttatagtttcccctatctcccactaagaattatttgcttcaaaaggagatctttagaaaaatccctatatatttaaaattatagtgtatttttctttacctactataaatataatacagtcataaatatattaaacatttaaggagaaaactcttcattctatttcattctagtctttttttctgtgcattttaatgtgcatgaaattatattgtgtgttcaattttgtattttcactgtcttcaaaatatttacttaaattttggtttgaattgaaactggttggccaactgttaaacaacatctcttaactcccctaaaaactccctaggaagtaacagaaaagatggaaacacacagaacttaaaactcagttttggccggtagaattcaattgtttatggacaaaagccacctaataaaagataggaaagcatt

SEQ ID NO: 2782 - DNA, 1950 bp, Homo sapiens
ggaattcggcacgaggagagagagaactagtctcgcgtttttttttcttccctctagtgggcggggcagaggagttagccaagatgtgactttgaaaccctcagcgtctcagtgcccttttgttctaaacaaagaattttgtaattggttctaccaaagaaggatataatgaagtcactatgggaaaagatggggaggagagttgtaggattctacattaattctcttgtgcccttagcccactacttcagaatttcctgaagaaagcaagcctgaattggttttttaaattgctttaaaaattttttttaactgggttaatgcttgctgaattggaagtgaatgtccattcctttgcctcttttgcagatatacacttcagataactacaccgaggaaatgggctcaggggactatgactccatgaaggaaccctgtttccgtgaagaaaatgctaatttcaataaaatcttcctgcccaccatctactccatcatcttcttaactggcattgtgggcaatggattggtcatcctggtcatgggttaccagaagaaactgagaagcatgacggacaagtacaggctgcacctgtcagtggccgacctcctctttgtcatcacgcttcccttctgggcagttgatgccgtggcaaactggtactttgggaacttcctatgcaaggcagtccatgtcatctacacagtcaacctctacagcagtgtcctcatcctggccttcatcagtctggaccgctacctggccatcgtccacgccaccaacagtcagaggccaaggaagctgttggctgaaaaggtggtctatgttggcgtctggatccctgccctcctgctgactattcccgacttcatctttgccaacgtcagtgaggcagatgacagatatatctgtgaccgcttctaccccaatgacttgtgggtggttgtgttccagtttcagcacatcatggttggccttatcctgcctggtattgtcatcctgtcctgctattgcattatcatctccaagctgtcacactccaagggccaccagaagcgcaaggccctcaagaccacagtcatcctcatcctggctttcttcgcctgttggctgccttactacattgggatcagcatcgactccttcatcctcctggaaatcatcaagcaagggtgtgagtttgagaacactgtgcacaagtggatttccatcaccgaggccctagctttcttccactgttgtctgaaccccatcctctatgctttccttggagccaaatttaaaacctctgcccagcacgcactcacctctgtgagcagagggtccagcctcaagatcctctccaaaggaaagcgaggtggacattcatctgtttccactgagtctgagtcttcaagttttcactccagctaacacagatgtaaaagacttttttttatacgataaataacttttttttaagttacacatttttcagatataaaagactgaccaatattgtacagtttttattgcttgttggatttttgtcttgtgtttctttagtttttgtgaagtttaattgacttatttatataaattttttttgtttcatattgatgtgtgtctaggcaggacctgtggccaagttcttagttgctgtatgtctcgtggtaggactgtagaaaagggaactgaacattccagagcgtgtagtgaatcacgtaaagctagaaatgatccccagctgtttatgcatagataatctctccattcccgtggaacgtttttcctgttcttaagacgtgattttgctgtagaagatggcacttataaccaaagcccaaagtggtatagaaatgctggtttttcagttttcaggagtgggttgatttcagcacctacagtgtacagtcttgtattaagttgttaataaaagtacatgttaaacttaaaaaaaaaaaaaaaaaa

SEQ ID NO: 2783 - DNA, 2816 bp, Homo sapiens; identical to SEQ ID NO: 212

SEQ ID NO: 2784 - DNA, 7392 bp, Homo sapiens
  misc_feature (7110)..(7110): n is a, c, g, or t
gctgcgcagcgctggctgctggctggcctcgcggagacgccgaacggacgcggccggcgccggcttgtgggctcgccgcctgcagccatgaccctcgcagcctgtccctcggcctcggcccgggacgtctaaaatcccacacagtcgcgcgcagctgctggagagccggccgctgccccctcgtcgccgcatcacactcccgtcccgggagctgggagcagcgcgggcagccggcgcccccgtgcaaactgggggtgtctgccagagcagccccagccgctgccgctgctacccccgatgctggccatggcctggcggggcgcagggccgagcgtcccgggggcgcccgggggcgtcggtctcagtctggggttgctcctgcagttgctgctgctcctggggccggcgcggggcttcggggacgaggaagagcggcgctgcgaccccatccgcatctccatgtgccagaacctcggctacaacgtgaccaagatgcccaacctggttgggcacgagctgcagacggacgccgagctgcagctgacaactttcacaccgctcatccagtacggctgctccagccagctgcagttcttcctttgttctgtttatgtgccaatgtgcacagagaagatcaacatccccattggcccatgcggcggcatgtgtctttcagtcaagagacgctgtgaacccgtcctgaaggaatttggatttgcctggccagagagtctgaactgcagcaaattcccaccacagaacgaccacaaccacatgtgcatggaagggccaggtgatgaagaggtgcccttacctcacaaaacccccatccagcctggggaagagtgtcactctgtgggaaccaattctgatcagtacatctgggtgaaaaggagcctgaactgtgtgctcaagtgtggctatgatgctggcttatacagccgctcagccaaggagttcactgatatctggatggctgtgtgggccagcctgtgtttcatctccactgccttcacagtactgaccttcctgatcgattcttctaggttttcctaccctgagcgccccatcatatttctcagtatgtgctataatatttatagcattgcttatattgtcaggctgactgtaggccgggaaaggatatcctgtgattttgaagaggcagcagaacctgttctcatccaagaaggacttaagaacacaggatgtgcaataattttcttgctgatgtacttttttggaatggccagctccatttggtgggttattctgacactcacttggtttttggcagcaggactcaaatggggtcatgaagccattgaaatgcacagctcttatttccacattgcagcctgggccatccccgcagtgaaaaccattgtcatcttgattatgagactggtggatgcagatgaactgactggcttgtgctatgttggaaaccaaaatctcgatgccctcaccgggttcgtggtggctcccctctttacttatttggtcattggaactttgttcattgctgcaggtttggtggccttgttcaaaattcggtcaaatcttcaaaaggatgggacaaagacagacaagttagaaagactgatggtcaagattggggtgttctcagtactgtacacagttcctgcaacgtgtgtgattgcctgttatttttatgaaatctccaactgggcactttttcggtattctgcagatgattccaacatggctgttgaaatgttgaaaacttttatgtctttgttggtgggcatcacttcaggcatgtggatttggtctgccaaaagtcttcacacgtggcagaagtgttccaacagattggtgaattctggaaaggtaaagagagagaagagaggaaatggttgggtgaagcctggaaaaggcagtgagactgtggtataaggctagtcagcctccatgctttcttcattttgaaggggggaatgccagcattttggaggaaattctactaaaagttttatgcagtgaatctcagtttgaacaaactagcaacaattaagtgacccccgtcaacccactgcctcccaccccgaccccagcatcaaaaaaccaatgattttgctgcagactttggaatgatccaaaatggaaaagccagttagaggctttcaaagctgtgaaaaatcaaaacgttgatcactttagcaggttgcagcttggagcgtggaggtcctgcctagattccaggaagtccagggcgatactgttttcccctgcagggtgggatttgagctgtgagttggtaactagcagggagaaatattaacttttttaaccctttaccattttaaatactaactgggtctttcagatagcaaagcaatctataaacactggaaacgctgggttcagaaaagtgttacaagagttttatagtttggctgatgtaacataaacatcttctgtggtgcgctgtctgctgtttagaactttgtggactgcactcccaagaagtggtgttagaatctttcagtgcctttgtcataaaacagttatttgaacaaacaaaagtactgtactcacacacataaggtatccagtggatttttcttctctgtcttcctctcttaaatttcaacatctctcttcttggctgctgctgttttcttcattttatgttaatgactcaaaaaaggtatttttatagaatttttgtactgcagcatgcttaaagaggggaaaaggaagggtgattcactttctgacaatcacttaattcagaggaaaatgagatttactaagttgacttacctgacggaccccagagacctattgcattgagcagtggggacttaatatattttacttgtgtgattgcatctatgcagacgccagtctggaagagctgaaatgttaagtttcttggcaactttgcattcacacagattagctgtgtaatttttgtgtgtcaattacaattaaaagcacattgttggaccatgacatagtatactcaactgactttaaaactatggtcaacttcaacttgcattctcagaatgatagtgcctttaaaatttttttattttttaaagcataagaatgttatcagaatctggtctacttaggacaatggagactttttcagttttataaagggaactgaggacagctaatccaactacttggtgctgtaattgtttcctagtaattggcaaaggctccttgtaagatttcactggaggcagtgtggcctggagtatttatatggtgcttaatgaatctccagaatgccagccagaagcctgattggttagtagggaataaagtgtagaccatatgaaatgaactgcaaactctaatagcccaggtcttaattgcctttagcagaggtatccaaagcttttaaaatttatgcatacgttcttcacaagggggtacccccagcagcctctcgaaaattgcacttctcttaaaactgtaactggcctttctcttaccttgccttaggccttctaatcatgagatcttggggacaaattgactatgtcacaggttgctctccttgtaactcatacctgtctgcttcagcaactgctttgcaatgacatttatttattaattcatgccttaaaaaaataggaagggaagcttttttttttctttttttttttttcaatcacactttgtggaaaaacatttccagggactcaaaattccaaaaaggtggtcaaattctggaagtaagcatttcctcttttttaaaaatttggtttgagccttatgcccatagtttgacatttccctttcttctttcctttttgtttttgtgtggttcttgagctctctgacatcaagatgcatgtaaagtcgattgtatgttttgaaggcaaagtcttggcttttgagactgaagttaagtgggcacaggtggcccctgctgctgtgcccagtctgagtaccttggctagactctaggtcaggctccaggagcatgagaattgatccccagaagaaccattttaactccatctgatactccattgcctatgaaatgtaaaatgtgaactccctgtgctgcttgtagacagttcccataactgtccacggccctggagcacgcacccaggggcagagcctgcccttactcacgctctgctctggtgtcttgggagttgtgcagggactctggcccaggcaggggaaggaagaccaggcggtaggggactggtcttgctgttagagtatagaggtttgtaatgcagttttcttcataatgtgtcagtgattgtgtgaccaaggcagcatctagcagaaagccaggcatggagtaggtgatcgatacttgtcaatgactaaataataacaataaaagagcacttgggtgaatctgggcacctgatttctgagttttgagttctggagctagtgttttgacaatgctttgggttttgacatgccttttccacaaatctcttgccttttcagggcaaagtgtatttgatcagaagtggccatttggattagtagccttagcaatgctacagggttataggcccctctccctttcacattccagacaatggagagtgtttatggtttcaggaaaagaactttgtggctgaggggtcagttaccagtgaccttcaatcaactccatcacttcttaaatcggtatttgttaaaaaaatcagttattttatttattgagtgccgactgtagtaaagccctgaaatagataatctctgttcttctaactgatctaggatggggacgcacccaggtctgctgaactttactgttcctctgggaaaggagcagggacctctggaattcccatctgtttcactgtctccattccataaatctcttcctgtgtgagccaccacacccagcctgggtctctctacttttaacacatctctcatccctttcccaggacttccttccaagtcagttacaggtggttttaacagaaagcatcagctctgcttcgtgacagtctctggagaaatcccttaggaagactatgagagtaggccacaaggacatgggcccacacatctgctttggctttgccggcaattcagggcttggggtattccatgtgacttgtataggtatatttgaggacagcatcttgctagagaaaaggtgagggttgtttttctttctctgaaacctacagtaaatgggtatgattgtagcttcctcagaaatcccttggcctccagagattaaacatggtgcaatggcacctctgtccaacctcctttctggtagattcctttctcctgcttcatataggccaaacctcagggcaagggaacatgggggtagagtggtgctggccagaaccatctgcttgagctacttggttgattcatatcctctttcctttatggagacccatttcctgatctctgagactgttgctgaactggcaacttacttgggcctgaaactggagaaggggtgacatttttttaatttcagagatgctttctgattttcctctcccaggtcactgtctcacctgcactctccaaactcaggttccgggaagcttgtgtgtctagatactgaattgagattctgttcagcaccttttagctctatactctctggctcccctcatcctcatggtcactgaattaaatgcttattgtattgagaaccaagatgggacctgaggacacaaagatgagctcaacagtctcagccctagaggaatagactcagggatttcaccaggtcggtgcagtatttgatttctggtgaggtgaccacagctgcagttaggaagggagccattgagcacagactttggaaggaaccttttttttgttgtttgtttgtttgtttgtttgtttgtttgtttgagacagggtcttgctctgctacccaggctggggcgcaatggcacgatcttggctcactgcaacctctgcctcctgggttcaagtgattctcctgccacagcctcctgaggagctgggactacaggtgcgtgctaccacgcccagctacttctgtatttttagtagagacggggtttcactgtgttggccaggctggtctcgaactcctgacctcatgatctgcccgcctcagcctcccaaagtgctgggattacaagtgtgagccaccacacctggcctggaaggaacctcttaaaatcagtttacgtcttgtattttgttctgtgatggaggacactggagagagttgctattccagtcaatcatgtcgagtcactggactctgaaaatcctattggttcctttattttatttgagtttagagttcccttctgggtttgtattatgtctggcaaatgacctgggttatcacttttcctccagggttagatcatagatcttggaaactccttagagagcattttgctcctaccaaggatcagatactggagccccacataatagatttcatttcactctagcctacatagagctttctgttgctgtctcttgccatgcacttgtgcggtgattacacacttgacagtaccaggagacaaatgacttacagatcccccgacatgcctcttccccttggcaagctcagttgccctgatagtagcatgtttctgtttctgatgtaccttttttctcttcttctttgcatcagccaattcccagaatttccccaggcaatttgtagaggacctttttggggtcctatatgagccatgtcctcaaagcttttaaacctccttgctctcctacaatattcagtacatgaccactgtcatcctagaaggcttctgaaaagaggggcaagagccactctgcgccacaaaggttggatccatcttctctccgaggttgtgaaagttttcaaattgtactaataggctggggccctgacttggctgtgggctttgggaggggtaagctgctttctagatctctcccagtgaggcatggaggtgtttctgaattttgtctacctcacagggatgttgtgaggcttgaaaaggtcaaaaaatgatggccccttgagctctttgtaagaaaggtagatgaaatatcggatgtaatctgaaaaaaagataaaatgtgacttcccctgctctgtgcagcagtcgggctggatgctctgtggcntttcttgggtcctcatgccaccccacagctccaggaaccttgaagccaatctggggactttcagatgtttgacaaagaggtaccaggcaaacttcctgctacacatgccctgaatgaattgctaaatttcaaaggaaatggaccctgcttttaaggatgtacaaaagtatgtctgcatcgatgtctgtactgtaaatttctaatttatcactgtacaaagaaaaccccttgctatttaattttgtattaaaggaaaataaagttttgtttgttaaaaaaaaa

SEQ ID NO: 2785 - DNA, 734 bp, Homo sapiens
caacagagcaccagcttccctcctgccctgaagatgttccaccaaatttgggcagctctgctctacttctatggtattatccttaactccatctaccagtgccctgagcacagtcaactgacaactctgggcgtggatgggaaggagttcccagaggtccacttgggccagtggtactttatcgcaggggcagctcccaccaaggaggagttggcaacttttgaccctgtggacaacattgtcttcaatatggctgctggctctgccccgatgcagctccaccttcgtgctaccatccgcatgaaagatgggctctgtgtgccccggaaatggatctaccacctgactgaagggagcacagatctcagaactgaaggccgccctgacatgaagactgagctcttttccagctcatgcccaggtggaatcatgctgaatgagacaggccagggttaccagcgctttctcctctacaatcgctcaccacatcctcccgaaaagtgtgtggaggaattcaagtccctgacttcctgcctggactccaaagccttcttattgactcctaggaatcaagaggcctgtgagctgtccaataactgacctgtaacttcatctaagtccccagatgggtacaatgggagctgagttgttggagggagaagctggagacttccagctccagctcccactcaagataataaagataattcttcaatcctcaaaaaaaaaaaaaa

SEQ ID NO: 2786 - DNA, 2416 bp, Homo sapiens
cgatttcattcctcgctccccacaggtccctctccccaaaatattcccatcttgtcctagcccatcccccagactatctcaaggaccagctgtccccacgcccccgacctccactaggcctgtgccacccgctgcctgcaggaagacgcccggtcccgggccgggttagccccatgggaacgcagcgcctgtgtggccgcgggactcaaggctggcctggctcaagtgaacagcacgtccaggaggcgacctcgtccgcgggtttgcattctggggtggacgagctgggggttcggtccgagcccggtgggaggctcccggagcgcagcctgggcccagcccaccccgcgccggcggccatggcaggcaccctggacctggacaagggctgcacggtggaggagctgctccgcgggtgcatcgaagccttcgatgactccgggaaggtgcgggacccgcagctggtgcgcatgttcctcatgatgcacccctggtacatcccctcctctcagctggcggccaagctgctccacatctaccaacaatcccggaaggacaactccaattccctgcaggtgaaaacgtgccacctggtcaggtactggatctccgccttcccagcggagtttgacttgaacccggagttggctgagcagatcaaggagctgaaggctctgctagaccaagaagggaaccgacggcacagcagcctaatcgacatagacagcgtccctacctacaagtggaagcggcaggtgactcagcggaaccctgtgggacagaaaaagcgcaagatgtccctgttgtttgaccacctggagcccatggagctggcggagcatctcacctacttggagtatcgctccttctgcaagatcctgtttcaggactatcacagtttcgtgactcatggctgcactgtggacaaccccgtcctggagcggttcatctccctcttcaacagcgtctcacagtgggtgcagctcatgatcctcagcaaacccacagccccgcagcgggccctggtcatcacacactttgtccacgtggcggagaagctgctacagctgcagaacttcaacacgctgatggcagtggtcgggggcctgagccacagctccatctcccgcctcaaggagacccacagccacgttagccctgagaccatcaagctctgggagggtctcacggaactagtgacggcgacaggcaactatggcaactaccggcgtcggctggcagcctgtgtgggcttccgcttcccgatcctgggtgtgcacctcaaggacctggtggccctgcagctggcactgcctgactggctggacccagcccggacccggctcaacggggccaagatgaagcagctctttagcatcctggaggagctggccatggtgaccagcctgcggccaccagtacaggccaaccccgacctgctgagcctgctcacggtgtctctggatcagtatcagacggaggatgagctgtaccagctgtccctgcagcgggagccgcgctccaagtcctcgccaaccagccccacgagttgcaccccaccaccccggcccccggtactggaggagtggacctcggctgccaaacccaagctggatcaggccctcgtggtggagcacatcgagaagatggtggagtctgtgttccggaactttgacgtcgatggggatggccacatctcacaggaagaattccagatcatccgtgggaacttcccttacctcagcgcctttggggacctcgaccagaaccaggatggctgcatcagcagggaggagatggtttcctatttcctgcgctccagctctgtgttgggggggcgcatgggcttcgtacacaacttccaggagagcaactccttgcgccccgtcgcctgccgccactgcaaagccctgatcctgggcatctacaagcagggcctcaaatgccgagcctgtggagtgaactgccacaagcagtgcaaggatcgcctgtcagttgagtgtcggcgcagggcccagagtgtgagcctggaggggtctgcaccctcaccctcacccatgcacagccaccatcaccgcgccttcagcttctctctgccccgccctggcaggcgaggctccaggcctccagagatccgtgaggaggaggtacagacggtggaggatggggtgtttgacatccacttgtaatagatgctgtggttggatcaaggactcattcctgccttggagaaaatacttcaaccagagcagggagcctgggggtgtcggggcaggaggctggggatgggggtgggatatgagggtggcatgcagctgagggcagggccagggctggtgtccctaaggttgtacagactcttgtgaatatttgtattttccagatggaataaaaaggcccgtgtaattaaccttca

SEQ ID NO: 2787 - DNA, 2310 bp, Homo sapiens
cgatttcattcctcgctccccacaggtccctctccccaaaatattcccatcttgtcctagcccatcccccagactatctcaaggaccagctgtccccacgcccccgacctccactaggcctgtgccacccgctgcctgcaggaagacgcccggtcccgggccgggttagccccatgggaacggggttcggtccgagcccggtgggaggctcccggagcgcagcctgggcccagcccaccccgcgccggcggccatggcaggcaccctggacctggacaagggctgcacggtggaggagctgctccgcgggtgcatcgaagccttcgatgactccgggaaggtgcgggacccgcagctggtgcgcatgttcctcatgatgcacccctggtacatcccctcctctcagctggcggccaagctgctccacatctaccaacaatcccggaaggacaactccaattccctgcaggtgaaaacgtgccacctggtcaggtactggatctccgccttcccagcggagtttgacttgaacccggagttggctgagcagatcaaggagctgaaggctctgctagaccaagaagggaaccgacggcacagcagcctaatcgacatagacagcgtccctacctacaagtggaagcggcaggtgactcagcggaaccctgtgggacagaaaaagcgcaagatgtccctgttgtttgaccacctggagcccatggagctggcggagcatctcacctacttggagtatcgctccttctgcaagatcctgtttcaggactatcacagtttcgtgactcatggctgcactgtggacaaccccgtcctggagcggttcatctccctcttcaacagcgtctcacagtgggtgcagctcatgatcctcagcaaacccacagccccgcagcgggccctggtcatcacacactttgtccacgtggcggagaagctgctacagctgcagaacttcaacacgctgatggcagtggtcgggggcctgagccacagctccatctcccgcctcaaggagacccacagccacgttagccctgagaccatcaagctctgggagggtctcacggaactagtgacggcgacaggcaactatggcaactaccggcgtcggctggcagcctgtgtgggcttccgcttcccgatcctgggtgtgcacctcaaggacctggtggccctgcagctggcactgcctgactggctggacccagcccggacccggctcaacggggccaagatgaagcagctctttagcatcctggaggagctggccatggtgaccagcctgcggccaccagtacaggccaaccccgacctgctgagcctgctcacggtgtctctggatcagtatcagacggaggatgagctgtaccagctgtccctgcagcgggagccgcgctccaagtcctcgccaaccagccccacgagttgcaccccaccaccccggcccccggtactggaggagtggacctcggctgccaaacccaagctggatcaggccctcgtggtggagcacatcgagaagatggtggagtctgtgttccggaactttgacgtcgatggggatggccacatctcacaggaagaattccagatcatccgtgggaacttcccttacctcagcgcctttggggacctcgaccagaaccaggatggctgcatcagcagggaggagatggtttcctatttcctgcgctccagctctgtgttgggggggcgcatgggcttcgtacacaacttccaggagagcaactccttgcgccccgtcgcctgccgccactgcaaagccctgatcctgggcatctacaagcagggcctcaaatgccgagcctgtggagtgaactgccacaagcagtgcaaggatcgcctgtcagttgagtgtcggcgcagggcccagagtgtgagcctggaggggtctgcaccctcaccctcacccatgcacagccaccatcaccgcgccttcagcttctctctgccccgccctggcaggcgaggctccaggcctccagagatccgtgaggaggaggtacagacggtggaggatggggtgtttgacatccacttgtaatagatgctgtggttggatcaaggactcattcctgccttggagaaaatacttcaaccagagcagggagcctgggggtgtcggggcaggaggctggggatgggggtgggatatgagggtggcatgcagctgagggcagggccagggctggtgtccctaaggttgtacagactcttgtgaatatttgtattttccagatggaataaaaaggcccgtgtaattaaccttca

SEQ ID NO: 2788 - DNA, 3261 bp, Homo sapiens
gccaatcagagagagctcgcccccgttttcttcggttccctgctgtccagagttaaaagtgatactgagaaagagcttgagttagattgaagtagaatcagtgatagaaaataacagccgaaaacaaacaaaaaggggacatagtgacaatttctcctgggttattttggctggaaccaacttccattatccagaagctgataaaaaagctttgggaaacatgaacaaaacattgatgaaatgttggaaaccagttgaaacacagtaaaaccaactgggtaaaataggaccacttctcttcatctacactgggatttgtcaagaagtgaactatgacaatacatcaatttttgctactgtttctattctgggtatgcctgccacatttctgctctccagaaataatgttcagaaggacgcctgtgccacagcaaagaattttaagttcacgtgtaccaaggagtgatggcaaaattctccatcgtcaaaaacgtggttggatgtggaatcaatttttcttacttgaagaatatacaggatctgattatcagtacgtaggcaagctacattcagaccaagataaaggagatggatcactcaaatatatcttatctggagatggagctggtactctttttattattgatgaaaaaacaggtgatattcatgccacaaggcgaattgatagggaggaaaaggccttttatactctacgcgcacaagctattaacagaagaactctgaggccagtagagccagagtcagagtttgtgatcaaaattcatgatatcaatgacaatgagccaacgttcccagaagaaatctatacagctagtgttcccgaaatgtctgttgtaggtacttctgtggtgcaagtcacagctacagatgccgatgacccttcatatgggaacagcgccagagtcatttacagcatacttcaagggcagccctatttctctgtggagcctgaaacaggtatcatcaggactgctttaccgaacatgaacagagaaaacagagagcaataccaagtggtcatccaggccaaagacatgggcggccagatgggaggcttatcggggacaaccactgtgaacatcacgctgacagatgtcaatgacaacccaccacgtttcccccagaacactattcatcttcgagttcttgaatcctccccagttggcacagccattggaagtgtcaaagcaactgatgctgacactgggaaaaatgctgaagtagaataccgaattattgatggtgacggtactgatatgtttgacatcgtgactgagaaggacacacaggaaggcatcatcactgtgaaaaagccactcgactatgagagccgaagactttatactctgaaagtcgaagcagaaaacacccatgtagatccccgtttttattacctaggaccatttaaagatactaccatagtgaaaatctctatagaagatgtggatgaacctcctgtttttagtaggtcctcctatctgtttgaagttcatgaagatattgaagtgggcacaatcattggtactgtaatggcaagggacccagattctatttccagccccattagattttccttggatcgccatactgaccttgacagaatctttaacattcattcaggaaatggatctctttatacatcaaaacctcttgaccgtgaactatctcagtggcataatcttactgttattgctgctgaaatcaacaatcccaaagagacaacacgcgtggctgtttttgtgagaattttggatgttaatgacaatgccccacagtttgctgtgttctatgacacttttgtatgtgaaaatgccagaccagggcagctaatacagactataagtgcagtagacaaagatgaccctttaggtggacagaaattttttttcagtttagctgctgtcaatccaaacttcacagtacaggataatgaagataatactgccagaatcttaaccagaaaaaatggattcaatagacatgaaatcagtacctatctcttgcctgtggtgatatcagacaatgattacccaattcagagcagcacaggcacactgaccattcgagtgtgtgcttgtgacagccaaggcaacatgcaatcctgcagtgctgaagccctgctcctccctgccggcctcagcactggggccttgatcgccatcctcctctgcatcatcattctactggttatagtagtactgtttgcagctctgaaaagacagcgaaaaaaagagcctctgatcttgtcaaaagaagatatcagagacaacattgtgagctataacgatgagggtggtggagaggaggacacccaggcctttgatatcggcaccctgaggaatcctgcagccattgaggaaaaaaagctccggcgagatattattccagaaacgttatttattcctcggaggactcctacagctccagataacacggacgtccgggatttcattaatgaaaggctaaaagagcatgatcttgaccccaccgcacccccctacgactcacttgcaacctatgcctatgaaggaaatgattccattgctgaatctctgagttcattagaatcaggtactactgaaggagaccaaaactacgattacctccgagaatggggccctcggtttaataagctagcagaaatgtatggtggtggggaaagtgacaaagactcttaacgtaggatatatgttctgttcaaacaagagaaagtaactctacccatgctgtctccacttcacaatatttgatattcaggagcattttcctgccagtcagcacaattttttttctcatttacttcttaatttgttcattaattacattaattctttcctgtaggatgtctcatggaatatatatgacattttatttaatcacttccaagagccaaagctatggaaatacagtgttgtccatcttagtaaataaaagataatttcagaaacatgaacaggatagttctcccttaagcaacctcacaaacaagccgcttctgttaggtacatgtcctgcccttgcaaatgaagcttttaaaaaggtgaagaaaaattttacagtatatcctgttctgtacattaaattaaaaaaacaaaaatgtacatgtgatgttagtaggtgtgatatgcaacctggtatacagacatttgtgcaatttcatttcatcaaattctatctgctaatgttttatatttatatttttgtatttatttttaaaaaaataaaccagtttttacaact

SEQ ID NO: 2789 - DNA, 2447 bp, Homo sapiens
gcatggaggacacagagagagagagtgctgtgtattccttccccgctactgtcctgtcctcagctaacttgctctgggacagcttccccagggctacagatactgcactcagctgactgtcctttcttctgggcccctggtcccagagcagagctgacaaaggagattcctgagagagcaccttcttatcacagaaagtgctgagccaagagctcctagctgccccttttgcagatgtgaagggccagtgaaccttggacccagatggttgcttaatactcctttccccctccctcactccttcctttgcgggctgcctcacctcctccacccttcttgcttaaatccataggcatttgtctggccttcccttttactgctggctgggaaggaggagcatcagaccacagatcctggaaggcacttctctccctgactgccgctcacactgccgtgagaacctgcttatatccaggaccaaggaggcaatgccaggaagctggtgaagggtttcctctcctccaccatggttgacagcactgagtatgaagtggcctcccagcctgaggtggaaacctcccctttgggtgatggggccagcccagggccggagcaggtgaagctgaagaaggagatctcactgcttaacggcgtgtgcctgattgtggggaacatgatcggctcaggcatctttgtttcccccaagggtgtgctcatatacagtgcctcctttggtctctctctggtcatctgggctgtcgggggcctcttctccgtctttggggccctttgttatgtggaactgggcaccaccattaagaaatctggggccagctatgcctatatcctggaggcctttggaggattccttgctttcatcagactctggacctccctgctcatcattgagcccaccagccaggccatcattgccatcacctttgccaactacatggtacagcctctcttcccgagctgcttcgccccttatgctgccagccgcctgctggctgctgcctgcatttgtctcttaaccttcattaactgtgcctatgtcaaatggggaaccctggtacaagatattttcacctatgctaaagtattggcactgatcgcggtcatcgttgcaggcattgttagacttggccagggagcctctactcattttgagaattcctttgagggttcatcatttgcagtgggtgacattgccctggcactgtactcagctctgttctcctactcaggctgggacaccctcaactatgtcactgaagagatcaagaatcctgagaggaacctgcccctctccattggcatctccatgcccattgtcaccatcatctatatcttgaccaatgtggcctattatactgtgctagacatgagagacatcttggccagtgatgctgttgctgtgacttttgcagatcagatatttggaatatttaactggataattccactgtcagttgcattatcctgttttggtggcctcaatgcctccattgtggctgcttctaggcttttctttgtgggctcaagagaaggccatctccctgatgccatctgcatgatccatgttgagcggttcacaccagtgccttctctgctcttcaatggtatcatggcattgatctacttgtgcgtggaagacatcttccagctcattaactactacagcttcagctactggttctttgtggggctttctattgtgggtcagctttatctgcgctggaaggagcctgatcgacctcgtcccctcaagctcagcgttttcttcccgattgtcttctgcctctgcaccatcttcctggtggctgttccactttacagtgatactatcaactccctcatcggcattgccattgccctctcaggcctgcccttttacttcctcatcatcagagtgccagaacataagcgaccgctttacctccgaaggatcgtggggtctgccacaaggtacctccaggtcctgtgtatgtcagttgctgcagaaatggatttggaagatggaggagagatgcccaagcaacgggatcccaagtctaactaaacaccatctggaatcctgatgtggaaagcaggggtttctggtctactggctagagctaaggaagttgaaaaggaaagctcacttctttggaggcacctgtccagaagcctggcctaggcagcttcaacctttgaacttactttttgaaatgaaaagtaatttatttgttttgctacatactgttccagacttttaaaggggacaatgaaggtgactgtggggaggagcatgtcaggtttgggcttggttgttttagaagcacctgggtgtgcctacctactcctcttttcttttaaaagggcccacaatgctccaatttcctgtctcctttagagagacatgaaactatcacaggtgctggatgacaataaaagtttatgttcct

SEQ ID NO: 2790 - DNA, 4932 bp, Homo sapiens
tgcgagcaacagatccggacgccgcgagctgacccgctctgctgttgggcgatttttttttaattgcagaaaaatttattaaattggaaaatcttgcgtttttcaatggcgctggccccgggtcagcgggcgattttctctgcatcaagatgggctttgccgtttccgtagtgggcaccagtggtggcctgattgtcagtcttctcccggcatttttaaggccaggagccgagcgctgcttgtaggcgaataccctacagagcggtttggctttttaaattactgttattattttgggcagagaacagtcggtctggtgcaccccgtcctcgctgcagaagaggctgcgagtccgaggtgggtctctcggaaggtgaaattccttctggggtgagcgagccccggccccgcgcgcagtccagcggccccgcgtgtgtgccctcgccctgccggagccgggaaaatggaggctgtgattgagaaggaatgcagcgcgctcggaggcctcttccagaccatcatcagcgacatgaaggggagctatccagtttgggaagatttcataaacaaagcaggaaagctgcagtcccagcttcggacaacagtagtagcagcagctgccttcttggacgcctttcagaaagtggctgacatggccaccaacacacgtggtgggaccagggagattggatctgctctcaccaggatgtgcatgaggcacagaagcattgaagccaagctgaggcagttttcgagcgctttaattgattgtctgataaacccacttcaagaacagatggaagaatggaagaaagtggccaaccagctggataaagaccacgcaaaagaatataagaaagcccgccaagagataaaaaagaagtcctcggatacgctgaaactgcagaagaaagcaaaaaaagggagaggtgatatccagcctcagttggacagtgctctccaagatgtcaatgataagtatctcttattggaagaaacagaaaagcaggctgtccggaaggctttgattgaagaacgtggccgattctgtaccttcatctctatgctgcggccagtgattgaagaagaaatctcaatgctaggggaaataacccaccttcagaccatctcggaagatctaaaaagcctgaccatggaccctcacaaactgccctcctcaagtgaacaggtgattctggacttgaaaggttctgattacagctggtcgtatcagacgccaccctcttcccccagcaccaccatgtccagaaagtccagtgtctgcagcagcctgaacagtgtcaacagcagtgactcccggtccagcggctcccactcgcattcccccagctcacattaccgctaccgcagctccaacctggcccagcaggctcctgtgaggctgtccagcgtgtcctcccatgactcaggattcatatcccaggatgccttccagtccaagtcaccatcccccatgccgccagaggcccccaaccagttgtctaacgggttttctcactatagtttatcaagtgagtcccacgtggggcccacgggtgcaggccttttccctcattgcctgcctgcctcccgcctgctccctcgggtcacctctgtccaccttccagactacgctcattattacaccattgggcccggcatgttcccgtcatctcagatccctagctggaaggactgggctaagcctgggccctatgaccagcctctggtgaacaccctgcagcgccgcaaagagaagcgagaaccggaccccaacgggggaggacccactaccgccagcggcccacctgcagcagctgaggaggctcagagaccacggagcatgactgtatcggctgccaccaggcctggtgaggagatggaggcttgtgaggagctggccctggccctgtctcggggcctgcagctggacacccagaggagcagccgggactcgcttcagtgctccagcggctacagcacccagacaaccaccccctgctgctctgaggacaccatcccttcccaagtttcagattatgattatttctctgtaagtggtgaccaggaggcagatcagcaggagttcgacaagtcctccaccattccaagaaacagcgacatcagccagtcctaccgacggatgttccaagccaagcgtccagcctcaactgctggcctccccaccaccctgggacctgctatggtcactccaggggttgcaactatccgacggaccccttccaccaagccttctgtccgccggggaaccattggagctggtcccatccccatcaagacacccgtgatccctgtcaagaccccaaccgtcccagacctcccaggggtgatgccagcccctccagatgggccagaagagcggggggagcacagccctgagtcgccatctgtgggtgagggcccccaaggtgtcaccagcatgccctcctcaatgtggagcggccaagcttccgttaaccctccacttccaggcccgaagcccagtatccctgaggagcacagacaggcaattccagaaagtgaagctgaagaccaggaacgggaacccccaagtgccactgtctccccaggccagattccagagagtgaccctgcagacctgagcccaagggatactccacaaggagaagacatgctgaacgccatccgaaggggcgtgaaactgaagaagaccacgacaaacgatcgctcagcccctcgcttttcttaggttcacaagaaatgcgccggtggggaatgaactgtttcattaataaaacctaatttgtcttgatccattccactctataataaaacaaaagattttgtaggcaactcggaatatagctcttttgaaagtactcgacacctttagataagaattaaaaccaacctatgtaactgacataatcttgatcttttaatttgtaaatattgacaattttctttctgcacattttaatcttagtttcccttttgatttttctgaaggtgccaaattccatttaacttttttacaagtctttgtaaaattttaaatgcataaagggggttggggcaggggaaccacgaagtagttaattttagaaaaggatttactatacttcactcttctttttttttccccacaagcttttgtagatgcattgtagtagtctagcttagaagcaaatgcaagttattttaatgtacaaactaaatgggtaagaggtaaaatcttcatttaaatatactatgttctggatgaaaagagcaggagtaacaattgatgagcaatattcagagtgaagtaaatctggaaatggtagactgtgttgggattggggggagggccatgggaggggtacatcgtcaacatagccgatcctgttacatttaagagtagcctcgtaggttgaatttcttctggtagcttcatggtaaatgcatccgaataagccatactggattgcagtgtttgtttctgtagggtgtttaaggacttgacttcctttctcccatgattcctctggactgcacacagcacccacaaccagccccatgcatgctgctgcctctgggcagtcgtagaatctcccacttcagtttctcgttgattgtactcacctttatggaatccaaatacatccaaaagggtaaggcagttttaaaaatgtgaaaacatttaaaaatgataatagcagggaattcttagattatagtaaatgccttttacttaactgtgcccagcaggctgggtgcgttaaaaagcccaagtattttgaaaaaactcgaacagatttgacaagggtagccagcttggagtctagcaacttgccaatgtgtttaccaatctgggggcttgtttttcttttcttctttcaaataaatggcagttaactggctttacagtaaacattgaagagaggaggatttgtttattgtcactgggaatctgaccactatactgtcctttttttgtattctgggtaatgttttttggaaaagatttgtcttttctaagtggaagttaaatttgttatactgcccatcccctaaagccaacagagatttgtagatttaaagggatcacatttgaagacaatagtgtttaagaaagcaagcaagtcccttagcagtcaggtcataacagggcacatttctgaccgaaccctctcaaggcagaggaggagtttggtgggtttcatacaccctgcagattcctgttggctctaaccctcaattacctaatcttatgctttaacacataactgcattggatgtgagagtaacgtaccgtatggtcattgttctatatattaacattgaacactgctgcgattgctcaaggacattttatgttacggctttaaagcaaaggcatgattattagaaactatttaagcttttttctttgaaaaacaagcttcttttacagaatataaacaacagtagtgcctgtggtttagcccaccaatcttgatgactaaaagtagctgatgcattgtgcatatgatgcttgagatggtttttgcaaaagcagaaatcgctgcaaggtaatcacaatagataaaagtggtattttaaacctttgaaataaatggatgtaactgtaccttggtacagcttttcacttgtttagtttttaaacgttagtataatctgaataaataaaatgttgccaaattcaatgtagaaagaatgtgacaacacaccttgggtagttctgcttgtgtttttgcatattgtaaaagcagtgtcacagctaaaaagaaagaaatcgtttctaacagtaaattattgtgctttagttgctagtttgtactgagagttgacctctccctgtgcagttttttgttctaaacttgtataaataacaattgtgtaatgtgtctccctcctacattgtaacaattgcttcagcctacgttataaataaagaaccactagatt

SEQ ID NO: 2791 - DNA, 702 bp, Homo sapiens
agccggtagcgggaaggatgaccacgctcacacgacaagacctcaactttggccaagtggtggccgatgtgctctgcgagttcctggaggtggctgtgcatctcatcctctacgtgcgcgaggtctaccccgtgggcatcttccagaaacgcaagaagtacaacgtgccggtccagatgtcctgccacccggagctgaatcagtatatccaggacacgctgcactgcgtcaagccactcctggagaaaaatgatgtggagaaagtggtggtggtgattttggataaagagcaccgcccagtggataaattcgtctttgagatcacccagcctccactgctgtccatcagctcagactcgctgttgtctcatgtggagcagctgctccgggccttcatcctgaagatcagcgtgtgcgatgccgtcctggaccacaaccccccaggctgtaccttcacagtcctggtgcacacgagagaagccgccactcgcaacatggagaagatccaggtcatcaaggatttcccctggatcctggcggatgagcaggatgtccacatgcatgacccccggctgataccactaaaaaccatgacgtcggacattttaaaggtgcagctttacgtggaagagcgcgctcataaaggcagctgaaggggcacctgccaccccactgatgcccaaactgtcagactttggggga

SEQ ID NO: 2792 - DNA, 4151 bp, Homo sapiens
gggaatagcagaataggagcaagccagcactagtcagctaactaagtgactcaaccaaggccttttttccttgttatctttgcagatacttcattttcttagcgtttctggagattacaacatcctgcggttccgtttctgggaactttactgatttatctcccccctcacacaaataagcattgattcctgcatttctgaagatctcaagatctggactactgttgaaaaaatttccagtgaggctcacttatgtctgtaaagatgggaaaaaaatacaagaacattgttctactaaaaggattagaggtcatcaatgattatcattttagaatggttaagtccttactgagcaacgatttaaaacttaatttaaaaatgagagaagagtatgacaaaattcagattgctgacttgatggaagaaaagttccgaggtgatgctggtttgggcaaactaataaaaattttcgaagatataccaacgcttgaagacctggctgaaactcttaaaaaagaaaagttaaaagtaaaaggaccagccctatcaagaaagaggaagaaggaagtgcatgctacttcacctgcaccctccacaagcagcactgtcaaaactgaaggagcagaggcaactcctggagctcagaaaagaaaaaaatcaaccaaagaaaaggctggacccaaagggagtaaggtgtccgaggaacagactcagcctccctctcctgcaggagccggcatgtccacagccatgggccgttccccatctcccaagacctcattgtcagctccacccaacagttcttcaactgagaacccgaaaacagtggccaaatgtcaggtaactcccagaagaaatgttctccaaaaacgcccagtgatagtgaaggtactgagtacaacaaagccatttgaatatgagaccccagaaatggagaaaaaaataatgtttcatgctacagtggctacacagacacagttcttccatgtgaaggttttaaacaccagcttgaaggagaaattcaatggaaagaaaatcatcatcatatcagattatttggaatatgatagtctcctagaggtcaatgaagaatctactgtatctgaagctggtcctaaccaaacgtttgaggttccaaataaaatcatcaacagagcaaaggaaactctgaagattgatattcttcacaaacaagcttcaggaaatattgtatatggggtatttatgctacataagaaaacagtaaatcagaagaccacaatctacgaaattcaggatgatagaggaaaaatggatgtagtggggacaggacaatgtcacaatatcccctgtgaagaaggagataagctccagcttttctgctttcgacttagaaaaaagaaccagatgtcaaaactgatttcagaaatgcatagttttatccagataaagaaaaaaacaaacccgagaaacaatgaccccaagagcatgaagctaccccaggaacagcgtcagcttccatatccttcagaggccagcacaaccttccctgagagccatcttcggactcctcagatgccaccaacaactccatccagcagtttcttcaccaagaaaagtgaagacacaatctccaaaatgaatgacttcatgaggatgcagatactgaaggaagggagtcattttccaggaccgttcatgaccagcataggcccagctgagagccatccccacactcctcagatgcctccatcaacaccaagcagcagtttcttaaccacgttgaaaccaagactgaagactgaacctgaagaagtttccatagaagacagtgcccagagtgacctcaaagaagtgatggtgctgaacgcaacagaatcatttgtatatgagcccaaagagcagaagaaaatgtttcatgccacagtggcaactgagaatgaagtcttccgagtgaaggtttttaatattgacctaaaggagaagttcaccccaaagaagatcattgccatagcaaattatgtttgccgcaatgggttcctggaggtatatcctttcacacttgtggctgatgtgaatgctgaccgaaacatggagatcccaaaaggattgattagaagtgccagcgtaactcctaaaatcaatcagctttgctcacaaactaaaggaagttttgtgaatggggtgtttgaggtacataaggtaagcccacaccattgttttataaaatttctcctgcaacctccaatttttaaagtcttaacttgtcaactggagtttggtcaacttactcaacacagaaaatcaaccccttcacccttcccccagcactagagataattgaatagagttcatttcaggatatggggtacgttatattgtaacattcctcttcttaaggtatcatcatgcaagttatttagacagtcactaggaaacttggcattttattagttttgatgatctattcagagccacccttgtccaggacagtgcagagtttatatcaacacacatatccttaggattttgtttctttgagttcttctccatctgtatcaatgacaacttaatttaattgtgaataaaagagttgctctcccaagcctgaatcctgattgtgacaaccagagtaagaaataaaatagactactctgctttagaatgcagctatgtctaacagttagctagaattctgatcatttggactccaaagtttcttgcctcttctcattcattaattcatcaggagactgtagagcaactaacttctgcattaaataataagagaaatacgaagcaaaaagactaaaaaagtcacgtagcttaactgctcaatttataaatggggcaataaaatgcaaaaaaaaagaaaaaaagcttggtgaattcttaggcttacagtgtgcctttcagtctctacacatcatgtaaatattatgcttagctgatttaacttcttgtttgaagtactgtttcatactccattatacatgtcttctagggtggcttacttttaattgtgctgttttctctacactcagtttaaatgactgtacatatatatgtggttggagagttaatgaataatgagctacaaaccagaacaatgtgactagatagataggatgatctagaattgagaactggcagattgggaaaagagtggctatatggagaaagaaagaaagtagttccatattgaaataacagtctacttaatgaggaccgttgcaacattctttctcaaacttacaaagtgccataaaaagcctctattctctgctcttgggcaggtgtgaaagaaacctaccaaattaatcagatttttctgtatccaggctccttaaaaaatcccagctgtgctgatgtggaaacaggaagaattaggaaagtaatcaattttttttcctagaaaaaatccagcagacaaagaacttcaacaaaagaggctcaagggaggagttgaaaggcaggattcaaagaccaagtatcttaagctatttggtacctgttattcaggacctacagctctgtttactctatcaaagaccaaaagtttccagaaacaccctgtatttctcatagatttgaaaattattgatccagtttcagaagataagtgttaattttcttttgcagaaaaatgtaaggggtgaattcacttattatgaaatacaagataatacagggaagatggaagtggtggtgcatggacgactgaccacaatcaactgtgaggaaggagataaactgaaactcacctgctttgaattggcaccgaaaagtgggaataccggggagttgagatctgtaattcatagtcacatcaaggtcatcaagaccaggaaaaacaagaaagacatactcaatcctgattccaagtatggaaacttcaccagactttttcttctaaaatctggatgtcattgacgataatgtttatggagataaggtctaagtgcctaaaaaaatgtacatatacctggttgaaatacaacactatacatacacaccaccatatatactagctgttaatcctatggaatggggtattgggagtgcttttttaatttttcatagtttttttttaataaaatggcatattttgcatctacaacttctataatttgaaaaaataaataaacattatcttttttgtgaaaaaaaaa

SEQ ID NO: 2793 - DNA, 2400 bp, Homo sapiens
ggtctcactctgttgctgtcttcacggagagcaggagcagaggctttgagaagccagtgggccttggcctcagccctgccggcagagggtccccaccatgcagctgaagtgccagggtgcttgtgaagtctaagcccttgtctggcatttgtcaggaatataggcgcacacttaagcggcccgggcgggtaccgccgtcccgccatggctctgaggcgcgccctgcccgcgctgcgcccctgcattccccgcttcgtccagctgtccacggcgccggcctcccgcgagcagcccgcagcgggcccagcggccgtgccaggaggtgggtcggccacggcagtgcggccgccggtgcccgccgtggacttcggcaacgcgcaggaggcgtaccgcagccggcgaacctgggagctggcgcggagcctgctggtgctgcgcttgtgcgcctggcccgcgctgctggcgcgccacgagcagctgctgtatgtttccaggaaacttctaggacagaggctattcaacaagctcatgaagatgaccttctatgggcattttgtagccggggaggaccaggagtccatccagcccctgcttcggcactacagggccttcggtgtcagcgccatcctggactatggagtggaggaggacctgagccccgaggaggcagagcacaaggagatggagtcctgcacctcagctgcggagagggatggcagtggcacgaataagcgggacaagcaataccaggcccaccgggccttcggggaccgcaggaatggtgtcatcagtgcccgcacctacttctacgccaatgaggccaagtgcgacagccacatggagacattcttgcgctgcatcgaagcctcaggtagagtcagcgatgacggcttcatagccattaagctcacagcactggggagaccccagtttctgctgcagttctcagaggtgctggccaagtggaggtgcttctttcaccaaatggctgtggagcaagggcaggcgggcctggctgccatggacaccaagctggaggtggcggtgctgcaggaaagtgtcgcaaagttgggcatcgcatccagggctgagattgaggactggttcacggcagagaccctgggagtgtctggcaccatggacctgctggactggagcagcctcatcgacagcaggaccaagctgtccaagcacctggtagtccccaacgcacagacaggacagctggagcccctgctgtccgggttcactgaggaggaggagctacagatgaccaggatgctacagcggatggatgtcctggccaagaaagccacagagatgggcgtgcggctgatggtggatgccgagcagacctacttccagccggccatcagccgcctgacgctggagatgcagcggaagttcaatgtggagaagccgctcatcttcaacacataccagtgctacctcaaggatgcctatgacaatgtgaccctggacgtggagctggctcgccgtgagggctggtgttttggggccaagctggtgcggggcgcatacctggcccaggagcgagcccgtgcggcagagatcggctatgaggaccccatcaaccccacgtacgaggccaccaacgccatgtaccacaggtgcctggactacgtgttggaggagctgaagcacaacgccaaggccaaggtgatggtggcctcccacaatgaggacacagtgcgcttcgcactgcgcaggatggaggagctgggcctgcatcctgctgaccaccaggtgtactttggacagctgctaggcatgtgtgaccagatcagcttcccgctgggccaggccggctaccccgtgtacaagtacgtgccctatggccccgtgatggaggtgctgccctacttgtcccgccgtgccctggagaacagcagcctcatgaagggcacccatcgggagcggcagttgctgtggctggagctcttgaggcggctccgaactggcaacctcttccatcgccctgcctagcacccgccagcacaccctcagcctccagcaccccccgcccccgcccaggccatcaccacagctgcagccaaccccatcctcacacagattcaccttttttcaccccacacttgcagagctgctggaggtgaggtcaggtgcctcccagccctgcccagagtatgggcactcaggtgtgggccgaacctgatacctgcctgggacagccactggaaacttttgggaactctcctcgaatgtgtgggcccaaggcccccacctctgtgacccccatgtccttggacctagaggattgtccaccttctgccaaggccagcccacacagcccgagccccttggggagcagtggccgggctggggaggcctgcctggtcaataaaccactgttcctgc

SEQ ID NO: 2794 - DNA, 2567 bp, Homo sapiens
gctccagcccggcccgacccgaccgcacccggcgcctgccctcgctcggcgtccccggccagccatgggcccttggagccgcagcctctcggcgctgctgctgctgctgcaggtctcctcttggctctgccaggagccggagccctgccaccctggctttgacgccgagagctacacgttcacggtgccccggcgccacctggagagaggccgcgtcctgggcagagtgaattttgaagattgcaccggtcgacaaaggacagcctatttttccctcgacacccgattcaaagtgggcacagatggtgtgattacagtcaaaaggcctctacggtttcataacccacagatccatttcttggtctacgcctgggactccacctacagaaagttttccaccaaagtcacgctgaatacagtggggcaccaccaccgccccccgccccatcaggcctccgtttctggaatccaagcagaattgctcacatttcccaactcctctcctggcctcagaagacagaagagagactgggttattcctcccatcagctgcccagaaaatgaaaaaggcccatttcctaaaaacctggttcagatcaaatccaacaaagacaaagaaggcaaggttttctacagcatcactggccaaggagctgacacaccccctgttggtgtctttattattgaaagagaaacaggatggctgaaggtgacagagcctctggatagagaacgcattgccacatacactctcttctctcacgctgtgtcatccaacgggaatgcagttgaggatccaatggagattttgatcacggtaaccgatcagaatgacaacaagcccgaattcacccaggaggtctttaaggggtctgtcatggaaggtgctcttccaggaacctctgtgatggaggtcacagccacagacgcggacgatgatgtgaacacctacaatgccgccatcgcttacaccatcctcagccaagatcctgagctccctgacaaaaatatgttcaccattaacaggaacacaggagtcatcagtgtggtcaccactgggctggaccgagagagtttccctacgtataccctggtggttcaagctgctgaccttcaaggtgaggggttaagcacaacagcaacagctgtgatcacagtcactgacaccaacgataatcctccgatcttcaatcccaccacgggcttggattttgaggccaagcagcagtacattctacacgtagcagtgacgaatgtggtaccttttgaggtctctctcaccacctccacagccaccgtcaccgtggatgtgctggatgtgaatgaagcccccatctttgtgcctcctgaaaagagagtggaagtgtccgaggactttggcgtgggccaggaaatcacatcctacactgcccaggagccagacacatttatggaacagaaaataacatatcggatttggagagacactgccaactggctggagattaatccggacactggtgccatttccactcgggctgagctggacagggaggattttgagcacgtgaagaacagcacgtacacagccctaatcatagctacagacaatggttctccagttgctactggaacagggacacttctgctgatcctgtctgatgtgaatgacaacgcccccataccagaacctcgaactatattcttctgtgagaggaatccaaagcctcaggtcataaacatcattgatgcagaccttcctcccaatacatctcccttcacagcagaactaacacacggggcgagtgccaactggaccattcagtacaacgacccaacccaagaatctatcattttgaagccaaagatggccttagaggtgggtgactacaaaatcaatctcaagctcatggataaccagaataaagaccaagtgaccaccttagaggtcagcgtgtgtgactgtgaaggggccgccggcgtctgtaggaaggcacagcctgtcgaagcaggattgcaaattcctgccattctggggattcttggaggaattcttgctttgctaattctgattctgctgctcttgctgtttcttcggaggagagcggtggtcaaagagcccttactgcccccagaggatgacacccgggacaacgtttattactatgatgaagaaggaggcggagaagaggaccaggactttgacttgagccagctgcacaggggcctggacgctcggcctgaagtgactcgtaacgacgttgcaccaaccctcatgagtgtcccccggtatcttccccgccctgccaatcccgatgaaattggaaattttattgatgaaaatctgaaagcggctgatactgaccccacagccccgccttatgattctctgctcgtgtttgactatgaaggaagcggttccgaagctgctagtctgagctccctgaactcctcagagtcagacaaagaccaggactatgactacttgaacgaatggggcaatcgcttcaagaagctggctgacatgtacggaggcggcgaggacgactaggggactcgagagaggcgggccccagacccatgtgctg

SEQ ID NO: 2795 - DNA, 2807 bp, Homo sapiens
gctccagcccggcccgacccgaccgcacccggcgcctgccctcgctcggcgtccccggccagccatgggcccttggagccgcagcctctcggcgctgctgctgctgctgcaggtctcctcttggctctgccaggagccggagccctgccaccctggctttgacgccgagagctacacgttcacggtgccccggcgccacctggagagaggccgcgtcctgggcagagtgaattttgaagattgcaccggtcgacaaaggacagcctatttttccctcgacacccgattcaaagtgggcacagatggtgtgattacagtcaaaaggcctctacggtttcataacccacagatccatttcttggtctacgcctgggactccacctacagaaagttttccaccaaagtcacgctgaatacagtggggcaccaccaccgccccccgccccatcaggcctccgtttctggaatccaagcagaattgctcacatttcccaactcctctcctggcctcagaagacagaagagagactgggttattcctcccatcagctgcccagaaaatgaaaaaggcccatttcctaaaaacctggttcagatcaaatccaacaaagacaaagaaggcaaggttttctacagcatcactggccaaggagctgacacaccccctgttggtgtctttattattgaaagagaaacaggatggctgaaggtgacagagcctctggatagagaacgcattgccacatacactctcttctctcacgctgtgtcatccaacgggaatgcagttgaggatccaatggagattttgatcacggtaaccgatcagaatgacaacaagcccgaattcacccaggaggtctttaaggggtctgtcatggaaggtgctcttccaggaacctctgtgatggaggtcacagccacagacgcggacgatgatgtgaacacctacaatgccgccatcgcttacaccatcctcagccaagatcctgagctccctgacaaaaatatgttcaccattaacaggaacacaggagtcatcagtgtggtcaccactgggctggaccgagagagtttccctacgtataccctggtggttcaagctgctgaccttcaaggtgaggggttaagcacaacagcaacagctgtgatcacagtcactgacaccaacgataatcctccgatcttcaatcccaccacgtacaagggtcaggtgcctgagaacgaggctaacgtcgtaatcaccacactgaaagtgactgatgctgatgcccccaataccccagcgtgggaggctgtatacaccatattgaatgatgatggtggacaatttgtcgtcaccacaaatccagtgaacaacgatggcattttgaaaacagcaaaggacctggcaagatgcagaaactggcatcctcacagctgttcatacccttgtcccctgggcttggattttgaggccaagcagcagtacattctacacgtagcagtgacgaatgtggtaccttttgaggtctctctcaccacctccacagccaccgtcaccgtggatgtgctggatgtgaatgaagcccccatctttgtgcctcctgaaaagagagtggaagtgtccgaggactttggcgtgggccaggaaatcacatcctacactgcccaggagccagacacatttatggaacagaaaataacatatcggatttggagagacactgccaactggctggagattaatccggacactggtgccatttccactcgggctgagctggacagggaggattttgagcacgtgaagaacagcacgtacacagccctaatcatagctacagacaatggttctccagttgctactggaacagggacacttctgctgatcctgtctgatgtgaatgacaacgcccccataccagaacctcgaactatattcttctgtgagaggaatccaaagcctcaggtcataaacatcattgatgcagaccttcctcccaatacatctcccttcacagcagaactaacacacggggcgagtgccaactggaccattcagtacaacgacccaacccaagaatctatcattttgaagccaaagatggccttagaggtgggtgactacaaaatcaatctcaagctcatggataaccagaataaagaccaagtgaccaccttagaggtcagcgtgtgtgactgtgaaggggccgccggcgtctgtaggaaggcacagcctgtcgaagcaggattgcaaattcctgccattctggggattcttggaggaattcttgctttgctaattctgattctgctgctcttgctgtttcttcggaggagagcggtggtcaaagagcccttactgcccccagaggatgacacccgggacaacgtttattactatgatgaagaaggaggcggagaagaggaccaggactttgacttgagccagctgcacaggggcctggacgctcggcctgaagtgactcgtaacgacgttgcaccaaccctcatgagtgtcccccggtatcttccccgccctgccaatcccgatgaaattggaaattttattgatgaaaatctgaaagcggctgatactgaccccacagccccgccttatgattctctgctcgtgtttgactatgaaggaagcggttccgaagctgctagtctgagctccctgaactcctcagagtcagacaaagaccaggactatgactacttgaacgaatggggcaatcgcttcaagaagctggctgacatgtacggaggcggcgaggacgactaggggactcgagagaggcgggccccagacccatgtgctg

SEQ ID NO: 2796 - DNA, 6649 bp, Homo sapiens
agggaaggttggcagagggatccatgtgactgaggccggagcacggcaaagatgagcctgcccgcccgcctgctgcctggatgcggagggtgagggctggcgcacgggaggccgctggctgcgcattctgggcgccgagtgcccgggatgagctcacgcccgcgtctgcggctctctccacctgccgacctgccgggggcccactgagctgacggcgcacctgggctccggccgcagcgtggggcgcggcgcccgggagcaggtgtgcaggagcgcagcgcgcggcgagcgcagccctcgctccggagcccggccgcgccgcgtgcccgggcggctaggcagcggcggcggcggcggcgggcggcgggcgggcggcggcccccgggcaggtgccgagcggcgagcggagccgggccgggcggagcgcggggggcgaggccggcgcgtcgctcgcgggaggccggggagcggcaggggcatgtggatactggctctctccttgttccagagcttcgcgaatgttttcagtgaagacctacactccagcctctactttgtcaatgcatctctgcaagaggtagtgtttgccagcaccacggggactctggtgccctgccccgcagcaggcatccctcctgtgactctcagatggtacctagccacgggcgaggagatctacgatgtccccgggatccgccacgtccaccccaacggcactctccaaattttccccttccctccttcaagcttcagtaccttaatccatgataatacttattattgcacagctgaaaatccttcagggaaaattagaagtcaggatgtccacatcaaggctgttttacgggagccctatacagtccgtgtggaggaccagaaaaccatgagaggcaatgttgcggtcttcaagtgcattatcccctcctcggtggaggcgtacatcactgtcgtctcatgggagaaagacactgtttcacttgtctcaggatctagatttctcatcacatccacgggagccttgtatattaaagatgtacagaatgaagatggattgtataactaccgctgcatcacgcggcatcgatacaccggagagacgaggcagagcaacagcgccagactttttgtatcagacccagcgaactcagccccatccatactggatgggtttgaccatcgcaaagccatggctgggcagcgtgtggagctgccttgcaaagcgctcgggcaccctgagccagattaccgctggctgaaggacaacatgcccctggaactttcagggaggttccagaagaccgtgacggggctgctcattgagaacattcgcccctcggactcaggcagctatgtttgtgaagtgtccaacagatacggaactgctaaggtgataggccgcctgtacgtgaaacagccactgaaagccaccatcagtcccaggaaggttaaaagcagcgtgggtagccaagtttccttgtcctgcagcgtgacaggaactgaggaccaggaactctcctggtaccgcaatggtgaaatcctcaaccctggaaaaaatgtgaggatcacagggatcaaccacgaaaaccttataatggatcacatggtcaaaagtgacgggggcgcataccagtgctttgtgcgcaaggacaagctgtccgctcaagactatgtgcaggtggtccttgaagatggaactcccaaaattatttctgcctttagtgaaaaggtggtgagtccagcagagccggtttcccttatgtgcaacgtgaagggaacacctttgcccacgatcacgtggaccctggacgatgacccgattctcaagggtggcagtcaccgcatcagccagatgatcacgtcggaggggaacgtggtcagctacctgaacatctccagctcccaggtccgggacgggggagtctaccgctgcactgccaacaactcggcgggagtcgtcctgtaccaggctcgaataaacgtaagagggcctgcaagcattcgaccaatgaaaaacatcacagcaatagcaggacgggacacatacattcactgtcgtgtgattggctatccgtattactccattaaatggtacaagaactctaacctgcttcctttcaaccaccgccaagtggcatttgagaacaatggaactcttaaactttcagatgtgcaaaaggaagtggacgagggggagtacacgtgcaacgtgttggttcaaccacaactctccaccagccagagcgtccacgtgaccgtgaaagttccgcctttcatacaaccctttgagtttccaagattctccattgggcagcgggtcttcatcccctgtgttgtggtctcaggggacttacccatcacgatcacctggcagaaggatggccggccaatccctgggagccttggggtgaccattgacaatattgacttcacgagctccttgaggatttccaatctctcgctcatgcacaatgggaattacacctgcatagcccggaatgaggccgccgctgtggagcaccaaagccagttgattgtcagagttcctcccaagtttgtggttcagccacgggaccaggacgggatttatggcaaagcagtcatcctcaattgttctgctgagggttaccctgtacctaccatcgtgtggaaattctctaaaggtgctggggttccccagttccagccaattgccctaaatggccgaatccaagttctcagcaatgggtcgttgctgatcaagcatgtcgtggaggaagacagtggctactacctctgcaaggtcagcaacgatgtgggcgcagacgtcagcaagtccatgtacctcacggttaaaattcctgcgatgataacatcctatccaaatactaccctggccacgcaggggcagaaaaaggagatgagctgcacggcgcatggtgagaagcccattatagtccgctgggagaaggaggaccgaatcattaaccctgagatggcccgttatcttgtgtccaccaaggaggtgggagaagaggtgatttctactctgcagattttgccaactgtgagagaagattctggtttcttttcctgccatgctattaattcttatggggaggaccgtggaataattcagctcacagtgcaagagcccccagaccctcccgaaattgagatcaaagatgtcaaagcacgcacaattacgctcaggtggaccatggggtttgatggaaacagtcccatcacaggctacgatattgaatgcaaaaataaatcagactcctgggattctgctcagagaaccaaagatgtttcccctcagctgaactcggccaccatcattgatatccacccttcctccacctacagcatccgcatgtacgccaagaaccggattggcaagagcgagcccagcaacgagctcaccatcacggcggacgaggcagctcctgatggtccacctcaggaagttcacctggagcctatatcatctcagagcatcagggtcacatggaaggctcccaagaaacatttgcaaaatgggattatccgtggctaccaaataggttaccgagagtacagcactgggggtaacttccaattcaacattatcagtgtcgacaccagcggggacagtgaggtttacaccctggacaacctgaataagttcactcagtacggcctggtggtgcaggcctgtaaccgggccggcacggggccttcttctcaggaaatcatcaccaccactctcgaggatgtgcccagttacccccccgaaaatgtccaagccatagcaacatcaccagaaagcatatcaatatcctggtccacactttccaaggaagccttgaatggaattctccaggggttcagagtcatttactgggccaacctcatggacggagagctgggtgagattaaaaacatcaccaccacacagccttcactggagctggacgggctggaaaagtacaccaactacagcatccaggtgctggccttcacccgcgcaggagacggggtcaggagtgagcagatcttcacccggaccaaagaggatgttccaggtcctcccgcgggtgtgaaggcagcggcggcctcagcctccatggtctttgtgtcctggcttccccctctcaagctgaacggcatcatccgaaagtacactgtattctgctcccacccctatcccacagtgatcagcgagtttgaggcctctcccgactcgttttcctacagaattcccaacctgagtaggaatcgtcagtacagcgtctgggtggtggctgttacttcagccggaagaggcaacagcagtgaaatcatcacagtcgagccactagcaaaagctcctgcacgaatcctgaccttcagtgggacagtgactactccatggatgaaagacattgtcttgccttgtaaggctgttggggacccttctcctgcagtcaaatggatgaaagacagtaacgggacacccagtctagtaacgattgatgggcggaggagcatctttagcaacggaagcttcattattcgcacggtgaaagcagaagactccggctattacagctgcattgccaataacaactggggatctgatgaaattattttaaacttacaagtacaagttccaccagatcagcctcggcttacagtctccaagaccacgtcttcctccatcaccctttcttggctccctggagacaacgggggcagctctatcagaggatacatactgcagtactccgaggacaatagtgagcagtgggggagttttccaatcagccccagcgaacgttcctatcgcttggaaaatctcaaatgtgggacttggtataagttcacactgacagcccaaaatggagtgggcccagggcgcataagtgaaatcatagaagcaaagaccttaggaaaagagccccagttctcaaaggagcaggagctgtttgccagcatcaacaccacacgcgtgaggctgaacctcattggctggaatgatggcggctgccccatcacctccttcacactagagtacaggccctttgggaccacagtttggaccacagctcagaggacctctctctccaagtcctacatcctgtatgacctgcaggaagccacctggtatgagctgcagatgcgggtgtgcaacagtgcgggctgcgcggagaagcaggccaacttcgctacgctgaactacgatggcagtacaattcctccactcattaagtcagttgtccaaaacgaagaagggctgacgaccaacgaggggctcaagatgctggtgaccatctcctgtatcctggtgggggtcttgctgctgtttgtgctcctgctggttgtgcggaggaggcggcgggagcagaggctaaagaggctgcgagatgcaaagagtttagctgaaatgctcatgagtaagaatacccggacttcagatacgttaagcaagcaacagcagaccctgcgaatgcacatcgacatacccagggctcagcttttgattgaagagagagacacgatggagaccattgatgatcgctccacggttctgttgacggatgctgactttggagaggcagctaagcagaagtccctgacggtcactcacacggtccattaccaatcggtgtctcaggccactgggcccttagtggatgtttcagacgctcggccgggaacgaatcccaccaccaggaggaatgccaaggctgggcccacagcgagaaaccgctatgccagccagtggaccctcaaccgaccccaccccaccatctcagcacacaccctcaccacagactggaggctgccaacacccagggctgcaggatcagtagacaaagagagcgacagttacagcgtcagcccctcgcaagacacagatcgagcaagaagcagcatggtctccacagaaagtgcctcctccacttacgaagaactggccagggcctacgaacacgccaagatggaagagcaactgaggcacgccaagttcaccatcacggagtgcttcatatcagacacgtcatcggagcagttgacggcagggacaaatgagtacacggacagtctgacctccagcaccccttccgaatcgggaatctgcaggttcactgcatctccccccaaacctcaggatggaggaagagtaatgaatatggcagttccaaaggcacatcggccaggtgacctcatacatttgcctccataccttagaatggactttttgttaaaccgaggtggtccaggcaccagcagggacctgagcttaggacaagcatgcttggaacctcagaaaagccggaccctgaagcgccccacggtcctggagcccatcccgatggaagccgcctcctccgcctcctccacgagagaaggacagtcgtggcagccgggggccgtggccacattacctcagcgggagggagcagagctgggacaggcagctaaaatgagcagctcccaagaatcactgctcgactcccggggccatttgaaaggaaacaatccttacgcaaaatcttacaccctggtataacagacagcatgactggacagcggttgtaaatacaattcaaacaattcaatcaaagctaccttttttttacggaattccaatatttataattaaagaaaattgccaaaatatattaaaaaaaaaaaaaaaaaa

SEQ ID NO: 2797 - DNA, 709 bp, Homo sapiens
cgtttccccgatagtatttggggatctcgaagcgatacttccggctccccccaggtccccaagctttacttttgtggggcacgacgagaaagtccgcagccccaaacattcccagaggtccacttgggccagtggtactttatcgcaggggcagctcccaccaaggaggagttggcaacttttgaccctgtggacaacattgtcttcaatatggctgctggctctgccccgatgcagctccaccttcgtgctaccatccgcatgaaagatgggctctgtgtgccccggaaatggatctaccacctgactgaagggagcacagatctcagaactgaaggccgccctgacatgaagactgagctcttttccagctcatgcccaggtggaatcatgctgaatgagacaggccagggttaccagcgctttctcctctacaatcgctcaccacatcctcccgaaaagtgtgtggaggaattcaagtccctgacttcctgcctggactccaaagccttcttattgactcctaggaatcaagaggcctgtgagctgtccaataactgacctgtaacttcatctaagtccccagatgggtacaatgggagctgagttgttggagggagaagctggagacttccagctccagctcccactcaagataataaagataatttttcaatcctcaaaaaaaaaaaaaaaaaaaaaaaaaaaa

SEQ ID NO: 2798 - DNA, 1163 bp, Homo sapiens; identical to SEQ ID NO: 1777

SEQ ID NO: 2799 - DNA, 1690 bp, Homo sapiens
aagcataacaggacccggtgcatttcaaggactgaaataaggagggccgacagcatgacttctgaagaccaagaacctgagcgggactatgagaacgagtctgagtcttcggagcccaaactgggcgaggaatccatggaaggggatgagcacattcacagcgaagtgagtgaaaaagtcctgatgaatagtgagaggcctgatgagaaccacagtgagccctctcaccaggacgtcatcaaggtgaaggaagaatttacagaccccacttacgacatgttttacatgagccagtatggactgtacaatggtgggggtgccagcatggccgccttgcatgagagctttacatcgtctctgaattatggcagccctcaaaagttctccccagaaggtgacctatgttctagcccagaccccaaaatctgttatgtgtgcaagaagagtttcaaaagctcctacagtgtgaaacttcactacaggaacgttcacttgaaagagatgcacgtctgcacagtggctggttgcaatgctgcattcccctctcgccgaagccgagacagacacagtgccaacataaacctacatcgtaaactgttgaccaaagaactcgatgacatgggcctggactcgtcgcagccctcccttagcaaggacctccgcgatgaatttttggtgaagatatatggtgcccagcaccccatggggctcgatgtcagggaagacgcctcctctcccgcagggactgaagactcccacctgaacgggtatgggagaggcatggcagaggactacatggtccttgacttgagcaccacctccagcctccagtccagcagcagtatccattcctccagagaatccgacgcaggcagcgatgaggggattcttctcgatgacattgacggggcgagtgacagtggggagtcggcacacaaggccgaggcccctgccctccctggcagcctaggggctgaagtttcaggatctcttatgttcagcagcttgtctgggagcaatggtgggatcatgtgcaacatttgccacaaaatgtacagcaacaaggggaccctgagagtgcactacaaaactgtgcatttgagagaaatgcacaagtgcaaagtcccaggttgcaatatgatgttttcctctgtacgaagccgaaatcggcacagtcagaaccctaatctccacaaaaacattcccttcacttcagtagattagtctcagaatggacactacaaatgccagctctcaccagatggcctacgtgtttgaactgccatagtcagtgtgcgcttatgtacttggggtgtgtgtgtgtgtgtgtgtgtgtgtgtgtgtgtgtgtgcataaatgtatgctctgtggctacatatacacacacgtatttccttgagataaacaagataaacactaggtgcttttgaatttttttcacttccctttatagttttgggaaaggagtgggatctttgatttcagggtgaaaacagagtacccctttaaacacacacacacacacgcacatacacacacacacacacacgcacacacacacacacacacagtgtgcaactagccccagttttgacagaataattcttggtcttccccaaagagacaatttgttgtacccatgactgttgcctgcaaaaataaaagggaaaaaaaaaaaaaaaaaaaaaaa

SEQ ID NO: 2800 - DNA, 2373 bp, Homo sapiens
aaaaactgatgaaggaaattgaagaagacacaaataaatggaaaggtatcctatgttcatggattggaaggattaatattattaaaatgttcatgctgcccaaagcactatatagattcagtgcattccctccaaaatttttaaatttaatgacatttttcacgaaagcagaaaaaataatttttaaatatacatatttcagaatacattgttcacaataaagatatatgattttttgtcagttaaaagttaatttttttaaaaagatacctatagcctcttattgaggtggaatctgttgctcttggagctacgtactgttgactttggttttctggaaacatcagtgctatttagaacattaggatatttttctttttgaatatcaacaaaaacataaataaaaatactagtaatgacatttacagtatgtttcacagattaatcacatctctgagtgggagtctttatctgttgtaggatctactcttgccattctattctgggttttggttgattagtctttcttgaacacttccagaaattggagatgtatgcctgccttaggtagcctagcttattttattaatgaacatatccatttaaaaatttcttcctggtaatgagtctaaacttgccttcctgtaatttgtatccactggtcctttttctttgttctccctcttgcatatgccagtacttcaatagctggtcccagctccattgacgccctctctcaggatcacacatcacaggtccttcagaatctcctaatggtctctctgatctccaggcaacacactactctaacctttctatgcttttctggcctgcagttcatttctgttcctgtgaagtcatagagcccgcaattcatgctgtcttgttcccctattaaaatatatttttgtaaatctctttaggattcgtgaagttttttggaaacctggctgtcatggatagtcctcaacagatctgtgagcgttatcctatctttgtggaaaaagtctttgaaatgatagaaagtcaggaccccactatgattggtgtagctgtagacacagttggaatcttgggatccaatgttgaaggaaaacaggttttacagaaaacaggttggtatgacttggccctgttcagggatatcttaatctttgacaggggttcaatatgtaagttcatttgctggtgggttaactacattgtagaaactattttatgggtggcagtcttgttaaccatgaccttgtactcatgtctgaaaatctaataattattacggaaaaccttttttttttttttttgacttttcactggtttaggttttcattggtttaggtttctaccaatcgatttcaaccaaacattgtttcctgtttcccctctatgatgtcttctttgactagatttcatggtacaaagaccacgggctagagtcagaaaggtctggattcatgtccttgggttttctattctttttttttttttttttttaagagattgagagtgtctctctgttacccaggctggccccgaactcccgggctcaagcaatcctcctgcctcatcctcttgattggctgggtctacaggtccacaccattgtatccagccctgactttgctttttgaacttcatttactcacttcacttttctaggcctcattttcttcatttataaaaatggcataacaactgcttctcagggttgttgtgaatatttatgaaattttgagaaaggaaaataaaagtttgttataagatttcatgttaagagatacttttggcatgttaagagatacaatggttcatgcctgtaatccagcactttgggaggctaaggtgggtgggttgcctgagctcaggagttcaagaccaggctgggcaacatggcaaaatcctatctctactcaagaatacaaaaattaaccaggcatggtactgcacaactgtagtcccagctacttgagaagctgaggaaggagaatctcttgaacctggcaggtggaggttgcagtgagctgagatcatgccactacactccagcctgggtgacagagtgaaattctatctcaaaaaaaaaaaaaaaaaagaggccaggtatggtggctcatgcctgtaatcccagcattttgggaggccaaagcaggtggatcacttgaggtcaggagctcgagaccagcctggccaacatggtgaaaccctgtctctactaaaagtacaaaaatcagccaagcgtggtggtgcatgcctgcagtcccagctactcgggaggctgaggcaggagaatggcatgaacacaggaggtaaaggttgcagtgagccgagatcacaccactgcactccagcctgggcgacagtgcgagactctgt

SEQ ID NO: 2801 - DNA, 2879 bp, Homo sapiens
tagtgcgtgtgctggggcgagcgggagcgggcgaggatgggcacaggatagaggcagagccacccacgccgccgcggccccacgctgggcgacagagcctccagttccccttcaatggtggcgggtcgccggagctctgatcgccgggaacccttgccgctgctgtcctgcgaccccaagcaggtatagacacgtgtggccgtttacgctgtaggatcctcattcccactggctttgaacattttggggacttacaatgccgccacccgcggacatcgtcaaggtggccatagaatggccgggcgcctaccccaaactcatggaaattgatcagaaaaaaccactgtctgcaataataaaggaagtctgtgatgggtggtctcttgccaaccatgaatattttgcactccagcatgccgatagttcaaacttctatatcacagaaaagaaccgcaatgagataaaaaatggcactatccttcgattaaccacatctccagtaagttgatcttagcttctgacttccagcaaactctttgctctgcgtttctgctatatgtgattgtgggatattaatttttgaggttgactttagtgcaaagcaaaaggcttccagaatgtcctgacatgcagattctggattagcaggaatgcccctccgtagatttcccactgcagaggaggaagaccttattccaggcgaagggcaagcttgtctaacctgcggcccaggatagctttgaattcacaaattcgtaaactttctcaaaacattatgagttgttctgtattttatttagttcatcagctatcgttagcgtattttatgtgtggcccaagacattcttcttcttcctgtggcccagggaagccaaaagattggacacttctgctttaagatttgagtttggaggtcatcttaacaacttccgtgttacagctgggatcactcacctgtaccaattggttttacccacctactcacacatccacctaatgccatctgagcaaattcagacaacaaacaaagcaaacaaaaccaaagtcagttactttcctttaaagtcggttactttcctttaaagtcagtgtggctgggcgcggtggctcatgcctgtaatcccagcactttgggaggccgaggcaggtggatcaggaggtcaggagatcaagaccatcttggctaacacagtgaaaccctgtctctactaaaaatacaaaaaattagccgggcgtggtggtggacgcctgtagtcccagctactcgggaggctaaggcaggagaatggcgtgaaacctaataggtggagcttgcagtgagcagaggtagtgccactgcactccagcctgggtgagagagtgagactccatctcaaaaaaaaaaaagaaaaaaaaagaaaaagtcagtgtgtgtgtgtgtgtgtgtgtctgtgtgtgtgtgtgtgtgtgagagagagagagagagtttaagtattttgtagctttaatgggttattatgacaattcataaaaataatttagaaatattgaccacttcactgatccattgacagctgattctacataagaactttagagtcttctgaattaaagctgctaaacaagacgctacagtatatttagactattgtagctgatgatgtctctcttcttggtctttcctacttgcttggagatactttaggtagtaacattagcatatttaactatattattttacagtgcatttcattgctttcctaaaaaattatctgccccaaatacaccaagtgttactattttcactctgcatatgtgatgaaaactgtgtctaactatcattttcagtttccactgaagccatgtggtagactaaaaataaatttaaaaattgggaaaagcatctggctaaaattaagctgtgggtactgtaactaccataaatccttattgttgaaaattacattagtgtggcttagaaactcctaaacattttgcccaataacatcctgaacctaaaaacagtgatgagctcaatggagtgagtcgctacagttggctgaactgtctttgatgcctgctttgctacttaatggagattataatctactcatttttcagtggctacatgatgagctgaggcgttttcgtctgactttgcattggtcttcttactcaagtcagcatgaatgaatgttaatttgacctttacaccattgttttatgtgttttttgtagtttctgattatcctgctaaaagtcatcatctgcttgctggacagaaaaagtagaccttgccttttatttcattttagagtctaaaagacagctttttaatcaaagccttctctaagccaaagaaggagttagtttcatttttttactgctgtggatttatgaacaaaaattccgcaatctaagtcactccttgagagaaggcttagatgttaggcagagtgaagtttttcagcatcccaaaagaaacttagcgtgacttgtcatcaggaagaatggaatttgtgttcttgagataatgatcctcacattcccagctcagtgaatggaaagatgtgaaagccagtgtaagaggcactattaaaagatgggagcagccgggtgcagtggctcacgcctgtaatcccagcactttgggaggccgaggcaggcggatcacgaggtcaggagatcaagaccatcctggctaacacggtgtaaaccccgtctctactaaaaatacaaaaaaaattagccaggcgtggtggcaggcgcctgtagtcccagctactcgggaggctgacgcaggagaatggcgtgaacccaggaggtggagcttacagtgagcagagatgacgccactgcactccagcctgggcaacagagtgagactatgtctctgtctc

SEQ ID NO: 2802 - DNA, 2552 bp, Homo sapiens
ttgttggcctactggtcgaaatgcacctcatgcactctaattagcacgtcaaattagtctctccgtttcagaggtgtagggcctttgtggagccttctcaataaaataatttgccactcttgaaggttagacattctcttctatcaatgtacacataaaggttttgttttgctttgcttgttgtgaattaaaatggggagaaaatgatgtgttagctattacccagtcatgtgtctttttagtcataggttagcttttcaagacacttcctgcatctctgacctgttgcacctctgttatcttggcacctctgttatcttagcagcaagcacctgcctcagctgacccttgagccataacccataagctcctgaaaagtacatcaagtctaaagtgaaccagctaactcattaagactggaatcatgagcaacaatggagcagacctaacctttggttacatctcctgttttgtagctatccttttgtttggctcaaattttgtgccacttaaaaaatttgatactggtgatggaatgtttctccagtgggttctttgtgctgccatatggttggttgccttggttgtcaatctgatattacattgtccaaagttttggccttttgcaatgcttgggggctgcatttgggcaacagggaacattgctgttgtcccaattatcaaaaccgttggtttaggccttggaatcttaatctggggatcatttaatgccttaactggctgggcaagctcaaggtttggctggtttggattggatgcagaagaagtatcaaatccgctgctaaattacattggagctgggctatcagtagtaagtgctttcatatttttgttcatcaaaagtgaaataccaaataacacgtgttccatggataccactccattaataacagagcatgtgatcaacacaacccaagacccctgttcctgggtggataaactttctacagtacaccaccgcatagtgggctgcagtcttgcagtgatatctggagtactctatggatctacatttgtgccaatcatctacatcaaggaccacagcaaaagaaatgatagtatatatgcaggggcaagccaatatgatttagactatgtgtttgcgcacttcagtggcatctttcttacaagtactgtctactttctggcctactgcatagccatgaaaaatagtcctaaactatatcctgaagcagtcctaccaggattcctgtcaggagtactttgggctatagctacctgctgttggttcatagcaaatcactctctgagtgctgtggtcagttttccaataatcactgctggtccaggatttatagctgcaatgtggggtatcttcatgtttaaggaaataaagggtctacaaaactacctattaatgatacttgcattttgcatcatcttgactggagccttatgcactgctttttctgaaatctaacaatgacaaaaccagcaggtggcagcagtagttaagagaacgcgtctatcggacagcggagagatcatgctgagaaaagagtgcattttcatatagcaaatggatctcagccactgttggagtgggtaaatgatttttttccccaaaaatgtgagaatgaaggaagattgagtttcattcaagtataaaaatgaaaatttcttctgatgaactgtttatgaaggtagtactttactgggtgactaaaatgtctacattattatagcattacatacgaggatgctctttttaccacagtatgtacctagtgttgcataatctagaacacagtatagagtccatatacaaagaagttacagcccatatttctcacctattaccccagtgaagtgaggcagaaataccttgggcgaggagggagagccttaccttctaatggaattagattccaaagatatttggatcctttgtttcataaagtaaatgcatagttggtaactaaatgttaaaaaggccattttattattgttagccaaaacttctgtttatttcaagttaatatcgcccaactctacatcatctacccattttagctcataatgcttttgattatcgccagataaagtccattctcagagaacaaaaatttttcatcattgagaaaatgtgcataacataatacatacatacacaagtatattcacgtacataaatacacacagatatgttgctaaagtgagattgtaggttatcagtaacaatttaaaggaaacaaccactcttttgaatgtacaatttttttttctgaaatacacttttctaaaaccctcttaactggaggtttcctgttttcttcttgttttaactggtggtttccagtaggcaaaataaaatgacaggcatgctagttttttttgttttttttttttaagaaaactgaaattaagccaggcagggtggcgcactactataatcccagctgctggggcggctgaagtaggagggtcacttagcccaagagtgcaaatctgccagcctaggcaacatagcaaggtcccatctctaaaaaagaaatttaatttaaatttgt

SEQ ID NO: 2803 - DNA, 5369 bp, Homo sapiens
ctctgtcgcccaggctggagtgcagtggggtgatctcggctcactgcaagctccacctcctgggttcacgccattctcctgcctcagccttccgagtagcttggactgcaggcacccaccaccacgcccagctaatttttttgtatttttttttagtggagacggggttttaccgtgttggccaggatggtcttgatctcctgacctcatgatccgcctgcctcggcctcacaagtgctgggattgcaggtatgagccaccacgcccggccaggcatttctttatagcaatgccaggatggtgtgccagactgtatcagagacaagtgatacaaagatgaccaagatacagtacttgcccaggaagaagaattcctgtggccacctctgtcttatatcaagagataagtgtgaaacagagtatccacaacagtgtttgggaagacagtgtgagtggctcccaactctaccaacaaaggcttcaaaggagtaatgacatttgaattgagtcttaaaggataaatgtattacttggcctgacaacacagaagaaaaggtcatttttgtcaaagaaatcaaccttgaaaaaatgccgcagttcatgacttgtaccagtgaaggtagcaaggtctgtgtgttggtgatgaatttgcaggggatcaggctgaagaaacaagacttgggagagaggatgtgagacctttttatgacatgcatagagttggcacctcagcctttgcatggtagggagctagctgaaggctacctccatgacagatgtacactttgaaaagacaggccgggtgcggtggctcacgtctgtaatcccagcattttgggaggctgaggtgggcaaatcacttgaggtcaggagttagagatcagcctggccggcacggtgaaacctggtctctactaaaaaaaatagaataattagccgggcgtggtggcgcacacctgtagtcccagctattcgggaggctgaggcagaggaattgcttgggcacgggaggcggaggttgcagtgagctgagatggcaccaccgcactccagcctgggcgacggatcaagactccatctcaaaataaaggaagatacagctaatctatatttctttcaccagagatcaccaccactaacaattcatactggtcgtttttccctgaatgttttacctatgtaggaaaattttacatcccaatttttaatttaacactatgaaaagcatttctttttataataaagacactctattagtatacttttgatggcttcaaaactacttttgtatagatgcaaaattaaaatatcaaattgtttcttttgtttgtttgtttttttgttttttttttgagacagagtctcactctgtcgcccaggctaaagcacagtggcatgatctcggctcactgcaagcttttcctcccgggttagagtgattctcatgccgcagcctcccgagaggctgggactgcaggtgtgcaccaccacccccggctaattttttgtatttttacaaaacacaaagagagacggggtttcgccatgttgggcaggctggtctcaggctcctgacctcaggtgatccgcctgcctcagcctcccaaagtgctgggattgcaggcgtgggccaccgtgccctgcctcaaattgtttctttaatggttgttcccaaattttcataaataactttttacgtaacatttttgggcataaagttgtctaaaattattttcataggctagataccttaagtacacttaatgatttaaatcatacttaacattaagactttaatgttgctatattgatatttagtaaaagtacaaaacttgtgctttagagtttagacatattcaggatataagatagttttgttggatttggcgaacacttgccctaggagaataaaaaatgatgaattagtccaaaatgttccagttttctaatttgtcagactcggtaaatggtatcatcaccaaccaagaaaaacagaagatacagggagagtagattttgcagaaaagataaggagttctgtttgggacttgctgcctttgatatactgcactgggagaaaatccaagtcgaacagagtggacaagtgagaatgtgctgtggaatcaacaagaggggtggggagtctacctacctagatttgagagcagtttggcaaataattgttagtaaatgtcatagaaattcgtgggagagagaagttgataagaacagaggggtaaaggatgaaacagaggaaacactgccgcttctcagggttgggtacaagagaagccagggaaatagactaagaaagagtgatcagggaaaccgggagacagtgttgtcacggaagcctggagtgtgagattttccagaaaagaaggaatgaaagaatgaatggtctgtagatccattactcagcactatcagacacattgtccccttttgatatcccataatgaaatttatagataatataatctacttgtgcacaaaattttagaaattaatataatgccccaactataatataaagtgtattagtcagggttctctagagggacagaactaataggatatatatatataaaggggagtttataaagtattaacttacactattacaaggtcccacaataggctgtctgcaagcttgaggagcagagagccaggctgagtctcaacactgaagaacttggagtccgatgttcgagggcaggaaaaatccagcacaggagaaagacgcaggctgggaggctaggccagtctctcctttccatgttcctctgcctgctttatattcactggcagctgattggattgtgcccaccagattaagggtggatctgccttccccagcccactgactcaagtattaatctcttttgacaacaccctcacagacacacccaggatcaatatttgtatccttcaatccaattaagctgacactcagaattaaccatcacataaaggaagaagtaaaaggaaagtatattttatataataagtatttaaatatgtaaacattgggacatgactaaaactgactgaacacattgaaggagtcacttggttggtctgatgtgcagaattaccatgcatgctacaaatggagaggggtctacatgagctgtattgcttgtggtgccgcagatgacttgaatttccagaatgaaaatccattcctcgctgccgaagaattaacaggatgctctccaatgaatccctccatcctcctgccttcagccgttccaactcagaagcctccgtagacagcgcctccatggaggatttctggcgggaaatagaaagtattaaagacagcagcatgggagggcaagaagagccaccgccagctgaggtcacacctgtggatgaaggagaacttgaagcagaatggctgcaagatgtgggtttatcaactctgatctcaggtgatgaagaggaagatggcaaagccttgctctccacattgactcgaacccaagcagctgccgtgcaaaagagataccatacctatacccaaaccatgaggaaaaaggataagcaatctatcagggatgtcagagacatttttggagtcagtgaatctcctcctcgtgatacctgtggcaaccacactaatcagctggatggcaccaaggaagaaagagagcttccaagagttatcaagacaagtggttccatgccagatgatgcttctctcaacagtactaccctgtctgacgcatcccaggataaagaagggagttttgcggttcccaggagtgactctgtggctatacttgagaccattccagttctaccagttcattccaatggatcaccggagcctggacagccagttcagaatgcgataagtgatgatgattttctggaaaagaacattccaccagaggctgaagagctgtcatttgaagtgtcttattcagaaatggttacggaggctctaaaaagaaataaacttaagaaatcagagattaagaaagaagactatgttttaactaaatttaatgttcagaaaaccagatttggcttaactgaagcaggagatctgtctgctgaagacatgaagaaaatccgccatctctctctgattgaattgactgccttttttgatgcctttggaattcaactgaaaaggaacaaaacagagaaagtaaaaggacgagacaatgggatttttggagttccacttacagtcctcctggacggtgaccgaaagaaagaccctggagtgaaagttcccctggtattacaaaaattttttgagaaagttgaggaatcaggtctggaatctgaaggaatttttcgactttcaggatgtactgctaaagtcaagcaataccgtgaagaacttgatgccaagtttaatgctgataaatttaaatgggacaaaatgtgccatagagaagctgcagtaatgttgaaagcgtttttcagagaactacccacctctctcttccctgtggaatatatacctgccttcatcagtctaatggaaagagggcctcacgtcaaagtacagtttcaagccttacacctcatggtcatggcgctgcctgatgccaacagagatgcagctcaggccctcatgacattcttcaataaagtgattgccaatgaatcaaaaaaccgaatgagtctgtggaacatttctacagtgatggcaccgaaccttttcttcagtagaagcaaacactctgattatgaagaattactgttagcaaacactgcggcccacatcatccgcctaatgcttaagtaccagaagattttgtggaaggttccgtctttcttaatcactcaagtaagaagaatgaatgaagccacgatgctattgaagaagcagctcccaagtgtcaggaagctgctcaggaggaagaccctcgagcgggagactgcaagccccaagacttcaaaggtactgcaaaaatcaccctcggcaagacgaatgtctgacgtgccggaaggagtcatacgggtccatgctccacttctctccaaggtgtccatggccattcaactcaacaatcaaaccaaagccaaagacatattggcaaaatttcaatatgaaaacagaatactgcactggcagcgagctgcactttccttcctaaatggaaaatgggttaaaaaagaaagagaagagtcgacagagaccaacaggagccccaaacatgtattcctcttcactattggcctggacatctccacataggcagtcatatagagacttgaaatatcattcaagggatttgggtatccagtagacttttagttacatatactacaaaactgactttgtactctcaagtagacctttcgtagaaagaaaatgtttctaataaaaatgtattagaact

SEQ ID NO: 2804 - DNA, 4695 bp, Homo sapiens
ggacccgggccggcccccaagatgccggcgatcgcggtattggcggcggccgccgcggcgtggtgcttcctccaagtcgagagccggcacctggacgcgctcgccggaggcgcgggccccaaccacggcaatttcctagacaatgaccagtggctgagcaccgtctcccagtacgaccgggacaagtactggaaccgctttcgagacgatgattatttcagaaactggaatcccaacaagccctttgaccaagccctggacccatccaaggacccctgcctgaaggtaaaatgcagccctcacaaagtgtgtgtgacccaggactaccagaccgccctgtgtgtcagccgcaagcacctgctccccaggcaaaagaaggggaacgtggcccagaaacactgggttggaccttcgaatttggtcaagtgcaagccctgtcccgtggcacagtcagccatggtctgcggctcagatggccactcctacacatccaagtgcaaattggagttccatgcttgttctactggcaaaagcctcgccaccctctgtgatgggccctgtccctgtctcccagagcctgagccaccaaagcacaaggcagaaaggagtgcctgcacagacaaggagttgcggaaccttgcctcccggctgaaggattggtttggagctctccacgaggatgcgaacagagtcatcaagcccaccagctccaacacagcccaaggcaggtttgacactagcatcctgcccatctgcaaggactccctgggctggatgttcaacaagttggacatgaactatgacctcctgcttgacccttcagagatcaatgccatctacctggataagtacgagccctgtatcaagcctcttttcaactcgtgtgactccttcaaggatggcaagctttctaacaatgagtggtgctactgcttccagaagcctggaggtctcccttgccagaatgaaatgaacagaattcagaagctgagtaaggggaaaagcctgttgggggccttcatacctcggtgtaatgaggagggctattacaaagccacacagtgccacggcagcacggggcagtgctggtgtgtggacaaatatgggaatgagttggctggctccaggaaacagggtgctgtgagctgtgaagaggagcaggaaacctcaggggattttggcagtggtgggtccgtggtcctgctggatgacctagaatatgaacgggagctgggaccaaaggacaaagaggggaagctgagggtgcacacccgagccgtgacagaggatgatgaggatgaggatgatgacaaagaggatgaggtcgggtacatatggtagtgcccacaagaaagaggacacaagttttgcacaaaattgcaagtcacttcctattcctgcatttgtatctaagactccaaggcaccaaggtctcttctccattgttgctctctatacccgacctaaggtttggaagacaactgcttgttcccagaggattctgattttgcatatgtttgtatgggagaaagggtgttgtgtttttttttttgttgttgtttattttttggatagggaagtcattggcttaattagagcctccttcctttctgtgagatttttccaacaagcatgtgatttacgtggaattctgacagtgcagggagcccccaccctcttaaatgtcaaagaccctttttgattacccacactggtggttattacagcatggttcccagccttacagtgtctaagtgcttctcttgtgtcctgtagatgttgtgaaaaagaaaaaaacaaaaaatacaccacactgtactttttccccctgcccccgctactgccggtgattattattaaaaattagtttttttcacatcattatatctggcttcctataaacaacagccttaattcagtcaagactccctttgggaattcattttattaaaaattggtgtctggatacttccctgtacatgcataaatatgcatgcatgtacaggaagactgtatgtgtgtgccttgcacacacacccatacctctcagaaaaagtgggtatattaaaaactcgaaaaacaatgataaatttctcagcttgtccagacctggaacaaaatttctggaataagaaatttgtattaaagtccttttttgcactaacagttggctcttgtagcctgcaggctgaggaagtctcttctctgtgcatcagcagagttactgaaagcctctgattgagaaaaaacctccgtctgcctaaatcacttttctcgcagaagccatgcgactcccacacgacacgggcagcttcacaagccatctctttcatttctgcttgaagcccccttggctgcagcaatcctgtctgccataggtttcttccttccttacctactcaagggctttttctaaggcatgcacacatatctcctgttctctgagagtaccatggtgttccttaaaagaagaaaatttctaattctgaactcaatgttttgcttttactccctttctactgacaaatcatgataagggcacaaaagctgtacagatttttttttttaaccactcaatcccaaatggaggcctacaaagaacatcgtaataacacatggaagcaaaccctgggtttttaagagcaaattctgtccccccctcactcccccaagtgacaagatactaatgaagaaagttcttcaccatagtgtttgttttaactaaactcattggagtctagttccaaatttggtagggtcatcatctctacattccttaggatttctctccctatcaagctggcccagatacaagtaccaaacagtagtctctgaagttcccccatttccttcagtaccagtctataagctactgtccgccactgattttcatctatcagggtgtcctaatcagaatcagccacccaagcaagcctctctggcccacatatctatctcttgccttcccccatgaacttcagcctgtccacacaaaagccacataaactcaagcaagaaatatgttcagccaaaacatgattatagtggcagctgaccaatcccccatcccaaattgaccatttagatgtaccaactcaccttaaattagcatgttccaatccagtcggcattgcctgaatacagtagcatcatacctatagttggtcttagataagaaatgaactacttgatatagcaaagtcctttggcttcgtaaataaccctgaggttttgtacttactttccccataggaagacagaccataggcaaactctgttttgggatctcaactccatcacctttgtttcaatattttttttctctcttgaacaaaactgagataatttagaaaacaggtgcttaattgcaataaaattactatgaagtatattaaaaatcacgacattgtaaaatctcactttagatcatcaaagaaaaccattgttactatctcctttgagcttaggaaaatgtacaagagaacaaattaaaattgaaaaattgatttcacttagaaaaacttctaggaacagggtgaaccactgattttaatttgcctaattatcttatgacaagtatcaaattaagatgacacttaaagatccttagcattaacttaatgatggagaagagtgctcaacagacagttcccagtaaggtaatgagatgccattttccgagacattctaagaagatattttgattcattaaaacattaaataaaaagccctcctcagattggaacccccaaatcgatggagtcacattaataatacttttcatgcctcactttgacatgacagcattcgatttttttaaagatctttaatactttccatgagtactaaagattgtaatgagttaccttatccttagaagtagaatgtttgctttcttcttcttggaaatagtcctccaaaaagtccacttgtaccagtgacaagaagtcacttgtatagtgaccaagtacacataaaataccgattataaaaatattgtaataaaccacttcctcatttgatactggtattaagctgaatcctcactaattcacttttgaaaagttcttaatgaacagttttattcttataccatgaacagctcttttaatacaatttccttggtatccaacttaaatcccagaattttgttccaccatggttagttatttgccatatgaatgtattcttgtttctaccaatattctaggcatgagaataccttaatactgagttggagattttgtatctgtttctcctcctttacgcccattttcctacccacagcagcaaatgacaacgtgtctgtccaggtctgtccccctgctcatcccaggatgccactcacatttttttcttctttgttacccttgacccacgctgtacaagtaacatccaagagcccattctacaagtgggtggttttggtctttttataactttttctcaaagtcactgatgtttgttcctgttaaatgtatagcattgtaatgagagcccatcaaatcctgagtgtcagtttgttgtccctattgtagatgaaatagtgatgtagcaaaaacctagtaaattctgaatgcttttccacgtagacttatctggaatgtgaacacaactctttggttaatagtaaatgcttaactgtagtcctgagtaggtgcatttctgtctgtctcaataaattttactttgtcg

SEQ ID NO: 2805 - DNA, 983 bp, Homo sapiens; identical to SEQ ID NO: 116

SEQ ID NO: 2806 - DNA, 3435 bp, Homo sapiens
tcaatgcactgttcaaggatgtttgagagattttctgtcttgcctgaatacaaaacactgtagggaacctcttgtgcttgactttgcacacacacgggatcttcagggtgggtacatttaaaactgacaagtattgccaaattgccccccaacgtagtttttacaccccacctactactctcagtgaaaaatcaggccctttttattttaagggctaaattgctaatccctgtgtgaaaatgggtgttaacaaaataaaaaataaggaaaatatgcaggcttacccaattttgttatctatacattttacagtctctaatacttagcatagctcctttgggtgtctgcccaccacccttctttctgaacgtggggttccctgggctttccttgtttgacttcagacctggatctaatagggatctggaggtagaatcaagacgaatgttccctttggccttaggtgagtcctttgcatctctgaggccctgttgatgacatccagttctctagacctctgcccaaaccagagcaatccctcctcaaatatgctaagcagaaatgcagacaatataagacacactatatttatattttaggagtttacattaccttcccttctgtttggaaaccaacatctctcaaaattaggtatagttaacacagaataccccaaaataccaccattcttcataattccatttccttatttctggattctttcaagggtaaaaaccttgtttcattcatctttggggcagcatttgcctagtatgtggtaggcgcccagtagattttggataaactgacctgattttctgttaatattccaactggattatttctttctcctcttacagaatgaagatattcaaatgttattttaaacataccctacagcagaaagttttcatcctgtttttaaccctatggctgctctctttgttaaagcttctaaatgtgagacgactctttccgcaaaaagacatttacttggttgagtactccctaagtacctcgccttttgtaagaaacagatacactcatgttaaggatgaagtcaggtatgaagttaactgttcgggtatctatgaacaggagcctttggaaattggaaagagtctggaaataagaagaagggacatcattgacttggaggatgatgatgttgtggcaatgaccagtgattgtgacatttatcagactctaagaggttatgctcaaaagcttgtctcaaaggaggagaaaagcttcccaatagcctattctttggttgtccacaaagatgcaattatggttgaaaggcttatccatgctatatacaaccagcacaatatttactgcatccattatgatcgtaaggcacctgataccttcaaagttgccatgaacaatttagctaagtgcttctccaatattttcattgcttccaaattagaggctgtggaatatgcccacatttccagactccaggctgatttaaattgcttgtcggaccttctgaagtcttcaatccagtggaaatatgttatcaacttgtgtgggcaagattttcccctgaagtcaaattttgaattggtgtcagagttgaaaaaactcaatggagcaaatatgttggagacggtgaaacccccaaacagtaaattggaaagattcacttaccatcatgaacttagacgggtgccttatgaatatgtgaagctaccaataaggacaaacatctccaaggaagcacccccccataacattcagatatttgttggcagtgcttattttgttttaagtcaagcatttgttaaatatattttcaacaactccatcgttcaagacttttttgcctggtctaaagacacatactctcctgatgagcacttttgggctaccttgattcgggttccaggaatacctggggagatttccagatcagcccaggatgtgtctgatctgcagagtaagactcgccttgtcaagtggaattactatgaaggctttttctatcccagttgtactggatctcaccttcgaagcgtgtgtatttatggagctgcagaattaaggtggcttatcaaagatggacattggtttgctaataaatttgattctaaggtggaccctatcttgattaaatgcttggcagaaaagcttgaagaacagcagagagactggatcactttgccctcagaaaagttatttatggatagaaatctcactaccacatcatgatagtaaaatcaggatggaaataagagggtgcctgataaatggagtcagtgtggaattgaataccatactatgcccaatactgtttaaactcagtcctcccatattttaaaaggtgtccaaaattccatacacaagggaaagtgatctagcctttgatgttattagcctgcagttggctaggtttttttaatatttgtttttgcttgtaatctcactgagccaaatcagagatcttaaacattcagtcagtcatcaaacattattgagcacctaactatatgacaggcacttttttagagactgcggcttatcctcatcatagcaacctcggtatctttaagttctccacataacagtcaggattctactgaagaagcttttgaagtttgtggtaatcgtctgatcatataaaccacccatttcagagtagtgtttaagtactgtgaccaacactccacttgtctcttaactcagctttcaagacattccttaaccatcagagcagaggaggaaagactcactacctcagaaaaatctcaaagaatagtccaatttcctgcttgccaaagcataatctgccttttggtgcattacttggtcaattcagggttgaggagactgttggggggcatttataatgtatgaaagttaaggaagggggtgaggatgtgggttgggacaggtagtacctaaagaggagcgaagggatttatacaacatttttatcatgttacaaaacagtatcatgaatggcctcctttttagttcaactgtttctttaaaatgcatttactgattaaaaataagaactgaccaatagctccaagtgtcacacaccagaacattaagcctaagtcctcaattcataagttatcattctagacaagtttctttacaatggaatactttctatggaatcattataattctgttgtgtggaactatcaagctaagagtcactaaactttcttgaaaaggttgtgtgaaatatgacagctttctaaattaatttgtatagtcatttaaaattttttcttctctggcaactgtccaactggaatccagatttaaggtgataaaagctctaagtttcttgcagtctttttctcagcttagttccagagagaaaaaagctaattttcctaaggacacagcaagaatattcattaaggatattttctaaaacccacacttgagaaaaccacccaatga

SEQ ID NO: 2807 - DNA, 4603 bp, Homo sapiens
ctggtggtccagtacctccaaagatatggaatacactcctgaaatatcctgaaaacttttttttttcagaatcctttaataagcagttatgtcaatctgaaagttgcttacttgtactttatattaatagctattcttgtttttcttatccaaagaaaaatcctctaatccccttttcacatgatagttgttaccatgtttaggcattagtcacatcaacccctctcctctcccaaacttctcttcttcaaatcaaactttattagtccctcctttataatgattccttgcctcgttttatccagatcaattttttttcactttgatgcccagagctgaagaaatggactactgtataaattattcattgccaagagaataattgcattttaaacccatattataacaaagaataatgattatattttgtgatttgtaacaaataccctttattttcccttaactattgaattaaatattttaattatttgtattctctttaactatcttggtatattaaagtattatcttttatatatttatcaatggtggacacttttataggtactctgtgtcatttttgatactgtaggtatcttatttcatttatctttattcttaatgtacgaattcataatatttgattcagaacaaatttatcactaattaacagagtgtcaattatgctaacatctcatttactgattttaatttaaaacagtttttgttaacatgcatgtttagggttggcttcttaataatttcttcttcctcttctctctctcctcttcttttggtcagtgttgtgcgggttaatacaacaaactgtaacaagtgtacctggtatggacttgttgtccgggacgtacattttcgcggtcctgctagcatgcgtggtgttccactctggcgcccaggagaaaaactacaccatccgagaagaaatgccagaaaacgtcctgataggcgacttgttgaaagaccttaacttgtcgctgattccaaacaagtccttgacaactgctatgcagttcaagctagtgtacaagaccggagatgtgccactgattcgaattgaagaggatactggtgagatcttcactactggcgctcgcattgatcgtgagaaattatgtgctggtatcccaagggatgagcattgcttttatgaagtggaggttgccattttgccggatgaaatatttagactggttaagatacgttttctgatagaagatataaatgataatgcaccattgttcccagcaacagttatcaacatatcaattccagagaactcggctataaactctaaatatactctcccagcggctgttgatcctgacgtaggaataaacggagttcaaaactacgaactaattaagagtcaaaacatttttggcctcgatgtcattgaaacaccagaaggagacaagatgccacaactgattgttcaaaaggagttagatagggaagagaaggatacctacgtgatgaaagtaaaggttgaagatggtggctttcctcaaagatccagtactgctattttgcaagtgagtgttactgatacaaatgacaaccacccagtctttaaggagacagagattgaagtcagtataccagaaaatgctcctgtaggcacttcagtgacacagctccatgccacagatgctgacataggtgaaaatgccaagatccacttctctttcagcaatctagtctccaacattgccaggagattatttcacctcaatgccaccactggacttatcacaatcaaagaaccactggatagggaagaaacaccaaaccacaagttactggttttggcaagtgatggtggattgatgccagcaagagcaatggtgctggtaaatgttacagatgtcaatgataatgtcccatccattgacataagatacatcgtcaatcctgtcaatgacacagttgttctttcagaaaatattccactcaacaccaaaattgctctcataactgtgacggataaggatgcggaccataatggcagggtgacatgcttcacagatcatgaaatccctttcagattaaggccagtattcagtaatcagttcctcctggagactgcagcatatcttgactatgagtccacaaaagaatatgccattaaattactggctgcagatgctggcaaacctcctttgaatcagtcagcaatgctcttcatcaaagtgaaagatgaaaatgacaatgctccagttttcacccagtctttcgtaactgtttctattcctgagaataactctcctggcatccagttgacgaaagtaagtgcaatggatgcagacagtgggcctaatgctaagatcaattacctgctaggccctgatgctccacctgaattcagcctggattgtcgtacaggcatgctgactgtagtgaagaaactagatagagaaaaagaggataaatatttattcacaattctggcaaaagataacggggtaccacccttaaccagcaatgtcacagtctttgtaagcattattgatcagaatgacaatagcccagttttcactcacaatgaatacaacttctatgtcccagaaaaccttccaaggcatggtacagtaggactaatcactgtaactgatcctgattatggagacaattctgcagttacgctctccattttagatgagaatgatgacttcaccattgattcacaaactggtgtcatccgaccaaatatttcatttgatagagaaaaacaagaatcttacactttctatgtaaaggctgaggatggtggtagagtatcacgttcttcaagtgccaaagtaaccataaatgtggttgatgtcaatgacaacaaaccagttttcattgtccctccttccaactgttcttatgaattggttctaccgtccactaatccaggcacagtggtctttcaggtaattgctgttgacaatgacactggcatgaatgcagaggttcgttacagcattgtaggaggaaacacaagagatctgtttgcaatcgaccaagaaacaggcaacataacattgatggagaaatgtgatgttacagaccttggtttacacagagtgttggtcaaagctaatgacttaggacagcctgattctctcttcagtgttgtaattgtcaatctgttcgtgaatgagtcggtgaccaatgctacactgattaatgaactggtgcgcaaaagcactgaagcaccagtgaccccaaatactgagatagctgatgtatcctcaccaactagtgactatgtcaagatcctggttgcagctgttgctggcaccataactgtcgttgtagttattttcatcactgctgtagtaagatgtcgccaggcaccacaccttaaggctgctcagaaaaacaagcagaattctgaatgggctaccccaaacccagaaaacaggcagatgataatgatgaagaaaaagaaaaagaagaagaagcattcccctaagaacttgctgcttaattttgtcactattgaagaaactaaggcagatgatgttgacagtgatggaaacagagtcacactagaccttcctattgatctagaagagcaaacaatgggaaagtacaattgggtaactacacctactactttcaagcccgacagccctgatttggcccgacactacaaatctgcctctccacagcctgccttccaaattcagcctgaaactcccctgaattcgaagcaccacatcatccaagaactgcctctcgataacacctttgtggcctgtgactctatctccaagtgttcctcaagcagttcagatccctacagcgtttctgactgtggctatccagtgacgaccttcgaggtacctgtgtccgtacacaccagaccggtaggtatccaagtttctaacacaactttctaactatttttttattattattttcagttgatgtagaactttacaaaatctattgacttcaaagagggatcaaaacaatcatattctacagatgtacccaatagatatatggattcaattaagtttggtagaagatgagaacaaaataactactgatttaggaaaattggatgcagaataataattatagtaggggcaattttgtctgtagatggcagtatgacaattcttgctagagaatatattgaaaaaaacttcaacacaaagggttgtagcactgtcctcagtaccattgtgtgcatgaggatcagaatagtctgggctagatacatcacattaaagcttttcagaatctgataaatagctctaaatactaatgatattgagaagcctagcttcacttgggaaaatctgtggctgttcacagaaattcagcaccaagttattccccccatactctaccaggccttcaggtcctcataaagaaaagtgtcgttttcagattaggaactcaaaattattttggtgcatcaaatctacagtcacacaatataacaagaatgggattagaaaaatgaaagcctactcattctcatctttaagccagagaatgaaatatatatgaggtctctggatagctatttaaatatttgcatatttatgcaaggtattttgagcccttcagaagacattct

SEQ ID NO: 2808 - DNA, 3375 bp, Homo sapiens
gccgctccgggtacctgagggacgcgcggccgcccgcggcaggcggtgcagcccccccccaccccttggagccaggcgccggggtctgaggatagcatttctcaagacctgacttatggagcacttgtaacctgagatatttcagttgaaggaagaaatagctcttctcctaagatggaatctgtggtttgggaatgtggttgatcaacttgatatgttggccaaatgtgccccatgtaataaaatgaaaagaagagacaagatgatgtcattttcccatattgtgaaaccaaaaacaaacgccttttgtgagaccaagctaacaaacctctgacggtgcgaagagtatttaactgtttgaagaatttaacagtaagatacagaagaagtaccttcgagctgagacctgcaggtgtataaatatctaaaatacatattgaataggcctgatcatctgaatctccttcagacccaggaaggatggctatgacttggattgtcttctctctttggcccttgactgtgttcatggggcatataggtgggcacagtttgttttcttgtgaacctattaccttgaggatgtgccaagatttgccttataatactaccttcatgcctaatcttctgaatcattatgaccaacagacagcagctttggcaatggagccattccaccctatggtgaatctggattgttctcgggatttccggccttttctttgtgcactctacgctcctatttgtatggaatatggacgtgtcacacttccctgtcgtaggctgtgtcagcgggcttacagtgagtgttcgaagctcatggagatgtttggtgttccttggcctgaagatatggaatgcagtaggttcccagattgtgatgagccatatcctcgacttgtggatctgaatttagctggagaaccaactgaaggagccccagtggcagtgcagagagactatggtttttggtgtccccgagagttaaaaattgatcctgatctgggttattcttttctgcatgtgcgtgattgttcacctccttgtccaaatatgtacttcagaagagaagaactgtcatttgctcgctatttcataggattgatttcaatcatttgcctctcggccacattgtttacttttttaacttttttgattgatgtcacaagattccgttatcctgaaaggcctattatattttatgcagtctgctacatgatggtatccttaattttcttcattggatttttgcttgaagatcgagtagcctgcaatgcatccatccctgcacaatataaggcttccacagtgacacaaggatctcataataaagcctgtaccatgctttttatgatactctatttttttactatggctggcagtgtatggtgggtaattcttaccatcacatggtttttagcagctgtgccaaagtggggtagtgaagctattgagaagaaagcattgctgtttcacgccagtgcatggggcatccccggaactctaaccatcatccttttagcgatgaataaaattgaaggtgacaatattagtggcgtgtgttttgttggcctctacgatgttgatgcattgagatattttgttcttgctcccctctgcctgtatgtggtagttggggtttctctcctcttagctggcattatatccctaaacagagttcgaattgagattccattagaaaaggagaaccaagataaattagtgaagtttatgatccggatcggtgttttcagcattctttatctcgtaccactcttggttgtaattggatgctacttttatgagcaagcttaccggggcatctgggaaacaacgtggatacaagaacgctgcagagaatatcacattccatgtccatatcaggttactcaaatgagtcgtccagacttgattctctttctgatgaaatacctgatggctctcatagttggcattccctctgtattttgggttggaagcaaaaagacatgctttgaatgggccagtttttttcatggtcgtaggaaaaaagagatagtgaatgagagccgacaggtactccaggaacctgattttgctcagtctctcctgagggatccaaatactcctatcataagaaagtcaaggggaacttccactcaaggaacatccacccatgcttcttcaactcagctggctatggtggatgatcaaagaagcaaagcaggaagcatccacagcaaagtgagcagctaccacggcagcctccacagatcacgtgatggcaggtacacgccctgcagttacagaggaatggaggagagactacctcatggcagcatgtcacgactaacagatcactccaggcatagtagttctcatcggctcaatgaacagtcacgacatagcagcatcagagatctcagtaataatcccatgactcatatcacacatggcaccagcatgaatcgggttattgaagaagatggaaccagtgcttaatttgtcttgtctaaggtggaaatcttgtgctgtttaaaaagcagattttattctttgccttttgcatgactgatagctgtactcacagttaacatgctttcagtcaagtacagattgtgtccactggaaaggtaaatgattgcttttttatattgcatcaaacttggaacatcaaggcatccaaaacactaagaattctatcatcacaaaaataattcgtctttctaggttatgaagagataattatttgtctggtaagcatttttataaacccactcattttatatttagaaaaatcctaaatgtgtggtgactgctttgtagtgaactttcatatactataaactagttgtgagataacattctggtagctcagttaataaaacaatttcagaattaaagaaattttctatgcaaggtttacttctcagatgaacagtaggactttgtagttttatttccactaagtgaaaaaagaactgtgtttttaaactgtaggagaatttaataaatcagcaagggtattttagctaatagaataaaagtgcaacagaagaatttgattagtctatgaaaggttctcttaaaattctatcgaaataatcttcatgcagagatattcagggtttggattagcagtggaataaagagatgggcattgtttcccctataattgtgctgtttttataacttttgtaaatattactttttctggctgtgtttttataacttatccatatgcatgatggaaaaattttaatttgtagccatcttttcccatgtaatagtattgattcatagagaacttaatgttcaaaatttgctttgtggaggcatgtaataagataaacatcatacattataaggtaaccacaattacaaaatggcaaaaca

SEQ ID NO: 2809 - DNA, 2154 bp, Homo sapiens
gccatggagctgctaaagctgaaccggagcgtgcagggaaccggacccgggccgggggcttccctgtgccgcccgggggcgcctctcctcaacagcagcagtgtgggcaacctcagctgcgagccccctcgcattcgcggagccgggacacgagaattggagctggccattagaatcactctttacgcagtgaccttcctgatgagcgttggaggaaatatgctcatcatcgtggtcctgggactgagccgccgcctgaggactgtcaccaatgccttcctcctctcactggcagtcagcgacctcctgctggctgtggcttgcatgcccttcaccctcctgcccaatctcatgggcacattcatctttggcaccgtcatctgcaaggcggtttcctacctcatgggggtgtctgtgagtgtgtccacgctaagcctcgtggccatcgcactggagcggtacagcgccatctgccgaccactgcaggcacgagtgtggcagacgcgctcccacgcggctcgcgtgattgtagccacgtggctgctgtccggactactcatggtgccctaccccgtgtacactgtcgtgcaaccagtggggcctcgtgtgctgcagtgcgtgcatcgctggcccagtgcgcgggtccgccagacctggtccgtactgctgcttctgctcttgttcttcatcccgggtgtggttatggccgtggcctacgggcttatctctcgcgagctctacttagggcttcgctttgacggcgacagtgacagcgacagccaaagcagggtccgaaaccaaggcgggctgccaggtggggctggaccacgtgagcaaaatctgggcgaggcggagctttggagggcgacggggcctgctggagtgggtgggactgaaatgaaggtgagggtgagaaggaagctggaaatggagttgagctgggagcggaggtcaggtggggactgggctggagactggggggactcgcctttttctctgaccgcccaccctttgtgctcaggggctgttcaccagaacgggcgttgccggcctgagactggcgcggttggcgaagacagcgatggctgctacgtgcaacttccacgttcccggcctgccctggagctgacggcgctgacggctcctgggccgggatccggctcccggcccacccaggccaagctgctggctaagaagcgcgtggtgcgaatgttgctggtgatcgttgtgcttttttttctgtgttggttgccagtttatagtgccaacacgtggcgcgcctttgatggcccgggtgcacaccgagcactctcgggtgctcctatctccttcattcacttgctgagctacgcctcggcctgtgtcaaccccctggtctactgcttcatgcaccgtcgctttcgccaggcctgcctggaaacttgcgctcgctgctgcccccggcctccacgagctcgccccagggctcttcccgatgaggaccctcccactccctccattgcttcgctgtccaggcttagctacaccaccatcagcacactgggccctggctgaggagtagaggggccgtgggggttgaggcagggcaaatgacatgcactgacccttccagacatagaaaacacaaaccacaactgacacaggaaaccaacacccaaagcatggactaaccccaacgcacaggaaaaggtagcttacctgacacaagaggaataagaatggagcagtacatgggaaaggaggcatgcctctgatatgggactgagcctggcccatagaaacatgacactgaccttggagagacacagcgtccctagcagtgaactatttctacacagtgggaactctgacaagggctgacctgcctctcacacacatagattaatggcactgattgttttagagactatggagcctggcacaggactgactctgggatgctcctagtttgacctcacagtgccccttcccaatcagcactgaaaataccatcaggcctaatctcatacctctgaccaacaggctgttctgcactgaaaaggttcttcatccctttccagttaaggaccgaggccctgccctctccttccttacccaaactgttcaagaaataataaattgtttggcttcctcctgaaaaaaaaaaaaaaaaaa

SEQ ID NO: 2810 - DNA, 1191 bp, Homo sapiens
gcggccgccggccccgggactgaccggcctcgccgcacctcccgcaccgactagcgctcccgggcgctcctgcgcccgactcgccctcgcccccactccccggcggggtggcggcggccgggcccccacggcggcggccggagcagcagcagcagcagcaggagcccgcctctatgatgaagttcaagcccaaccagacgcggacctacgaccgcgagggcttcaagaagcgggcggcgtgcctgtgcttccggagcgagcaggaggacgaggtgctgctggtgagtagcagccggtacccagaccagtggattgtcccaggaggaggaatggaacccgaggaggaacctggcggtgctgccgtgagggaagtttatgaggaggctggagtcaaaggaaaactaggcagacttctgggcatatttgagaaccaagaccgaaagcacagaacatatgtttatgttctaacagtcactgaaatattagaagattgggaagattctgttaatattggaaggaagagagagtggttcaaagtagaagatgctatcaaagttctccagtgtcataaacctgtacatgcagagtatctggaaaagctaaagctgggttgttccccagccaatggaaattctacagtcccttcccttccggataataatgccttgtttgtaaccgctgcacagacctctgggttgccatctagtgtaagatagagagaactgggtaggcctctcccaccatgtgcagtctcatggggagaggcttctttcgtttcctcgtcaaacatctgattgacgcttgcaaactgtctgaatttgccatgcaaggttttcaaacaatttgcatgtttttcagatgctttcaaatctttttttaaaaaaatagtgtaaaatattttaataagccaaagccatgtggaatttttgtttagatgccttaactgtgccacaccccacaaccccctatattattttggttgtctatttctcacagcatattttcagttttttgtccatttgacatcagtctgtggtttattttgtcatcagattacttgtgggtatacctaccccaaaattgttttctcattcacagcattagcatattcagcaaatccatctgtggtgggaattaaaaatattattggtattaaagaaatccattcaccccaaaaaaaaaaaaaaaaaa

SEQ ID NO: 2811 - DNA, 2000 bp, Homo sapiens
gcgcccagaacgccccggccatgggcatccgaggcatgctgcgagccgcagtgatcctgctgctcatcaggacctggctcgcggagggcaactaccccagtcccatcccgaaattccacttcgagttctcctctgctgtgcccgaagtcgtcctgaacctcttcaactgcaaaaattgtgcaaatgaagctgtggttcaaaagattttggacagggtgctgtcaagatacgatgtccgcctgagaccgaattttggaggtgcccctgtgcctgtgagaatatctatttatgtcacgagcattgaacagatctcagaaatgaatatggactacacgatcacgatgttttttcatcagacttggaaagattcacgcttagcatactatgagaccaccctgaacttgaccctggactatcggatgcatgagaagttgtgggtccctgactgctactttctgaacagcaaggatgctttcgtgcatgatgtgactgtggagaatcgcgtgtttcagcttcacccagatggaacggtgcggtacggcatccgactcaccactacagcagcttgttccctggatctgcataaattccctatggacaagcaggcctgcaacctggtggtagagagctatggttacacggttgaagacatcatattattctgggatgacaatgggaacgccatccacatgactgaggagctgcatatccctcagttcactttcctgggaaggacgattactagcaaggaggtgtatttctacacaggttcctacatacgcctgatactgaagttccaggttcagagggaagttaacagctaccttgtgcaagtctactggcctactgtcctcaccactattacctcttggatatcgttttggatgaactatgattcctctgcagccagggtgacaattggcttaacttcaatgctcatcctgaccaccatcgactcacatctgcgggataagctccccaacatttcctgtatcaaggccattgatatctatatcctcgtgtgcttgttctttgtgttcctgtccttgctggagtatgtctacatcaactatcttttctacagtcgaggacctcggcgccagcctaggcgacacaggagaccccgaagagtcattgcccgctaccgctaccagcaagtggtggtaggaaacgtgcaggatggcctgattaacgtggaagacggagtcagctctctccccatcaccccagcgcaggcccccctggcaagcccggaaagcctcggttctttgacgtccacctccgagcaggcccagctggccacctcggaaagcctcagcccactcacttctctctcaggccaggcccccctggccactggagaaagcctgagcgatctcccctccacctcagagcaggcccggcacagctatggtgttcgctttaatggtttccaggctgatgacagtattattcctaccgaaatccgcaaccgtgtcgaagcccatggccatggtgttacccatgaccatgaagattccaatgagagcttgagctcggatgagcgccatggccatggccccagtgggaagcccatgcttcaccatggcgagaagggtgtgcaagaagcaggctgggaccttgatgacaacaatgacaagagcgactgccttgccattaaggagcaattcaagtgtgatactaacagtacctggggccttaatgatgatgagctcatggcccatggccaagagaaggacagtagctcagagtctgaggatagttgccccccaagccctgggtgctccttcactgaagggttctccttcgatctctttaatcctgactacgtcccaaaggtcgacaagtggtcccggttcctcttccctctggcctttgggttgttcaacattgtttactgggtataccatatgtattagtcccccagtgctccagaacagcgggagcactgtgctgtgctcctttcagtttcttttgggtttgtttttccctctttcctt

SEQ ID NO: 2812 - DNA, 4723 bp, Homo sapiens
gcaggacaagctcagcctgcagctgccgtgggctttgtgtggactggacgcagagcttgggagacgggggagggctattactccaattcactgtcaatggaattacagctatagcggcagtgtatataggattgctttttctcgtcttcctgggttctgaagtaacggaagctaccttgtataaagacctcaacactgctgaccatgatcagcgcagcctggagcatcttcctcatcgggactaaaattgggctgttccttcaagtagcacctctatcagttatggctaaatcctgtccatctgtgtgtcgctgcgatgcgggtttcatttactgtaatgatcgctttctgacatccattccaacaggaataccagaggatgctacaactctctaccttcagaacaaccaaataaataatgctgggattccttcagatttgaaaaacttgctgaaagtagaaagaatatacctataccacaacagtttagatgaatttcctaccaacctcccaaagtatgtaaaagagttacatttgcaagaaaataacataaggactatcacttatgattcactttcaaaaattccctatctggaagaattacatttagatgacaactctgtctctgcagttagcatagaagagggagcattccgagacagcaactatctccgactgcttttcctgtcccgtaatcaccttagcacaattccctggggtttgcccaggactatagaagaactacgcttggatgataatcgcatatccactatttcatcaccatctcttcaaggtctcactagtctaaaacgcctggttctagatggaaacctgttgaacaatcatggtttaggtgacaaagttttcttcaacctagttaatttgacagagctgtccctggtgcggaattccctgactgctgcaccagtaaaccttccaggcacaaacctgaggaagctttatcttcaagataaccacatcaatcgggtgcccccaaatgctttttcttatctaaggcagctctatcgactggatatgtccaataataacctaagtaatttacctcagggtatctttgatgatttggacaatataacacaactgattcttcgcaacaatccctggtattgcgggtgcaagatgaaatgggtacgtgactggttacaatcactacctgtgaaggtcaacgtgcgtgggctcatgtgccaagccccagaaaaggttcgtgggatggctattaaggatctcaatgcagaactgtttgattgtaaggacagtgggattgtaagcaccattcagataaccactgcaatacccaacacagtgtatcctgcccaaggacagtggccagctccagtgaccaaacagccagatattaagaaccccaagctcactaaggatcaccaaaccacagggagtccctcaagaaaaacaattacaattactgtgaagtctgtcacttctgataccattcatatctcttggaaacttgctctacctatgactgctttgagactcagctggcttaaactgggccatagcccggcatttggatctataacagaaacaattgtaacaggggaacgcagtgagtacttggtcacagccctggagcctgattcaccctataaagtatgcatggttcccatggaaaccagcaacctctacctatttgatgaaactcctgtttgtattgagactgaaactgcaccccttcgaatgtacaaccctacaaccaccctcaatcgagagcaagagaaagaaccttacaaaaaccccaatttacctttggctgccatcattggtggggctgtggccctggttaccattgcccttcttgctttagtgtgttggtatgttcataggaatggatcgctcttctcaaggaactgtgcatatagcaaagggaggagaagaaaggatgactatgcagaagctggcactaagaaggacaactctatcctggaaatcagggaaacttcttttcagatgttaccaataagcaatgaacccatctcgaaggaggagtttgtaatacacaccatatttcctcctaatggaatgaatctgtacaaaaacaatcacagtgaaagcagtagtaaccgaagctacagagacagtggtattccagactcagatcactcacactcatgatgctgaaggactcacagcagacttgtgttttgggttttttaaacctaagggaggtgatggtaggaaccctgttctactgcaaaacactggaaaaagagactgaaaaaaagcaatgtactgtacatttgccatataatttatatttaagaactttttattaaaagtttcaaatttcaggttactgctgcgattgatgtagtggagatgcctgaacacaattctatattttagtattttttagtaatttgtactgtattttccttgcaaatattggagttataaaccatttactttgtgttctactgagtaagatgacttgttgactgtgaaagtgaattttcttgctgtgtcgaacaatcaggactgcattcatatgagatccttgtagtataagcacaggccatttttcactttggtattaataaaatgtaaaaaaaaaaaactggctgaatggctgaatgagataaaatttaattttaaaaaatggttatgaaataatgttccaattattaaatttgtattatcccagtggtattcaataaatcaaaatgtgtgaagtaatgggcaatatcaaacttcctgcatatctccatttttgctctaggcaaattaattatccttaaaaaagttaagcatatcttctgaactgaatacatcagctggcataaaaggagcatgaagtctgttaaagccattgtcagcaaagctttgaaaataaaggacttcacaaaaacggtaatgtaaatgtgcttccaagttggggggaaaatgtgtacttaggaaaacatggaaacttagacttgtatagtgtaatgaacacaaataccaaaactgcattttggttttgcctataccatcctgatttttgaaaagtgaattataaacacaaaattgttagtgtttatgatgtttttatcataaaggatgtcagagaaactttatgcatattaaaaatgtaatgtaattataagcgattcccctcaacaatccagagaaagtagttctttaaataagagataatttaaagaaaaataaatactagacatcaaatttagatctggtttatgtcaaaggttttaacactgtacataaatgttcaatttacttttacaaagatcaagaatactgcccattactgtcacaattttccagatattatataatgaactcgtaatgtaacatttccttctagcttcctactgaattgtgagctgttacttgttgaaaaaccatatcacttttctgttgccatgattttttttttttcaacaaaaaaccaaagtgcattgtacgccctttggccagtcttgtatgtgccttgatccaacgctacatgtattcagcttttaaaactccacaaatttttcatactccttaaatatgaaaaattatggtcttattgctgaataaaacttttaaaaagtacagaataattgtgcttgctttttcaggattgtgttactatcactaagtagcaaattgcccagcacattagtcctaaacgtcccatgtatttttctaggcataaaaataaaagttggctaaaaattttaaaaaatcaacatcttgaggttgtgtatcattttacttcaaagagttcagtgtttcatgtataaatgtatttcctcttacttatacactgtatagatggaaaatttaagaaatggtttcaaagcctttctctcttaggcgcactgctgccactgtcctgatactttttaaggtggtctttgaaaaactgtttttttaaaatagccttttagtagagtgagttggcatttgtgatactgtgaaatacacactttctctttgtccctgtttctggcatacaactcctaaaatccttgcaatcttcaaagtgatatattttcatatgctaatgagttcactgatagctggcaggccctaggtagcttcaagataaagtctgatcattgaaaagaccaagacatgattatagggttgggacttacaaccccaaaccctaacctccagagagggcgaagtggatgaagattaagttgatcaccagtgaccagtggtttaatcaagcatgcctatgtaatcaagcctccataaaaaaacaaaaggtcaagatttggagagcttccagattgctgaacatgtggtggttcctgcaggatggcatgcctggagagggcatggaagctctgtgcccacctagacctcaccttatgtttcctgccatctggatcctttgtaacatcctttataatacgtcagtaaatctgtttccttgcattttgtgagctgttgtagcaaattaatagaacacaaaaaggggatcctgggaaaccaaacttgaagctgactagtcttgcaactggtgtctgaagaggaggcagttttgtgggaataagccctcaacctgtgggatatgacacaatttccaggtagacagtgtcgggattaaactgaattggaggacacccagctggtatctgctgaagaactgattgcttgcgtggtgtatggggcaaaacttgttaagacaagtcttctatgttgattattgttgaatgagagaattaaacacacatacacactt

SEQ ID NO: 2813 - DNA, 3846 bp, Homo sapiens
cacataaatgcatttcttaaagtatttaaaaacaacacacaaaaaataagcacattctaaatctaatagaactaaaaattatgaaaagtgtttaatacatagtctttaaaatagtaatcttcttttaaatatatctttttttattggttagcttttctataggagaaaaccaaaaggactaagtggtgccttgcaggaagtaggaatagaattctcaggacgagaacattctggttagtatacattaaaaattatgtaagccatttgacttttaaaaaatacttcatatgaatttcattttttggtaatgtcattagtaagggatatcttcagcctaaaaaaaaaaaactcctaatctaaacaattcacattgtttctaagactttcaaattaccactttcataaactattgtaagataaactgccatctagtggctttctagttgctaagaagaatgaaaagaatgagccaaatcaaatggagattaaacaagtgctcaaataatagaatggactagtgaaaaaactgaacaagactattagattattcacaaatcctggttcctgcagaacgctggccacattttggggaactgtctaatacattttcatatcctcctctataaatgtggacgagcttgtctttcactggtaatgctgccatagccttccacttccaagaccagtttatcatgattaaaattagtagatggtcataaaactaaaactgtgttccaatttctacacaagtggtgtttttctttttaagttatttctttagcactaaggaaatagtactagtaccactaaattcagtgtttgatatctgtatcctcagggttggacgattctcggaatactgcccttcttgcttggaaaatgatcagagatggttgtgtaatgaaaattacaaggtcgttgaacaaggttagtagtgtcttgcctttttattctgtcatctcaaacttcataaacagtcatacgttctttgaaacgtagatttaatgtgtgcagtcatttataaatcaatgacatttctcttttttgtcataaaactgtatactgaagaaattaacgaatgcacagtttctaaagctgttgcatttgtctgtggaatcataggttcccactaagaagaatttcagcattctggccagaaatttgaatacaattcaagttgaagaaatgtctgcctgtaacattagcatccagggtcccagcatatataataaggagcctaaaaatataataaatcctcatgaaaaagttcaaatgaagtcaatttgtgcaaattctcctataaaggcacaacaggatcaattacaagtaaaaaacaatataaaagcaagtcttcacaatgtcaaaagttccttacctctttttaatactaagtcctctacttctgtggggcagttgcagtctcctaccttgaattcacctatctgtatgcaaaagcaaggaaaaaatgaacatcttgcatttaataccaaatctaaggcttcaacagttggttcagaattggtacttgtttctaccaccgttccaactgttcatcatgtttctgatttggaaatgagctctactctggactgtttacctgtgttggctgattgggaggatgtggttttactgccagcatctcagcctgaggaaaacgtagactgtacagttcccattagtgactcagacttagagatttcatttaattctggagaaagattaatggttttgaaagaattggaaatgtcaagtcatgaaaactttggagacatagaggaaactcctcaaaaatctgagacttctaagtctattgtgtacaagagtcctcacactactatttataatgtaaaagaagccaaagatccaggttcagatatttctgcctttaagttacctgaacacaaatcaagtaccttcaacagagttaatgccaatatgtctcatcctttagttttggggaaacatcctcttctttcaggtggtaccaaaaggaatccatgcagtccccaagctttcccaccagcaaaaaaacaacccttcactattcatgaagaaaagcctacatcatctgattgctccccagtaagaagttcttcctggaggcgtctcccatctatattaacttctacagttaacctacaagagccatggaagagtgggaaaatgacacctccattatgcaagtgtggtcggagatctaagagacttgttgtttctaataatggaccgaaccatggaaaagtcttctattgttgccctatcgggaaataccaagaaaacagaaaatgttgtggttatttcaaatgggaacaaacacttcaaaaggaaagagccaacagcatggttccatctcattccacagggggactcacttttagttctccagaaacaagccatatttgtgacagaaatttaagtatttccaccaaaaattctttgagactcaggccttcaatgaggaattgataacctttcatgtatgaatcctaattgttccttgaatttccaaacatgagtattctgataacatcttacactattttatttttattttatatattaatgtttactgcatttaccatactttcttcaggaaccacaagtgtaatcttttgtaaacagtatttattagattacatataataagcaacaatagtatatgatccttcttttatagttagaccttgaaacaagtctaaactatttttaaattatttgcaaaaaatgtgactaataaaaatccctagtctattttcaggtagattcttgtactttgagattatcataatcttctaactgatattttatatttttctaaaaacttttataagttctttagttttatttcaggcttgaacattggttctgatttgtatatcaacatatcagaagaattagtcaactaaagtttgaaaacctatgtagcagagatctggttcagaaactgcttctatactatacatttaaaaattaatcagcaattgatggtattatttttatattaagaaatgataggaacattgacactaatgtggaggaatttgccaaatattttatttcaaaatttagcctctgatatcataaccacaagatattttaaatcaacagtttctaagcatactaccacagtttttatgacctctccatcatcttgtggtttctagagattgacagatactatgtttgttttatagatatggtaattaatgaaacaactttaaattgtcttccattctttcttcctcagttcatttctttttgtcttcccactgatagtctttggcagctcttgaataaattctacctgttggcatcaaggggaagaaaattagcctggaaatttttatctttacataaagccaattatatagcagtttgattatgaattctaggtggaagaattagaatagtctttggaatgggttttgggtaacagccaaaatagggaaaagggtattgttaggaaagttgtcttgatattaagtatttactgtgagtccagtaagccaaaggaccaaacaaaataggttcagggtttcattttaatctcaaagattctgattcttacccatatgtcatcagttcagtttgggacatgtggtgcagcatgtgtgaagaaaatattcattaaaatgtaaaaataaacacttgaaattgtccacaacactgagcaaatattcgttataattaggatgcctacctttctgggatatttgtaaggtgctgtagtttttttaacatgctcctgaatctcctttattagttgttcttgatcatgtgacttgtaatcaggatttagaacgacaaaagcctttactacctaaaataaatatttgaaacaccagg

SEQ ID NO: 2814 - DNA, 5333 bp, Homo sapiens
aaggtggtggacatcccctgtcaggccaaaggtgtgccgccgccctccatcacctggtacaaggacgcagccgtggtggaggtggagaagttgacccgcttccggcagcgcaacgacgggggcctgcagatcagcggcctggtgcccgatgataccggcatgttccagtgcttcgcccgcaatgcagccggcgaggtgcaaacttccacctacctggctgtcaccagcatcgcccctaacatcaccagaggccccctggacagcacggtgatcgatggcatgtcagtggtgctagcatgtgagacctcgggggcgccccgaccagctatcacttggcagaaaggggagcgcatcttggccagtggctctgtgcagctgcctcgcttcacacccctggagtcgggcagcctcctcatcagccccacacacatctccgatgcggggacctacacctgcctggccaccaactctcggggggtcgatgaggcctcagcagacctagtcgtttgggctcggacccgcatcaccaagcccccccaggatcagagtgtcatcaagggcacccaggcctccatggtgtgcggagtgacccacgacccccgagtaaccatcaggtacatctgggagaaggacggggccaccctgggcacggagagccatcctcgtatccgcctggacagaaacggctccctgcacatctcacagacgtggtcgggagacatcggcacgtacacctgccgggtgatctcagcaggaggcaacgactctcgcagtgcccacctgcgagtcaggcaactgccccacgcgcccgagcacccagtggccactctcagcaccgtggaaaggcgagccatcaacctgacgtggaccaagccctttgatggcaacagccccctgatccgctacattctggagatgtcggagaacaatgccccctggactgtactcctggccagtgtggaccccaaagctacctcagtgacagtcaagggcctggttcctgcacgctcctaccagttccgtctttgtgccgtcaacgacgtggggaaaggacagttcagcaaagacaccgagagggtctccctccccgaggagccccccacggcccctccacagaacgtcatcgccagcggtcgaaccaaccagtccatcatgatccagtggcagccgcctcctgagagccaccagaatggaattctcaagggttacatcatcaggtactgcctggccgggctgcccgtggggtaccagtttaagaacatcacggatgctgatgtgaacaacctgctgctggaggatctcatcatttggaccaactacgagatcgaggtggctgcttacaacagcgctgggctgggggtctacagcagtaaagtcaccgagtggacgctgcagggagttcccacagtccctccgggcaatgtgcacgcggaagccaccaattccacgaccatccgcttcacctggaacgcccccagcccccagttcatcaacggcatcaaccagggctacaagctgatcgcctgggagccggaacaggaagaggaggttaccatggtgaccgcccggcctaactttcaagacagcatccacgtgggcttcgtgtctggcctgaagaagttcaccgagtacttcacctcagtgctgtgtttcaccacccccggggacgggccacgcagcaccccgcagctggtgcgcacccatgaggatgtgcctgggcccgtgggacacctgagcttcagtgagatcctggacacatcgctgaaggtcagctggcaagagccgggagagaaaaatggcatcctcacagggtaccggatctcctgggaggagtacaatcgaaccaacacccgtgtgacccactacctgcccaacgtgaccctggagtaccgtgtcacgggcctcaccgcgctcaccacctacaccatcgaggtggccgccatgacctcaaagggccagggccaagtgtccgcctccaccatctcctctggggtgcccccagaactcccagggccccccaccaacctgggcatttccaacatcggcccccgctctgtgaccttgcagttcaggccaggctacgatgggaaaacctccatctcccgctggctggtggaagcccaggtaggcgtggttggggagggagaggagtggttgctgatccaccagctctccaatgagcccgatgcccgctccatggaggtgcccgacctcaaccccttcacctgctacagcttccgcatgcgccaggtgaacatcgtgggcaccagcccccccagtcagccttctagaaagatccagaccctgcaggcaccccctgacatggccccagccaatgtgtctctgcgcacagccagtgagaccagcctgtggctgcgctggatgcctctcccggagatggaatacaatgggaaccctgagtccgtgggctataagatcaagtacagccggtcagacgggcatggcaagacgctgagccacgtggtgcaggaccgtgtggagcgggactacaccatcgaggacctggaggagtggacagagtaccgcgtccaggtccaggccttcaacgccatcgggagcgggccctggagccagacggtggtgggcaggacccgggagtcagttccctcttccggccccaccaatgtgtctgcactggccaccacctccagcagcatgctggtgcgctggagcgaggtccccgaggctgatcgcaacgggctcgtgctgggctataaggtgatgtataaggagaaggactcggacacccagccccgattctggctggtggaaggcaactcgtctcgcagtgcccagctcaccggcttgggcaaatacgtgctctatgaagtccaggtgctggccttcacacgcatcggggacggcagccccagccaccctcccatcctggagcggacgctggatgatgtcccaggaccacccatgggcatcctgttcccagaggtgcggaccacgtctgtgcggctgatctggcagccccctgccgcccccaatggcatcattcttgcttaccagatcacacaccggctcaacaccaccacggccaacaccgccactgtggaggtgctggcacccagcgcccggcagtacacagccacgggcctcaagccagagtctgtctacctgttccgcatcacggcccagacccgcaagggctggggagaagctgccgaggccttggtggtgaccaccgagaagagagaccgtccgcagccccccagcaggccgatggtgcagcaggaggatgtgagagcacgcagcgtgctgctgtcctgggagccagggagcgacgggctctcccctgtgcgctactacaccatccagacccgcgagctgcccagcggcaggtgggcactgcactcggcctccgtgagccacaatgcctccagcttcattgtggacaggctgaagcccttcacgtcctacaagttccgagtgaaggcgaccaatgacattggcgacagcgagttcagcgaggagtcggagtcactgaccaccctgcaggctgcccccgatgaagcacccaccatcctctccgtgacgccccacaccaccacctccgtgctaatccgatggcagccgccagcagaggacaagatcaatggcatcctcctgggcttccggatccgataccgggagctgctctatgaaggactgaggggcttcacgcttcgaggcatcaacaacccaggggccacatgggctgagcttacctccatgtactccatgcggaacctgagccggcccagcctcacgcagtacgagctggacaacctgaacaagcacaggcggtacgagatacggatgagcgtgtacaacgctgtgggtgaggggccctccagccccccgcaggaggtctttgttggggaggcagtgcccacagcagcacctcgtaacgtggtcgtccacggcgccacggccacacagctggacgtgacttgggagccacctccgctggacagccagaatggagacatccaggggtacaagatttatttctgggaagcccagcgggggaacctcacagagcgagtgaagacgcttttcctggctgagaacagcgtgaagctcaagaacttgactggctacacggcctacatggtcagcgtggccgccttcaacgccgctggggatgggcctcggagcacccccacccaaggccagacccagcaagcagcccccagcgctcccagctcggtcaagttcagtgagctgaccacaacctcagtgaatgtgtcctgggaagccccgcagttccccaatggcatcctggagggctacaggctggtgtacgagccctgcagccccgtggatggagtcagcaagatcgtgaccgtggacgtgaaggggaacagccccctgtggctgaaggtgaaggacctggcggagggggtgacctacaggttccgcatcagagccaagaccttcacctacgggccggagatcgaagccaacgtcaccacgggccccggagaaggtgccccaggaccgcctggcgtgcccatcatcgtgcggtacagctctgccatcgccattcactggtccagcggagacccgggcaaagggcccatcacccgctacgtcatcgaggccagaccttcaggtgcgccccgccctgctgggctgagaccccacagctcattatctcccttcttcctgggtccctccacttggggcacttgcctctgtcctccgcctgagaaggcgcttgtgctactacaggtgaagtcacctggccctgttgaggagtgggaaactgggttggggggctcctagagctggactcctagctaagtaacccccaggaggcccccagagaacggctgttagtgctagctgaggaccagcttgggttgaggattgctcaggaagccggaagcctgagcacgtggctcacgtgggtcacacaccgaatcctccacacgaccccactgatgggtgccccataactaagaagaccctggctgcctctcgaagccctgtctctgccatcatggctgtctcagtggctgctataatcgtaccagcctttcctgtcaagcctgaaattgaatcacaagaacttccaaagccatcaggagatgagtgacagataagtcagtcggggggctgctccccactgctccggtttcacccatcctgacacccgcttgctgggctctgcttactctcaggagcttgcagccactgccagctccctgcgttgctaggtttccaagttaatcagaggtgccagagtcagcaagagcaggaggcctgttctctgtatcccatggatccgcggttaggtgattaaaattgagaaggaaaac

SEQ ID NO: 2815 - DNA, 2981 bp, Homo sapiens
ccccaaatctgcagatgtgaatcccaagtaccagtgtgatctggtgtctaaaaacgggaatgatgtatatcgctatcccagtccacttcatgctgtggctgtgcagagcccaatgtttctcctttgtctgacgggcaaccctctgagggaagaggacaggcttggaaaccatgccagtgacatttgcggtggatctgagctagatgccgtcaaaacagacagttccttaccgtccccaagcagtctgtggtctgcttcccatccttcatccagcaagaaaatggatggctacattctgagcctggtccagaaaaaaacacaccctgtaaggaccaacaaaccaagaaccagcgtgaacgctgaccccacgaaagggcttctgaggaacgggagcgtttgtgtcagagccccgggcggtgtctcacagggcaacagtgtgaaccttaagaattcgaaacaggcgtgtctgccctctggcgggataccttctctgaacaatgggacattctccccaccgaagcagtggtcgaaagaatcaaaggccgaacaagccgaaagcaagagggtgcccctgccagagggctgcccctcaggcgctgcctccgaccttcagagtaagcacctgccaaaaacggccaagccagcctcgcaagaacatgttcggtgttccgccattgggacaggggagtcccctaaggaaagcgctcagctctcaggggcctctccaaaagagagtcctagcagaggccctgccccgccgcaggagaacaaagttgtacagcccctgaaaaagatgtcacagaaaaacagcctgcagggcgtccccccggccactcctcccctgctgtctacagctttccccgtggaagagaggcctgccttggatttcaagagcgagggctcttcccaaagcctggaggaagcgcacctggtcaaggcccagtttatcccggggcagcagcccagtgtcaggctccaccggggccacaggaacatgggcgtcgtgaagaactccagcctgaagcaccgcggcccagccctccaggggctggagaacggcttgcccaccgtcagggagaaaacgcgggccgggagcaagaagtgtcgcttcccagatgacttggatacaaataagaaactcaagaaagcctcctccaaggggaggaagagtgggggcgggcccgaggctggtgttcccggcaggcccgcgggcgggggccacagggcggggagcagggcgcatggccacggacgggaggcggtggtggccaaacctaagcacaagcgaactgactaccggcggtggaagtcctcggccgagatttcctacgaagaggccctgaggagggcccggcgcggtcgccgggagaatgtggggctgtaccccgcgcctgtgcctctgccctacgccagcccctacgcctacgtggctagcgactccgagtactcggccgagtgcgagtccctgttccactccaccgtggtggacaccagtgaggacgagcagagcaattacaccaccaactgcttcggggacagcgagtcgagtgtgagcgagggcgagttcgtgggggagagcacaaccaccagcgactctgaagaaagcgggggcttaatttggtcccagtttgtccagactctgcccattcaaacggtaacggccccagaccttcacaaccaccccgcaaaaacctttgtcaaaattaaggcctcacataacctcaagaagaagatcctccgctttcggtctggctctttgaaactgatgacgacggtttgagtgacatcattggtgtagaaagtttgtgtgtttttttttcttctccctagttgccaaaattaaaaaggtggtgttttcatttttgtataatactttaatggaatgctttttaaaaaaatataaaaccaaggtaaattattgtttcatcttcacgtatggatgctagtgcctttaatggaaggtaaagaatgttttgctagttagaagtacatattgaggttttaatggtggtgatagtgagttttgtggcaccagctgttttttattttaaactttctgagcatccggcaaggtacaggttttgatgttcaagttttattgggataagatcttttgatcccaaggtcaggtggatggaatttttggatttatatttgttccttgagtcttcagggcagtgtctccatgagggttttcctgttgaggggcaccacatacaatagtgtgaagtaggtatgaggggcagtcattgtattctatagtttttttatgtagtctacatttctcagatgtatccccattcggttttattctcagaactgttactagactcatgacttggaggccaaaccttaaatccagagatagcagcctcgatagggaccttaaaaggattcacaaaaacttttgccacacttggtgcctaggccctgttcctaataaccccttctagggccgtttatccaacatttagatgccttcttttccctccctaatttgtagccagtccaacctttcattccttggaggatttagttttgggataaaattttggtccttgggcacagagacattcactattaatgaagtaacccttgggcatgactccaatcccagaattgctcactgagcgctatgccaccgaagcgttgacctgaacatattagtgcaatccagtccagattggacctttgatcctatgtggaagggctgttttttaagaaaaaatttttggtaaacagtattgtgtaaaattgctttttgtataccaatatatgcatgttttgtgcatgagtagtacttgtgttgatactcctgttgatgttaaattactatataatataaacagtatgtgtttttatatatcattgtgtaaatttaatataacatatgcagtaataaaccatttgttttactgctgttaagtttgttatttgggtataaaaccagatgtttacacctgtaaaaaaaaaaaaaaaaa

SEQ ID NO: 2816 - DNA, 929 bp, Homo sapiens
gggcggcggcgcgcgggtgcgatcgcggagctgtgaggcgcaggcagggctctggggcacctagagaccggggccggagacgtggcagccgccctgcccgccagaaagtttcctagaagtttgctgggcgcgggcgcacgactgactggctggaccatgaacgtgttccgaatcctcggcgacctgagccacctcctggccatgatcttgctgctggggaagatctggaggtccaagtgctgcaagggcatctctgggaagagccagatcctgtttgctctcgtcttcaccaccaggtacctggacctgttcaccaacttcatctccatctacaacacagtaatgaaggtggtttttctcctctgtgcctatgttacagtgtacatgatatatgggaaattccgtaaaacttttgacagtgagaatgacacattccgcctggagtttcttctggtcccagtcattggcctttccttccttgaaaactacagtttcactctgctggagatcctctggactttctctatctatctggaatcagtggctatcctgccccagctcttcatgatcagcaagactggagaggctgagaccataactactcactacctgttctttctgggtctgtaccgggcactctacctggctaactggatcaggcggtaccagactgagaatttctatgaccaaattgcagtcgtgtctggagtagtacaaaccatcttctactgtgacttcttctacttgtatgtgaccaaaggtaggtcctgggatgacagcaatgctgacactggcctaaggagttactcatccatttaataagtattccagcagatacagatgtgaacagtcaagtctctgccatccacaatgcttgtgttctaatgcaagaagacaaatattttcaataaagaaacaaatgccataaa

SEQ ID NO: 2817 - DNA, 1705 bp, Homo sapiens; identical to SEQ ID NO: 2499

SEQ ID NO: 2818 - DNA, 1932 bp, Homo sapiens
aagcttggcacgaggccgccattgacacgcacagatagaacccaaagaaaggcaaagagtcctgcccggcaccggcgccgcgtgggccaaacctgcgcccgtggaggggcgcgcagagggcaccgggcgccgggagcaggcggcgcagcaccagcattgtgttagtgccgggaggccactgtgtcagcaagctgagagggaaactgaagcaagatgtcgggccggagtgggaagaagaaaatgtccaagctgtcccgttcagctagggcaggtgtcatctttccagtggggaggctgatgcgttatctgaagaaagggacgttcaagtaccggatcagcgtgggcgcccctgtctacatggcggcagtcattgagtacctggcagcggaaattctagaattggccggcaatgccgcgagggacaacaagaaggcccggatagccccgagacacatcttgctggcagttgccaatgacgaggagctcaaccagctgctaaaaggagtgaccatcgccagtggaggcgtcctgcccagaattcaccccgaactgctggccaaaaagcgagggaccaaaggcaagtcggaaacgatcctctccccacccccagagaaaagaggcaggaaggccacgtcaggcaagaagggggggaagaaatccaaggctgccaaaccacggacgtccaaaaagtccaaaccaaaggacagcgataaagaaggaacttcaaattccacctctgaagatgggccaggggatggattcaccattctgtcttctaagagccttgttctgggacagaagctgtccttaacccagagtgacatcagccatattggctccatgagagtggagggcattgtccacccaaccacagccgaaattgacctcaaagaagatataggtaaagccttggaaaaggctgggggaaaagagttcttggaaacggtaaaggagcttcgcaaatcccaaggccctttggaagtcgccgaagccgccgtcagccaatccagtggactcgcagccaaatttgtcatccactgtcacatccctcagtggggctccgacaaatgtgaagaacagcttgaagagaccatcaaaaactgcctgtcagcggcggaggacaagaagctaaagtccgtcgcgttcccgcctttccccagcggcagaaactgctttcccaaacagactgcggcccaggtgaccctcaaagccatctcagcccactttgatgactcgagcgcgtcctcgctgaagaacgtgtacttcctgctcttcgacagcgagagcatcggcatctacgtgcaggagatggccaagctcgacgccaagtagccgccgcactttccagcagggatcggaggacgacccgagtcccaagagtggggttttgctttttaaaaggagagaggaggggtgatggcaggggagtggagggtggccgggcaggtcctgccggcgcagggagccctctgcccttcacactctcctccaaaagagcctccatctgtaaggaagcaggtctccgcgaggggtttctttccatgtgttttcctcctgttgttaaaagaacttttttaaaaaaacagacctcgttttagatttatagcattgacttttacacacattcacacaagaaaaaaatcctttcaaaattcttaaatcttctgttcctcctttttccaagggaagagggcaaaaagtggcctgggctctgttggtgtgcgtgttccgtggcggagagaagaaaatgggaaagacatctcactggtgcttttctcttttgttttagtgccccccgcccccatccctataatatctgtaactactcctaaaaaggttttgattcaggcttttttttggtttcattttgtttttttaagaaaaagaaaatgaaaggaaaaaaaaaaaaaaaaaaaaaattcctgcggccgc

SEQ ID NO: 2819 - DNA, 3067 bp, Homo sapiens
cggatgcggggaggctgcgtgtgtgcgcagggagagaacgccggccaccttcccgcttccgagctgggtgcgcgccgagcacaggagattgcctgcgtttaggaggtggctgcgttgtgggaaaagctatcaaggaagaaattgccaaaccatgtctttttttctgtttcagagtagttcacaacagatctgagtgttttaattaagcatggaatacagaaaacaacaaaaaacttaagctttaatttcatctggaattccacagttttcttagctccctggacccggttgacctgttggtctcttcccgctggctgctctatcacgtggtgctctccgactactcaccccgagtgtaaagaaccttcggctcgcgtgcttctgagctgctgtggatggcctcggctctctggactgtccttccgagtaggatgtcactgagatccctcaaatggagcctcctgctgctgtcactcctgagtttctttgtgatgtggtacctcagccttccccactacaatgtgatagaacgcgtgaactggatgtacttctatgagtatgagccgatttacagacaagactttcacttcacacttcgagagcattcaaactgctctcatcaaaatccatttctggtcattctggtgacctcccacccttcagatgtgaaagccaggcaggccattagagttacttggggtgaaaaaaagtcttggtggggatatgaggttcttacatttttcttattaggccaagaggctgaaaaggaagacaaaatgttggcattgtccttagaggatgaacaccttctttatggtgacataatccgacaagattttttagacacatataataacctgaccttgaaaaccattatggcattcaggtgggtaactgagttttgccccaatgccaagtacgtaatgaagacagacactgatgttttcatcaatactggcaatttagtgaagtatcttttaaacctaaaccactcagagaagtttttcacaggttatcctctaattgataattattcctatagaggattttaccaaaaaacccatatttcttaccaggagtatcctttcaaggtgttccctccatactgcagtgggttgggttatataatgtccagagatttggtgccaaggatctatgaaatgatgggtcacgtaaaacccatcaagtttgaagatgtttatgtcgggatctgtttgaatttattaaaagtgaacattcatattccagaagacacaaatcttttctttctatatagaatccatttggatgtctgtcaactgagacgtgtgattgcagcccatggcttttcttccaaggagatcatcactttttggcaggtcatgctaaggaacaccacatgccattattaacttcacattctacaaaaagcctagaaggacaggatactttgtggaaagtgttaaataaagtaggtactgtggaaaattcatggggaggtcagtgtgctggcttacactgaactgaaactcatgaaaaacccagactggagactggagggttacacttgtgatttattagtcaggcccttcaaagatgatatgtggaggaattaaatataaaggaattggaggtttttgctaaagaaattaataggaccaaacaatttggacatgtcattctgtagactagaatttcttaaaagggtgttactgagttataagctcactaggctgtaaaaacaaaacaatgtagagttttatttattgaacaatgtagtcacttgaaggttttgtgtatatcttatgtggattaccaatttaaaaatatatgtagttctgtgtcaaaaaacttcttcactgaagttatactgaacaaaatattatttaaaattacttcaactttgtgtttttaaatgttttgacgatttcaatacaagataaaaaggatagtgaatcattctttacatgcaaacattttccagttacttaactgatcagtttattattgatacatcactccattaatgtaaagtcataggtcattattgcatatcagtaatctcttggactttgttaaatattttactgtggtaatatagagaagaattaaagcaagaaaatctgaagtattgtcttgtttttaaaaaatacagttcctagtgtttatagaagtcacttaatttgtctcatttttccacctggaaattaggaataatgtagaatgcaaggcagtaatttccttttggaaaggactctgaaggcagaaaagaagggagagaacctcatgggcagaatattataaaaagagtgtcatattccagcatttgaattggaaagagaagagtgaagatccaagttgcattattaatctgccctgtgttttttccttttaacaatcagtttgagctgctgctgttatgagtttctcatcaagatgaaagccctaatatgtaaagtcaaatccgatttaaattttgtgcttttatagaaagaaatttcttcatagacgtggtgatatatcatttcttggacctgctaatagtaggtcaaaggggagcactccttgccccctgttcctgggtttatgcagttttctttttagagtttatatagggcaagtggttctttttctctgaattacaggatggaaaaaggtcatatcctttgtcaggaaatataaacttgaaagtatgtagtcagctcttgtaatactcatatttatgattgtcctatatgaaaaacaacttcagttaaaactataatgtgtgattctgtataacaaggtgatgtctgtttcccagggctcagacctaatccagttataataaaatcaattaaatgaaatattctatagaatcgatctatgcccttgttaatctccatccatataggagtcacgttctttaagacagatggtggtagttatttttgtggcatggttagatttgactggttttgcagaagattacagttatgtactgcataatgacatatacaatagtggtcccataaaattataatggagcagaaaatctattgcctcatgatgttttagccgttttaatgtcatagcctagtgcattact

SEQ ID NO: 2820 - DNA, 2365 bp, Homo sapiens
ttggtaccgagctcggatccctagtaacggccgccagtgtgctggaaagagtgggcgggatagagagcgtgggcgggggggctagcctcgtgcgggctccttaagtagcggctgcgtggcttccctggcacgctagtcttacgacgtcacggtcaggtggtgcagagctggacggcaacgacgtcggacgcgccccttcttggaacaatgtcccaccacggaggagctcccaaggcctctacgtgggtcgttgctagtcggcgaagctcgacagtgtcccgagcgccagagaggaggccggcggaggagttgaatcgaacaggtcctgagggatatagtgtcggcagaggtggtcgctggagaggcacctctaggcccccggaggccgtggccgctggtcacgaggaactgccgctgtgttttgctttgaagagccactttgttggcgcggtaatcggtcgtggtgggtcaaaaataaagaatatacaaagtacaacaaacaccacaatccaaataatacaagaacaaccagaatcattagtcaaaatttttggcagcaaggcaatgcaaacgaaagcaaaagcagtgatagacaattttgttaaaaagctagaagaaaattacaattcagaatgcggaattgatactgcattccaaccttctgttggaaaagatggaagcacagataacaatgttgttgcaggagatcggccattgatagattgggatcaaattagagaggaaggtttgaaatggcaaaaaacaaagtgggcagatttaccaccaattaagaaaaacttttataaagagtccactgccacaagtgccatgtcaaaagtagaagcagatagttggaggaaagaaaattttaatataacgtgggatgacttgaaggatggggagaaacgacctatccccaatcctacctgcacatttgatgacgcctttcaatgttatcctgaggttatggaaaacattaaaaaggcaggttttcaaaagccaacacctattcagtcacaggcatggcccattgtgttgcaaggaatagatcttataggagtagcccagactggaacaggaaagacattgtgttatttaatgcctggatttattcatctggtccttcaacccagccttaaaggtcaaaggaatagacccggcatgttagttctaactcccactcgggaattagcacttcaagtagaaggagaatgttgcaaatattcatataaagggcttcggagtgtttgtgtatatggtggtggaaatagagatgaacaaatagaagagcttaaaaaaggtgtagatatcataattgcaactcccggaagattgaatgatctgcaaatgagtaacttcgtcaatctgaagaatataacctacttggttttagatgaagcagacaagatgttggacatgggatttgaaccccagataatgaagattttgttagatgtgcgcccagataggcagacagttatgaccagtgctacatggcctcattcagttcatcgcctcgcacaatcttatttgaaagaaccaatgattgtctatgttggtacattggatctagttgctgtaagttcagtgaagcaaaatataattgtaaccaccgaggaagagaaatggagtcacatgcaaacttttctacagagtatgtcatccacagacaaagtcattgtcttcgtttctcgaaaagctgttgcggatcacttatcaagtgacctaatacttggaaatatatcagtagagtctctgcatggagatagagaacagagagatcgggagaaagcattagagaactttaaaacaggcaaagtgagaatactaattgcaactgatctagcctctagaggacttgatgtccatgacgttacacatgtctataattttgactttccacggaatattgaagaatacgtacaccgaatagggcgcacgggaagagcagggaggactggtgtttccattacaactttgactagaaatgattggagggttgcctctgaattgattaatattctggaaagagcaaatcagagtattccagaggagcttgtatcaatggctgagaggtttgaggcacatcaacggaaaagggaaatggaaagaaaaatggaaagacctcaaggaaggcccaagaagtttcattaatgtcttctgtactagtggggtagagaattcaagattttttagaaatatagtaagacagaagtattggacatgttggcagtatgaagagaccggactgatttgactgattcttaaaataatagtgtttgaaaatatagaatccagtgttttatactttctttaataaaaatagaagtatttaaacttaaaaaaaaaaaaaaaaaaaaaaaaa

SEQ ID NO: 2821 - DNA, 720 bp, Homo sapiens
gcacgagggctgagaagctggaagatgacatcagacaagagagaaccgcctggaagaattatatccagatcgagagacagaagattctgaaagggttcaatgaaatgagagtcatcttggacaatgaggagcagagagagctgcaaaagctggaggaaggtgaggtgaatgtgctggataacctggcagcagctacagaccagctggtccagcagaggcaggatgccagcacgctcatctcagatctccagcggaggttgaggggatcgtcagtagagatgctgcaggatgtgattgacgtcatgaaaaggagtgaaagctggacattgaagaagccaaaatctgtttccaagaaactaaagagtgtattccgagtaccagatctgagtgggatgctgcaagttcttaaagagctgacagatgtccagtactactgggtggacgtgatgctgaatccaggcagtgccacttcgaatgttgctatttctgtggatcagagacaagtgaaaactgtacgcacctgcacatttaagaattcaaatccatgtgatttttctgcttttggtgtcttcggctgccaatatttctcttcggggaaatattactgggaagtagatgtgtctggaaagattgcctggatcctgggcgtacccagtaaaataagtagtctgaataaaaggaagagctctgggtttgcttttgaaaaaaaaaaaaaaaaaa

SEQ ID NO: 2822 - DNA, 779 bp, Homo sapiens; identical to SEQ ID NO: 1781

SEQ ID NO: 2823 - DNA, 1441 bp, Homo sapiens
ggtatggctactgggttataggattacagaatacatgtgaatataatgcttttgaggactcctcctcttctgatcccaaggttttgactctctttatggctgtgcctccctgtcgtattggggttttcctagactatgaggcaggcattgtctcatttttcaatgtcacaaaccacggagcactcatctacaagttctctggatgtcgcttttctcgacctgcttatccgtatttcaatccttggaactgcctagtccccatgactgtgtgcccaccgagctcctgagtgttctcattcctttacccacttctgcatagtagcccttgtgctgagactcagattctgcacctgagttcatctctactgagaccatctcttcctttctttccccttcttttacttagaatgtctttgtattcatttgctagggcttccatagcaaagcatcatagattgctgatttaaactgtaattgtattgccgtactgtgggctggaaatcccaaatctagattccagcagagttggttctttctgaggtctgcaaggaagggctctgttccatgcctctctccttggcttgtagaaggcatcttgtccctatgactcttcacattgtctttatgtacatctctgtgcccaagttttccctttttattaagacaccagtcatactggctcagggcccaccgctaatgccttaatgaaatcattttaacattatattctctacaaagaccttatttccaaataagataatatttggaggtattgggaataaaaactccaacatataaatttgaggaaggcacgatttcactcataacaatcttaccctttcttgcaagagatgcttgtacattattttcctaataccttggtttcactagtagtaaacattattattttttttatatttgcaaaggaaacatatctaatccttcctatagaaagaacagtattgctgtaattccttttcttttcttcctcatttcctctgccccttaaaagattgaagaaagagaaacttgtcaactcatatccacgttatctagcaaagtacataagaatctatcactaagtaatgtatccttcagaatgtgttggtttaccagtgacaccccatattcatcacaaaattaaagcaagaagtccatagtaatttatttgctaatagtggatttttaatgctcagagtttctgaggtcaaattttatcttttcacttacaagctctatgatcttaaataatttacttaatgtattttggtgtattttcctcaaattaatattggtgttcaagactatatctaattcctctgatcactttgagaaacaaacttttattaaatgtaaggcacttttctatgaattttaaatataaaaataaatattgttctgattattactgaaaaaaaaaaaaaaaaaaaaaaaaaaaaaa

SEQ ID NO: 2824 - DNA, 2358 bp, Homo sapiens; identical to SEQ ID NO: 1648

SEQ ID NO: 2825 - DNA, 1630 bp, Homo sapiens
aaaagcagaaagagattaccagccacagacgggtcatgagcgcggtattactgctggccctcctggggttcatcctcccactgccaggagtgcaggcgctgctctgccagtttgggacagttcagcatgtgtggaaggtgtccgacctgccccggcaatggacccctaagaacaccagctgcgacagcggcttggggtgccaggacacgttgatgctcattgagagcggaccccaagtgagcctggtgctctccaagggctgcacggaggccaaggaccaggagccccgcgtcactgagcaccggatgggccccggcctctccctgatctcctacaccttcgtgtgccgccaggaggacttctgcaacaacctcgttaactccctcccgctttgggccccacagcccccagcagacccaggatccttgaggtgcccagtctgcttgtctatggaaggctgtctggaggggacaacagaagagatctgccccaaggggaccacacactgttatgatggcctcctcaggctcaggggaggaggcatcttctccaatctgagagtccagggatgcatgccccagccaggttgcaacctgctcaatgggacacaggaaattgggcccgtgggtatgactgagaactgcaataggaaagattttctgacctgtcatcgggggaccaccattatgacacacggaaacttggctcaagaacccactgattggaccacatcgaataccgagatgtgcgaggtggggcaggtgtgtcaggagacgctgctgctcatagatgtaggactcacatcaaccctggtggggacaaaaggctgcagcactgttggggctcaaaattcccagaagaccaccatccactcagcccctcctggggtgcttgtggcctcctatacccacttctgctcctcggacctgtgcaatagtgccagcagcagcagcgttctgctgaactccctccctcctcaagctgcccctgtcccaggagaccggcagtgtcctacctgtgtgcagccccttggaacctgttcaagtggctccccccgaatgacctgccccaggggcgccactcattgttatgatgggtacattcatctctcaggaggtgggctgtccaccaaaatgagcattcagggctgcgtggcccaaccttccagcttcttgttgaaccacaccagacaaatcgggatcttctctgcgcgtgagaagcgtgatgtgcagcctcctgcctctcagcatgagggaggtggggctgagggcctggagtctctcacttggggggtggggctggcactggccccagcgctgtggtggggagtggtttgcccttcctgctaactctattacccccacgattcttcaccgctgctgaccacccacactcaacctccctctgacctcataacctaatggccttggacaccagattctttcccattctgtccatgaatcatcttccccacacacaatcattcatatctactcacctaacagcaacactggggagagcctggagcatccggacttgccctatgggagaggggacgctggaggartggctgcatgtatctgataatacagaccctgtcctttcaaaaaaaaaaaaaaaaaaaaaaaaa

SEQ ID NO: 2826 - DNA, 6888 bp, Homo sapiens
ccaggagctgccttggcagtcacgccccttccttccgaggagctttctggctgcctaaactggtagaccccctgaattactcctccatctccgctctctttcgcctcctcttctcttagttctctccgcctccccctcaactaccaccacctccagtcagtctcgcctccggctatccgctgctccaccctctggcccggtatcctgcctgtccgctgccaccaaggagagcccggacggagcagcgaggaggggagcagccgggagttggggcttcccccctgcccatccctggccgctggcccgggaccgaagccacttgagcgagcagagagtcgtcaccttgtcttctttgccttcagggagctgctaagaaggacaaataagatagcagagtgaaagagcttttgtctccttagaaggaaggctgagaaactaaaggccagcgcaggacatctcattgccattgtcagccaggaactcgcagcctcacagccctacttcttctctgacctctggggggtccttgcccttgctacaatctccaccatccactagattgtctcctgcccgacaccccttggtcccaaaccagggagaccattcagctcacctgcctaggccgcagcagcatttccttcctaatcaggctcaccagggggatcattaccgtctctcccaacctggcctgagtcagcagcagcagcaacagcagcagcagcaccatcatcaccatcaccaccaacaacagcagcagcagcagccacagcagcagccaggagaagcctattcagctatgcctcgggctcagccatcctctgcttcttatcagccagtgccagcagacccttttgccattgtttccagagcccagcagatggttgagatcctctcagacgagaaccggaacttgaggcaagagttggaaggatgctatgagaaggtggcaagactgcagaaggtggagacagaaatccagcgcgtctcggaggcatatgagaacctcgtgaagtcatcctccaaaagagaggccctagagaaagccatgagaaacaagctagagggcgagattcggaggatgcatgatttcaacagggatctgagagagcgtctagagactgccaacaagcagcttgcagagaaggaatatgaggggtcagaggacaccagaaaaaccatctcgcagctctttgcaaaaaataaagaaagccagcgtgagaaggagaagctggaagcggagctggccactgcccgttctaccaatgaggaccaaagacgacacatcgaaatccgagatcaggccctgagtaatgcccaggccaaggtggtaaagctggaagaagagctgaaaaagaagcaagtgtacgttgacaaggtggagaagatgcagcaggcccttgtacagctccaggcagcatgtgaaaaacgtgagcagctagagcaccgtctccggacacgactggagagggaactggaatccctgagaatccagcagcgtcagggcaactgtcagcccaccaacgtttcagaatacaatgctgccgcactgatggagctccttcgggagaaagaggagaggattctggctctggaagctgatatgacaaagtgggagcagaaatatttggaggagaatgtgatgagacattttgctctggatgctgctgcaactgtggctgctcagagggacacaacagtcatcagtcactctcctaacaccagctatgacacagctctagaagctcgcatccagaaagaggaggaagaaatcttgatggccaataagcgttgccttgacatggagggcaggattaagaccctccatgcccagattattgagaaggatgccatgatcaaagtactccagcagcgttcccggaaggagccgagcaagacagagcagctgtcgtgcatgcggccagcgaagtctctgatgtccatttccaatgctggatcaggcttgctctcccactcatccaccctgactggctcccccatcatggaagaaaagcgagacgacaagagctggaaggggagcctaggcattctcctgggtggagactaccgtgctgaatatgtcccttccacaccctcgcctgtgccaccctcgactcccctgctctcggctcactccaagacaggcagccgagactgcagtacccaaactgaacgtgggacggaatcgaacaaaactgcagctgttgctcccatctctgttcctgctccagttgctgctgccgccactgctgccgccatcactgccactgctgccaccatcaccaccaccatggtagctgctgctccagttgctgttgctgctgctgctgctccagctgctgctgctgccccgtctccagccactgccgctgctactgctgctgctgtttctccagctgctgctggtcagattccagctgctgcctctgttgcctcagctgctgccgttgctccttctgctgctgctgctgctgctgttcaggttgctccagctgctccggctccagttccagctccggctctggttccggttccagctccagcagcggctcaggcttctgctcctgctcagactcaggcaccaacttcagctccggctgtggctccaactccagctccaactccaactccagctgtggctcaggctgaggttcctgcaagtccagctaccggtcctggaccacatcgtttgtctataccaagtttgacctgcaatccagacaaaacagatgggcctgtgttccactccaatactctggaaagaaaaactcccattcagatcctgggacaagagcctgatgcagagatggtggaatatctcatctaaacggccaaatcaagagctgcagattatcagcaaaaatgcttttaatcattttcccccttttattggttcttgttttgagggtgaggacaagggttgtggggaggggatgttttttaacaggactttttattggaacaatgtactacttgagtaataccatgtgaacaccagtctattttggtatgcttagggagtacctctaaagacagattaatcagaatgtgctctaaagcttattgtttgaatttatacgaatactgggactgttaacaggtggctatacatcgacgttttcaatgtgcttaaatttgtttaaattttccatattctagatcattttttattgaagagcacagtatgtgtggaagacagtgtataacacgtagtttggaagtgggaagctagagagaattgagtgtgtgctgttttgtatagttactatcctgtgcagcagctggagaaagcactcacctcaggcttacaaaagggaatagtttcaggagctatgtaagctggaaaaaaggtagggagttttggggtgcagaagggtactggagctaattttttcttccagtttcccagctaccctgccccagggaattgtgtttgtcttcatttcagtggtgctttggaaatggattcttttggttccctcctggaggttcatacattcatatatatgctctggagtaatttatgcatttggataattaatatattgctttcagatgctgggagagtacattaactgagtgatgcgcaacttcctctctcttagggaattagaccatcagaggccttgatggagagttgcatggggtgctatatgcagacttccatggtttgtgtgtagccatgaacacagcttgcttgcatttagtaagaccaatcagcttagtgtttatttcttctacagcacagattcactggctgggtctccagtctcaaattgccaatcatttgcaaagtgaggaaggatctttgttgacaggttgaatgctttgaatttctggtgactactttgaaataacttgttttgtttgtcaaattctaagcatatgtcttaaaaggcatttttgactatcacctccaagggaatagcttgagaaacccaaagtactatgctgcagtcgggggagaggtggattgcagcagtatcctcaactacctcttctcactgtcagtgacaccatcttggaatacctttgggaagcagcaggaaatgtgcatgtgggtagagatcaaaggaggcaatggctccaagccttgccatagggctgcctccaaggacacagaaggatgccagttgccacaggtccctgccctgtgtcacctgtctgcccttcattaaggtgagaaatctgcagatagcatcattaagatcagttttaaggggtatagggagggtgagggaagtggggggtgttaggtaagggttgggggtagaggttttgggatgtcttagttagaaaccagattaatagaagagtaggcctgatatattacatcatgagccatagtggtgggaaagaactttagcaatatagccctacctcctcattttagtgatgaggaatctgagaactggagaggttcagtgactttttgaaagtcatacaacacagctaaccattatgccaatcaccatgcttattttgggaaactctttatcttttttaaattccattttatgaaaaggcatcttcatggtccagggaatatgtatcttgtaaaatgtacctggttggagtagcttgtccagtcttgacaaactactgaatttctgtcttgcctctccttcagtgccttttaaaaggttttcccttttctgatctgcatttcaacatagagtcacataaatgtccccctgagaaaccaatcccacttctttctaggagattgggtatcttagataatcttttggggttcctctgtgagtataggaatggtatccttcctaattatcttccaaaggaattattttgtgtgtgtgcctgtgtgtgtgtagagacataaaggagggtgatgtgattttcagctagtcctttcacattttcaataatgaggtaatcatgttacatacacattagtcctcagttataaagtgaatctcagatagaaattaaaagtgcagttgtgttaagactctttcatactaccctttagtcataaggagaaaaaaacactcaaatagtagaagcagcaagtagcaaacttcaggagagctactttctatccaaataatttaaaaaacacttttcacctactcctttcatggttataacacattggcagactttttgctggctctgggagccatgattttaatcacattctgcaaggtgacaaatgtcatacattccacattgtgtggtagccatctctttagactcatgtgttttggggaaaggaagaagttcttggctgagtactattttgaactttccagaaccctctcacaccagagacagttcttctctgttcagtttccaatccccgataatttgctaaaataacattgtacatccaagagagggaagaagagtatgtcagtatattatgcagaagatagatacagccttttcagaagatctccactagtttttgttccaaaaattcaagtttatgggagaaatctcaattagccaccttttcacagttgtgtggatataacatttgggggatctttctggactcctacctatctgtgcattttaccggcacctcaggaaaggagggtgaccaggttgtcttagcttgtactgcttggtgatctctgaggaccttctaattcagttgtaccccagtgttccatgtatagaaaaacttcattagaacaaactttacttgatatgaaactcctattaacagtctttttttgaaataaaaagtagcttgagctttcttttaaaatcatgtatcttgattgttgatttaatgaaggatttccttttaatgctgcttttgagcttcaaggtaataggacagcaggaacctaaaatatctgccatcatctgccataggaaagatacccagagacccatcatgttctctttttgttgttacactgttgggtgggtataacaattggaaaatgaacaaactgattgattgtgcaaactactttttatgacaagcctaaaccctcataatgcggcagcttaaagtgtatacatatgcactaactttgatcaattatattctcatatctgttagctacacagtctcctattatctcaattgcttatgtgcatatggaatatgttacttaaaacgtgtgcattcttactgaaaatgttttcaaaggaaggtatcagctgtgggctaattgccaccaatttcagcctgccacgattcttggaaatatgtcttccaagtgccatccatcatcagtaggacaagtgtcgggagtttgtttatttttttccagtagcaacgatgggttacatggagccatgaaacctccttctggcctcccttgtgattaatggcatgtgtttgtaaaatggatagctggggttggcagatggctagagaagaatcgcctttggtttaaaatgtatgtggtcccctaatgattgtgaccccattctgtaatcaactgagctagttccaataaagttaagcaggtttaaatccactttgtgcctatcttttcactgacaataaagttagctattttaaaatgcagtaccgtgtggaaaatgctttggtgtttacccgacagaggctttatttgtgctgtatcagtgattactttcaattcagtatgcagtgaaattgcctttcaagggcagcgtgcagcagaatttgcatttgcttgaagtatggaatgtgattatagattataaagtattaagacaacaccacaggccgcatgctctaatcggtctctttatatactcaggcagcatatattaaaagctttgcatctttttatcttctggtttctagggataaaatgatggccacccaaagcagagaatttatcctttggttagcattttggaaggccccttgatattccttttgtacccttgttctgatgccaattcatcagtttt

SEQ ID NO: 2827 - DNA, 1057 bp, Homo sapiens; identical to SEQ ID NO: 575

SEQ ID NO: 2828 - DNA, 647 bp, Homo sapiens
tgcacaccagctgtgtagatgtgggagaggggtttcttccagatgcagactctcagtaatatcccttgtttctgcctccatggctcactcctgccctccactgatctggccactctctcagctcatcccactgatgacaccacgacgctctctgagagaccatccccaagcacagacgtccagacagacccccagaccctcaagccatctggttttcatgaggatgaccccttcttctatgatgaacacaccctccggaaacgggggctgttggtcgcagctgtgctgttcatcacaggcatcatcatcctcaccagtggcaagtgcaggcagctgtcccggttatgccggaatcattgcaggtgagtccatcagaaacaggagctgacaacccgctgggcacccgaagaccaagccccctgccagctcaccgtgcccagcctcctgcatcccctcgaagagcctggccagagagggaagacacagatgatgaagctggagccagggctgccggtccgagtctcctacctcccccaaccctgcccgcccctgaaggctacctggcgccttgggggctgtccctcaagttatctcctctgttaagacaaaaagtaaagcactgtggtctttgcaaaaaaaaaaaaaaa

SEQ ID NO: 2829 - DNA, 3969 bp, Homo sapiens
ggcccagaaatagcagcggcgcgttcccctcggcgcagagcgacgggcagaggcgagagacgccgcggggccgggcggcggccccggaaggatgctgctgagccccggcactgcctggctgcgagcacatgatggcgatacgggagctcaaagtgtgccttctcggggacactggggttgggaaatcaagcatcgtgtgtcgatttgtccaggatcactttgaccacaacatcagccctactattggggcatcttttatgaccaaaactgtgccttgtggaaatgaacttcacaagttcctcatctgggacactgctggtcaggaacggtttcattcattggctcccatgtactatcgaggctcagctgcagctgttatcgtgtatgatattaccaagcaggattcattttataccttgaagaaatgggtcaaggagctgaaagaacatggtccagaaaacattgtaatggccatcgctggaaacaagtgcgacctctcagatattagggaggttcccctgaaggatgctaaggaatacgctgaatccataggtgccatcgtggttgagacaagtgcaaaaaatgctattaatatcgaagagctctttcaaggaatcagccgccagatcccacccttggacccccatgaaaatggaaacaatggaacaatcaaagttgagaagccaaccatgcaagccagccgccggtgctgttgacccaagggccgtggtccacggtacttgaagaagccagagcccacatcctgtgcactgctgaaggaccctacgctcggtggcctggcacctcactttgagaagagtgagcacactggctttgcatcctggaagacctgcagggggcggggcaggaaatgtacctgaaaaggattttagaaaaccctgggaaaacccaccacaccaccacaaaatggcctttagtgtatgaaatgcacatggaggggatgtagttgcatttttgctaaaaaaaaaaaaaaacctttaaaaattgttggatgtgtacaaaagtcttactgccttattatgtgtatgggattctaaagtggcattccacttggatttcctgtgctacctatcccaaattcccagtaactacttcagtgtcattgcctttgttacctaaccaaccttcactgaaaggcaaatttagttcaggaggttagtttttagctagctttggaagtaagcctttatttattactttttggaggaaatcagagaagtgtcaatggaccgtcactcagactgagacttgagttattacagaagccaggaaaagtgtattagaaactgttgtctacaccacttttaattggtgaacaatttttctaagttatggtcatatatacccaaacaaaccaaatcaaactaaattactgcatataattttgggattgggtggcctagtttgaaagagtgatttaagtaatcactatgtaagtggtgagagatgcaggacatacacattattcaagagaccacctgacatgcatctcctccgcaggaatacattcgtcctctcttagagaagtttaacgcacatagtattattttactaagagaatatctcttggtgtcatatctaggggaagagaattaactagaattaaatttaatgtttgaatctaaatcattgggcaaacttctaataataacaattaataataggttacaggaaagccagccagaggaagtgtcagcactttaaaattctagaccccaaaaaactacaaaatcagaaaaagtatttttatgtttctagcttgaggagaagggctttagggctaaccagaggtctgaccctagaatgccaaggaactgagaatgggctccgatgaaaaccttccttttcagattccctgtctgctcaattaaagatgtttgaatccaaaggaagtcaaggaagaaaaagcatggaaaggaagagaactgattcctactgaaaattcaaattctattaccattctaactttcataaaaagttgggatcaagaagcagctgatttcctgccagggcttatattagggggtgattcttaaaggacattaggattggtgctcagaaatggttaatcatgctgtgtgctagccagggccagctggtaccttctttgccatgagcattcaagggacagctaacctttattgacaatctatattgcaaaagtcaggaaagaggttgtgagctgattggattaaagacctggcacttcagtaactcagcacgcttccacttcactcaacttaagagagttcattgacagtgttaggatgtgaaggctgggaaacacttattttgcttcaagagttccacttggctctcccaaataggtacctcaaaaactgttagcaagcggcatttggatgtcttgacaggggctttgcagggatttttagggttttttccacattgtccacattaatggttggcatgattgtgcttgcaggccaagaaatgatcataccccttgccaaaggtaaaaaaaaaaaaaaaaaaatgagttgaaaattgaagtgacctctttccagctgacttgcaggcttattttgtaacctttcctcatccagttttccctgagaacctgggtttatctctagatagctgttcaggttttttagctgaggggtaagtatcctagctgagagttttgcatctttgggctgggtttgcagtggttgtgttttgcataaaatgtctagtctttgccacagatagtgagctacccactaatgagcccatggttttatttcagaagcacatgagggtgtgaaaccactctgttacctttctgtattgtcttagctattcaagccagtcagaggataatatatatattctcatcagcactcagagtagtcagtgaagagagtaggatcacacttggggcacaccaggattcacataaacattgtatcttctctgtggatgctcaggccttgtctacaatgaggctttacaaccttccttgtttggctcgggattacttcctggctgtctaataattgaaccataaccatgtaatattatgtaaaggcctggaaattactgttgctaaaaaaagtcatgtagtttcatgtagtgtagcatccttggcatcgttttccaaaatttgttccttctcccttttttttttctttcgtgtgtggcatgagtgtgtatctgtgtaaatatgattgtatatgtgttactccgatatgtaatccatttcactggctgagtttggcccctagccatgtgttaatataaagtagggcatgggcttcccaatggaaatctctgagaatgacagtggagttgtgcaagcattttacattgccacataattgacttgccattttatggttaaaaacgggcacattaggcagttgaatatgacgttaccttgcagactaaaaggttgaaggcccgaaactaacttttagctaacaataagggctgtgccccaatggaaactgagttcattttctgagaaaggtttggatgactgaaatatttcctctacagtcaaggactttggcatgcggtggctgaaactgagcttttttgtgtgggctccagttctcactgttctgcaatgctcatggcaagttgaatggtgagctagcttataaattaaagagctctgaactgtattcagaccgactgggtatctagcttactgttttaacatcattgttgaaaccagaccctgtagtccagtggtgctgccctgttgtgcaaactgctcctttttctcgtgtttttgtaaagagcttccatctgggctggacccagttcttgcacatacaagacaccgctgcagtcagctaggacctttccgccatgtattctattctgtagtaaagcatttccatcaacaatgcctaattgtatctgttatttttggtttaacacacactgattcatactaataaatattttcagttttaaaaaaaaaaaaaaaaaaaaaaa

SEQ ID NO: 2830 - DNA, 2397 bp, Homo sapiens; identical to SEQ ID NO: 2305

SEQ ID NO: 2831 - DNA, 2960 bp, Homo sapiens
tttccaaggaaggaaaggcacacaatggtatcaaatgttcattcattccatctcttgatgctctacgatattatcagtctacactatgctttcctgaaaggccagaagttcaaagatggactagtttcccagggacctgattccccagttggaatactccagccccttggaaattcccgggatttataaaataactctagacaacaagactttgtctttaaaggtcctatgaattcttttctctctgtatttaggtatcctgatttttcttttccatattttccacaggattattttacaaatgcaaatagagagttgaaaaaagatgctcagcaagattaccatctagaatatgccatggaaaatagcacacacacaataattgaatttaccagagagctgcatacatgtgacataaatgacaagagtataacggatagcactgtgagagtgatctgggcctaccaccatgaagatgcaggagaagctggtcccaagtaccatgactccaataggggcaccaagagtttgcggttattgaatcctgagaaaactagtgtgctatctacagccttaccatactttgatctggtaaatcaggacgtccccatcccaaacaaagatacaacatattggtgccaaatgtttaagattcctgtgttccaagaaaagcatcatgtaataaaggttgagccagtgatacagagaggccatgagagtctggtgcaccacatcctgctctatcagtgcagcaacaactttaacgacagcgttctggagtccggccacgagtgctatcaccccaacatgcccgatgcattcctcacctgtgaaactgtgatttttgcctgggctattggtggagagggcttttcttatccacctcatgttggattatcccttggcactccattagatccgcattatgtgctcctagaagtccattatgataatcccacttatgaggaaggcttaatagataattctggactgaggttattttacacaatggatataaggaaatatgatgctggggtgattgaggctggcctctgggtgagcctcttccataccatccctccagggatgcctgagttccagtctgagggtcactgcactttggagtgcctggaagaggctctggaagccgaaaagccaagtggaattcatgtgtttgctgttcttctccatgctcacctggctggcagaggcatcaggctgcgtcattttcgaaaagggaaggaaatgaaattacttgcctatgatgatgattttgacttcaatttccaggagtttcagtatctaaaggaagaacaaacaatcttaccaggagataacctaattactgagtgtcgctacaacacgaaagatagagctgagatgacttggggaggactaagcaccaggagtgaaatgtgtctctcataccttctttattacccaagaattaatcttactcgatgtgcaagtattccagacattatggaacaacttcagttcattggggttaaggagatctacagaccagtcacgacctggcctttcattatcaaaagtctcaagcaatataaaaacctttctttcatggatgctatgaataagtttaaatggactaaaaaggaaggtctctccttcaacaagctggtcctcagcctgccagtgaatgtgagatgttccaagacagacaatgctgagtggtcgattcaaggaatgacagcattacctccagatatagaaagaccctataaagcagaacctttggtgtgtggcacgtcttcttcctcttccctgcacagagatttctccatcaacttgcttgtttgccttctgctactcagctgcacgctgagcaccaagagcttgtgatcaaaattctgttggacttgacaatgttttctatgatctgaacctgtcatttgaagtacaggttaaagactgtgtccactttgggcatgaagagtgtggagacttttcttccccattttccctccctcctttttcctttccatgttacatgagagacatcaatcaggttctcttctctttcttagaaatatctgatgttatatatacatggtcaataaaataaaactggcctgacttaagataaccattttaaaaaattgggctgtcatgtgggaataaaagaattctttctttcctactacattctgttttatttaaatactcattgttgctatttcactttttgacttgacttttatatttctttaaaaaattccttccttttaaaaaatataaaagggactactgttcattccagttttcttcttctttgttgttcttctagtgtgacttttcaagtgtaacagccattcttcctgactttaatattgtccagttctggtcttttctgtgaattaccactgggccccttacctcaatgctttttgttgatgcccactctggttcccttgtttatctgagtctgttggtaccccaaatgaccccacacccatyttaaagtactttttttcaccttccctgtttagtactggccagatgagttttttctagagctctgtcactatctgaaaagaaagaggctatgggaaacatagaaatggtatgtattaataactgatcataggctgaggagaaaaaatgtagctggctgcaaacccagtgctgtgaggtgacttatatgaggttccagatcaaagacaggccgtgtgagccagtccaggagggtgtaagttctgaatggttccttgctgactttgggtgacacatgtaccacatactggctcagtttaagtcatggttctattgtagatttatttttatattagttaataaatgactttaaattgtcaccaattgaaaatcttgtcactcttttggttttctttatatagctcagccaaatctctgttttatgtcctgtcctcatctcttaagctaaatctgtttggatcatattaataaacctcgtgccg

SEQ ID NO: 2832 - DNA, 1057 bp, Homo sapiens; identical to SEQ ID NO: 575

SEQ ID NO: 2833 - DNA, 1990 bp, Homo sapiens
ggagtgcccaggatggagtgcagtggctattcacaggtttaatcatagctcactaccgtcttgaatccctgggctcaagtgatcctcctgcctcagcccctgagtagctggtactaaagttaccttccacgctgtatgtccgtgagaaatacaatgaagacggtctgaataatgaactggtaatcttcgataatatgaaacgaatttaagagaacatatcaaagagaaggctctcaaaataggctgctgcaaaagctggtatattgtccggttgctctctcagaatctcgcgtgtcagcccttcaagaagattcccaaatccttgtggaattcggtagtgggtgttggagaatggaatcgacatcttcttggtattggttttcgctttgcttcatacatcaataatgatatggtgctgcagaaggagcctgctggggcagtgatatggggcttcggtacacctggagccacagtgaccgtgaccctgcgccaaggtcaggaaaccatcatgaagaaagtgaccagtgtgaaagctcactctgatacgtggatggtggtactggatcctatgaagcctggaggacctttcgaagtgatggcacaacagactttggagaaaataaacttcaccctgagagttcatgacgtcctgtttggagatgtctggctctgtagtgggcagagtaacatgcagatgactgtgttacagatatttaatgctacaagggagttgtctaacactgcggcatatcagtctgtccgcatcctctctgtctctcccattcaagcagagcaggagctggaggaccttgttgcggttgacttgcagtggtctaagcccacctcagaaaacttaggccatggatatttcaagtacatgtcagcagtgtgctggctctttggacgtcacctttatgacactctgcagtatcccatcgggctgatcgcctccagctggggcgggacacccattgaagcctggtcatctggacggtcactgaaagcctgtggggtccctaaacaagggtccattccatacgattctgtaactggtcccagtaagcactctgttctctggaatgccatgatccatccactgtgcaatatgactctgaaaggggtagtatggtaccagggggagtccaatataaattataacacggatctgtacaattgcacattccctgcactcatcgaagactggcgtgaaaccttccaccgtggttcccaggggcagacggagcgtttcttcccatttggacttgtccagttatcttcagatttgtctaagaagagctcagacgatggatttccccagatccgttggcatcaaacagcagacttcggctatgtccccaacccaaagatgcccaatactttcatggctgtagctatggatctctgtgatagagactcgccttttggcagcatccaccctcgagataaacagactgtggcttatcggctgcatttgggggcccgtgctctggcttatggtgagaagaatttgacctttgaaggaccactgcctgagaagatagaactcttggctcacaaggggctgctcaatctcacatattaccagcaaatccaggtgcagaaaaaggacaacaagatatttgagatctcctgttgcagtgaccatcgatgcaagtggcttccagcttctatgaacaccgtctccacccagtccctgaccctggcgatcgattcttgtcatggcactgtggttgctctccgctatgcttggaccacgtggccttgtgaatataagcagtgtcccctataccaccccagtagtgccctgccagcccctcccttcattgctttcattacagaccagggtcctggacatcagagcaatgttgctaaatgactgtttcagtatgatcagaacttagatataaggatgggtccttcagattttagcatttaggagtttcaataataaccattgcttttaaaggaaagtaaaaaaaaaaaaaaaaaa

SEQ ID NO: 2834 - DNA, 2621 bp, Homo sapiens
cgggcagatgtggtggatctgttcccagggacttttgaggttgtggagatggtggccagcaaccctgggacatggctgatgcactgccatgtgactgaccatgtccatgctggcatggagaccctcttcactgttttttctcgaacagaacacttaagccctctcaccgtcatcaccaaagagactgaaaaagcagtgccccccagagacattgaagaaggcaatgtgaagatgctgggcatgcagatccccataaagaatgttgagatgctggcctctgttttggttgccattagtgtcacccttctgctcgttgttctggctcttggtggagtggtttggtaccaacatcgacagagaaagctacgacgcaataggaggtccatcctggatgacagcttcaagcttctgtctttcaaacagtaacatctggagcctggagatatcctcaggaagcacatctgtagtgcactcccagcaggccatggactagtcactaaccccacactcaaaggggcatgggtggtggagaagcagaaggagcaatcaagcttatctggatatttctttctttatttattttacatggaaataatatgatttcactttttctttagtttctttgctctacgtgggcacctggcactaagggagtaccttattatcctacatcgcaaatttcaacagctacattatatttccttctgacacttggaaggtattgaaatttctagaaatgtatccttctcacaaagtagagaccaagagaaaaactcattgattgggtttctacttctttcaaggactcaggaaatttcactttgaactgaggccaagtgagctgttaagataacccacacttaaactaaaggctaagaatataggcttgatgggaaattgaaggtaggctgagtattgggaatccaaattgaattttgattctccttggcagtgaactactttgaagaagtggtcaatgggttgttgctgccatgagcatgtacaacctctggagctagaagctcctcaggaaagccagttctccaagttcttaacctgtggcactgaaaggaatgttgagttacctcttcatgttttagacagcaaaccctatccattaaagtacttgttagaacactgaaagactgaatttggtgatttttgacagtctctgtggcttctgtcactgtgattgaaacagaaaatacttagggggtgagtgagtatagtatgtatttgtctagcctttgtagaacctacaagtttttgttttagagatgaggaagctgttccagaggaagcatcaaagagtgctgggtaccaccctagaaaaggagctgtcgcataaatgacaaaaattttctgagtgtcaagaaaatttgccagagggaaatagaagtctgagacgagactcaaacctgtccagtgggccaggggaagtaggaccatatcttatggggcctttttggcagtggtggtgtgaaaggtctagttgcaactttgggggcttccttataggatggagtcattctttctggtattttacagcaatattcctttgttacatgcaaatttgagccaaatattggttagagagcacagataagtgataaattttagattgggtaagatggcccaccccactgcaatatccataatattgtaccacatggcaagtggagaacagaagaggtatcaaggagagaaaagatgataactatgtactgttttacactttaaaaagcattttaattcttgattgcgtttggattacctcagggcaagtcattttacatttgagtaatgttatccatttatacatttgagtgaacaaaagcttatggacattaagtaacttcatccaagatccctcaggtagaagttgagcagggattcatgtattcatctgtttgactccaaatacctatttcatcctcatatatcatggaaacatccactaatctccatccaccttacccatattgattccaacttttctgtctgtccagcaatctgtctgtctaggtagcaatctcttgaagataaaatgtagaaactcacagagctggtgttcagttacgatataagtttggaggagaaaacacaatccagaagctatgattcctcttgtttttccatggtcaacgggtttctggagagctttactgagaatctcagaaataaagtgtgggtggaagggggatttagatggctagttatccaagagttagtgtttaggccattgcagaatcaatgatttaacagcagcagaactgttttggcctgcagttaacatgaatgttaatgaagaccaagtacatgctaggaattccagtcaattaatggttataatttacatgcaactaggaggttcttagcttggtctcagttataactctaagagactaggagaggtagatgagatggaatgcatttcttcttattttgtaatcctgctccaggtcaaggaatagaaactcagagcccatgtatttaagaaagaaatgtatttttgtggtaagtttgctccaagtagggatacaagtatctatttttgacaatcaagtgacattgccatctattcagttgctcaagctggaaattatcagtgtcaacacatc

SEQ ID NO: 2835 - DNA, 1814 bp, Homo sapiens
acagagcttcaaaaaaagagcgggacagggacaagcgtatctaagaggctgaacatgaatccacagatcagaaatccgatggagcggatgtatcgagacacattctacgacaactttgaaaacgaacccatcctctatggtcggagctacacttggctgtgctatgaagtgaaaataaagaggggccgctcaaatctcctttgggacacaggggtctttcgaggccaggtgtatttcaagcctcagtaccacgcagaaatgtgcttcctctcttggttctgtggcaaccagctgcctgcttacaagtgtttccagatcacctggtttgtatcctggaccccctgcccggactgtgtggcgaagctggccgaattcctgtctgagcaccccaatgtcaccctgaccatctctgccgcccgcctctactactactgggaaagagattaccgaagggcgctctgcaggctgagtcaggcaggagcccgcgtgaagatcatggactatgaagaatttgcatactgctgggaaaactttgtgtacaatgaaggtcagcaattcatgccttggtacaaattcgatgaaaattatgcattcctgcaccgcacgctaaaggagattctcagatacctgatggatccagacacattcactttcaactttaataatgaccctttggtccttcgacggcgccagacctacttgtgctatgaggtggagcgcctggacaatggcacctgggtcctgatggaccagcacatgggctttctatgcaacgaggctaagaatcttctctgtggcttttacggccgccatgcggagctgcgcttcttggacctggttccttctttgcagttggacccggcccagatctacagggtcacttggttcatctcctggagcccctgcttctcctggggctgtgccggggaagtgcgtgcgttccttcaggagaacacacacgtgagactgcgcatcttcgctgcccgcatctatgattatgaccccctatataaggaggcgctgcaaatgctgcgggatgctggggcccaagtctccatcatgacctacgatgagtttgagtactgctgggacacctttgtgtaccgccagggatgtcccttccagccctgggatggactagaggagcacagccaagccctgagtgggaggctgcgggccattctccaggtgagggcttcctccctctgcctggtgccccatcggcctccccctcctccccgctcccctgtgccttgccttcccctctgctcagagcctcctctgggttccctgctccccacagggcgcccagctccgtccctccctttccttctcacagcctccttctctttcccacctcccgcatccctccctcctctcccgtcattgtcactgtccccaggccacctccctgtgccctctttccactctctcacctcctgctccattcaacccccctgctcttccagaatcagggaaactgaaggatgggcctcagtctctaaggaaggcagagacctgggttgagcagcagaataaaagatcttcttccaagaaatgcaaacagaccgttcaccaccatctccagctgctcacagacaccagcaaagcaatgtgctcctgatcaagtagatttttttaaaaatcagagtcaattaattttaattgaaaatttctcttatgttccaagtgtacaagagtaagattatgctcaatattcccagaatagttttcaatgtattaatgaagtgattaattggctccatatttagactaataaaacattaagaatcttccaaaaaaaaaaaaaaaaa

SEQ ID NO: 2836 - DNA, 1702 bp, Homo sapiens
ttttaaatgcagctgactaatttaggcaaatgtcttaacagttgattggtatgaacttatccattagaaatcaagcctcaagtggttatttgtagatgcaatgcttttgcttataatagttagaaaataatgctcatattcttttgggtaggtgatgactttaaaagtacagtttaaaggatttataagacacaaaatgccatttaacaaatatgtaaaattgtatatattctttcaacaaataattattgagtgccacatatgtgccatgcaatttgctatagtgatggacaagacagacatgatctctgccctaaaaaagctcatcaaggaacataggagataaaaatacaaagtaaagttgactttcccccaacatctcctgttatttggaggcaattcaggtctttttccaatcaactgcagaattttgcttaagagcatagtggcaatgagactcaatatgtttattgttgctgataatcagaagaggaacttcccatctcaatgacttaaccttttgtggcttggctgtaattgattcacaagttttgggagatgctgactcataatgtgttgaacctttttagggggtgatggtgggaatgggacaaaaagacagctacgtgggtgacgaagcacagagcaaaagaggaatcctgaccctgaagtacccgatagaacatggcatcatcaccaactgggacgacatggaaaaggtatgggaggtttgctgcagcttgggccctcaggatgcataatccctgtgttctctgatacagaacaccacactactgctggggaaataactggctcacattgctcaactgtacttttacttgttaatgttcattctgggttattacccattgaaaaaaaaatccttgtagccataaaaaatgatgagttcatgtcctttgtagggacatggatgaagctggaaaccatcatcctcagcaaactgtcgcaaggacaaaaaaccaaacaccgcatgttctcactcataggtgggaattgaacaacgagaacacatggacacaggaaggggaacatcacacaccggggactgttgtggggtggggggagggggaggaatagcattaggagatatacctaatgtaaatgacgagttaatgggtgcagcacaccaacatggcacatgtatacatatgtaacaaacctgcacgttgtgcacatgtaccctaaaacttaaagtataataataataaaatttaaaaaaaaaagaaaaaaaaatcctaaaatgtttctttaaaaaaaaatcccttgccaggcacggttgctcacacgtgtaatcccaacactttgggaggccaaggtgggaggatcgcttggcccaggagtttgagaccaggctgggtaacatagtaagatcctgtctctacaaaaaataaatgaaattagccaggcatggtggcacacacctcagtcccagctacttgaaagattgaggtgggaggatcacttgagcctgggatatggaggctgcagtgggccaagatcctactccagcctaggtgacagagtgagatcctatctcaaaaaaaagaagaaaaaaatcctgcagggcacagtgactcacacctgtaatctcagcactggatcacttgaggccaggagtttgagaccagcctgagcaacatagcaaaaccctgtttctactgaaaaaaaaaaaaaaaaaaaa

SEQ ID NO: 2837 - DNA, 1811 bp, Homo sapiens
gagtcaccaaggaaggcagcggcagctccactcagccagtacccagatacgctgggaaccttccccagccatggcttccctggggcagatcctcttctggagcataattagcatcatcattattctggctggagcaattgcactcatcattggctttggtatttcagggagacactccatcacagtcactactgtcgcctcagctgggaacattggggaggatggaatccagagctgcacttttgaacctgacatcaaactttctgatatcgtgatacaatggctgaaggaaggtgttttaggcttggtccatgagttcaaagaaggcaaagatgagctgtcggagcaggatgaaatgttcagaggccggacagcagtgtttgctgatcaagtgatagttggcaatgcctctttgcggctgaaaaacgtgcaactcacagatgctggcacctacaaatgttatatcatcacttctaaaggcaaggggaatgctaaccttgagtataaaactggagccttcagcatgccggaagtgaatgtggactataatgccagctcagagaccttgcggtgtgaggctccccgatggttcccccagcccacagtggtctgggcatcccaagttgaccagggagccaacttctcggaagtctccaataccagctttgagctgaactctgagaatgtgaccatgaaggttgtgtctgtgctctacaatgttacgatcaacaacacatactcctgtatgattgaaaatgacattgccaaagcaacaggggatatcaaagtgacagaatcggagatcaaaaggcggagtcacctacagctgctaaactcaaaggcttctctgtgtgtctcttctttctttgccatcagctgggcacttctgcctctcagcccttacctgatgctaaaataatgtgcctcggccacaaaaaagcatgcaaagtcattgttacaacagggatctacagaactatttcaccaccagatatgacctagttttatatttctgggaggaaatgaattcatatctagaagtctggagtgagcaaacaagagcaagaaacaaaaagaagccaaaagcagaaggctccaatatgaacaagataaatctatcttcaaagacatattagaagttgggaaaataattcatgtgaactagagtcaactgtgtcagggctaagaaaccctggttttgagtagaaaagggcctggaaagaggggagccaacaaatctgtctgcttcctcacattagtcattggcaaataagcattctgtctctttggctgctgcctcagcacagagagccagaactctatcgggcaccaggataacatctctcagtgaacagagttgacaaggcctatgggaaatgcctgatgggattatcttcagcttgttgagcttctaagtttctttcccttcattctaccctgcaagccaagttctgtaagagaaatgcctgagttctagctcaggttttcttactctgaatttagatctccagaccctgcctggccacaattcaaattaaggcaacaaacatataccttccatgaagcacacacagacttttgaaagcaaggacaatgactgcttgaattgaggccttgaggaatgaagctttgaaggaaaagaatactttgtttccagcccccttcccacactcttcatgtgttaaccactgccttcctggaccttggagccacggtgactgtattacatgttgttatagaaaactgattttagagttctgatcgttcaagagaatgattaaatatacatttcctaaaaaaaaaaaaaaaaa

SEQ ID NO: 2838 - DNA, 1897 bp, Homo sapiens
ttttactaagagggtttctaaaatgaaaagtggcatatacaagaatactagttattcttacacagaattatagttttagaactcattaggctgaatatcattgttttctaagttcctgcctcaacattcatattggtagaataaacaggtatttagagcatctgtttataaattcagttatgcacaagccattggtaggccttgctctgtgatgaataggacagacagagatcataccttaatgaaagaaatgaaatgactagatcttcatgcatcagggaggttctctctctcctttgtttaaactttgcgaaaaaaaaaaaggaataccacaatatctaaaaaaaaatgaatggataggattcagggctgagacctctggggaagaagatgaggacagggagactttaaggatggctctatactaagagtatacgaggcagcctccaaatagaagaacaaatttgcagtaaaacacaagaaatagaaaccttgtaagagatgaacactttttaaagggattatatttttggtattgctgcttcagtcatgccattgtataaaaaaagatgaatagttcattatgtaatgaatgtttgtgatactgacctttatcaaatctcttatttttgccttgtggttctaaatacattatgtttttcctttagcttcagatggaaagacctatgacgcatatatactgtatccaaagactgttggggaagggtctacctctgactgtgatatttttgtgtttaaagtcttgcctgaggtcttggaaaaacagtgtggatataagctgttcatttatggaagggatgactacgttggggaaggtatgtgtgtaatggaacagagtaaaggcttattgttgtaaaactacttagtaaaatgtggattccatctttctagaagatcgtggcataggggtatatgtttcacaattttaagaacctcttcagaagtgtatgatgatttttacatttattaaatgcatttacttctctcatattttgtcagagcaataattaagtgattttcatttagttttgaaaaacttactgactagttaaacccaacagttgctttacaactgatacaattaaacaggagtggtagagatcaaatgattgaataataagtttttaaaattccaacaaagttttctgagttctaaatgaaatatttgtcttttgagggccaatttttgagttagtctataaaatgggaggtttgcagtggctcatgccttttatctcagtacaaccctgggaggccagggtgagagggtcacttgagcctaggagtttgaggctgcagtgatccaagatcacgccactgcgctccagtgtgagcaacagaacaagagactgtctcttaaaattaattaattaaaaacatgggaaactcctttaattttaagtaagacaagaaaaaggcattaggagccatacggttatgaaaagccttgtgtggctttggttcaggagagaatgatgataaatagaattttacttactatattgtgcttcctgtttttcagacattgttgaggtcattaatgaaaacgtaaagaaaagcagaagactgattatcattttagtcagagaaacatcaggcttcagctggctgggtggttcatctgaagagcaaatagccatgtataatgctcttgttcaggatggaattaaagttgtcctgcttgagctggagaaaatccaagactatgagaaaatgccagaatcgattaaattcattaagcagaaacatggggctatccgctggtcaggggactttacacagggaccacagtctgcaaagacaaggttctggaagaatgtcaggtaccacatgccagtgccagtgacggtcaccttatcaaaaaaaaaaaaaaaaa

SEQ ID NO: 2839 - DNA, 1255 bp, Homo sapiens; identical to SEQ ID NO: 783

SEQ ID NO: 2840 - DNA, 396 bp, Homo sapiens; identical to SEQ ID NO: 722

SEQ ID NO: 2841 - DNA, 5610 bp, Homo sapiens
ctaatttttggtcggcggcggtgctgggccaggggaaggaagggacacggaggccgccctcgtcccgccacctcctacccgcttccccccagccccggctccgggagatgtgccgggcggggggcccgggttcgccgagccgcaggagagacacgctgggccgaccccagagaggcgctggacaggctggtggtccaggccgtggtgcctgccaggtgatgtggggcaaagccccccgcacaggccactgagagctccggacacgcacccggctgccaccatggcccgcctagccgcagtgctctggaatctgtgtgtcaccgccgtcctggtcacctcggccacccaaggcctgagccgggccgggctcccgttcgggctgatgcgccgggagctggcgtgtgaaggctaccccatcgagctgcggtgccccggcagcgacgtcatcatggtggagaatgccaactacgggcgcacggacgacaagatttgcgatgctgaccctttccagatggagaatgtgcagtgctacctgccggacgccttcaagatcatgtcacagaggtgtaacaaccgcacccagtgcgtggtggtcgccggctcggatgcctttcctgacccctgtcctgggacctacaagtacctggaggtgcagtacgactgtgtcccctacatcttcgtgtgcccagggaccctgcagaaggtgctggagcccacctcgacacacgagtcagagcaccagtctggcgcatggtgcaaggacccgctgcaggcgggtgaccgcatctacgtgatgccctggatcccctaccgcacggacacactgactgagtatgcctcgtgggaggactacgtggccgcccgccacaccaccacctaccgcctgcccaaccgcgtggatggcacaggctttgtggtctacgatggtgccgtcttctacaacaaggagcgcacgcgcaacatcgtcaagtatgacctacggacgcgcatcaagagcggggagacggtcatcaataccgccaactaccatgacacctcgccctaccgctggggcggaaagaccgacattgacctggcggtggacgagaacgggctgtgggtcatctacgccactgagggcaacaacgggcggctggtggtgagccagctgaacccctacacactgcgctttgagggcacgtgggagacgggttacgacaagcgctcggcatccaacgccttcatggtgtgtggggtcctgtacgtcctgcgttccgtgtacgtggatgatgacagcgaggcggctggcaaccgcgtggactatgccttcaacaccaatgccaaccgcgaggagcctgtcagcctcaccttccccaacccctaccagttcatctcctccgttgactacaaccctcgcgacaaccagctgtacgtctggaacaactatttcgtggtgcgctacagcctggagttcgggccgcccgaccccagtgctggcccagccacttccccacccctcagcacgaccaccacagccaggcccacgcccctcaccagcacagcctcgcccgcagccaccaccccgctccgccgggcacccctcaccacgcacccagtgggtgccatcaaccagctgggacctgatctgcctccagccacagccccagtccccagcacccggcggcccccagccccgaatctacacgtgtcccctgagctcttctgcgagccccgagaggtacggcgggtccagtggccggccacccagcagggcatgctggtggagaggccctgccccaaggggactcgaggaattgcctccttccagtgtctaccagccttggggctctggaacccccggggccctgacctcagcaactgcacctccccctgggtcaaccaggtggcccagaagatcaagagtggggagaacgcggccaacatcgccagcgagctggcccgacacacccggggctccatctacgcgggggacgtctcctcctctgtgaagctgatggagcagctgctggacatcctggatgcccagctgcaggccctgcggcccatcgagcgcgagtcagccggcaagaactacaacaagatgcacaagcgagagagaacttgtaaggattatatcaaggccgtggtggagacagtggacaatctgctccggccagaagctctggagtcctggaaggacatgaatgccacggagcaggtgcacacggccaccatgctcctcgacgtcctggaggagggcgccttcctgctggccgacaatgtcagggagcctgcccgcttcctggctgccaaggagaacgtggtcctggaggtcacagtcctgaacacagagggccaggtgcaggagctggtgttcccccaggaggagtacccgagaaagaactccatccagctgtctgccaaaaccatcaagcagaacagccgcaatggggtggtcaaagttgtcttcatcctctacaacaacctgggcctcttcctgtccacggagaatgccacagtgaagctggccggcgaagcaggcccgggtggccctgggggcgcctctctagtggtgaactcacaggtcatcgcagcatccatcaacaaggagtccagccgcgtcttcctcatggaccctgtcatcttcaccgtggcccacctggaggacaagaaccacttcaatgctaactgctccttctggaactactcggagcgttccatgctgggctactggtcgacccaaggctgccgcctggtggagtccaacaagacccataccacgtgtgcctgcagccacctcaccaacttcgctgtgctcatggctcaccgtgagatctaccagggccgcatcaacgagctgctgctgtcggtcatcacctgggtgggcattgtgatctccctggtctgcttggccatctgcatctccaccttctgcttcctgcgggggctgcagaccgaccgcaacaccatccacaagaacctgtgcatcaacctcttcctggctgagctgctcttcctggtcgggatcgacaagactcagtatgagattgcctgccccatcttcgccggcctgctgcactatttcttcctggctgccttctcctggctgtgcctggagggcgtgcacctctacctgctactagtggaggtgtttgagagcgagtattcccgcaccaagtactactacctgggtggctactgcttcccggccctggtggtgggcatcgcggctgccattgactaccgcagctacggcaccgagaaggcctgctggctccgagtggacaattacttcatctggagtttcatcgggccagtctccttcgttatcgtggtcaacctggtgttcctcatggtgaccctgcacaagatgatccgaagctcatctgtgctcaagcccgactccagccgcctggacaacattaaatcctgggcgctgggggccatcgcgctgctgttcctgctgggcctcacctgggctttcggcctcctcttcatcaacaaggagtcggtggtcatggcctatctcttcaccaccttcaacgccttccagggggtcttcatcttcgtctttcactgcgccttacagaagaaggtgcacaaggagtacagcaagtgcctgcgtcactcctactgctgcatccgctccccacccgggggcactcacggatccctcaagacctcagccatgcgaagcaacacccgctactacacagggacccagagccgaattcggaggatgtggaatgacactgtgaggaaacagacggagtcctccttcatggcgggtgacatcaacagcacccccaccctgaaccgaggtaccatggggaaccacctgctgaccaaccccgtgctgcagccccgtgggggcaccagtccctacaacaccctcatcgccgagtcagtgggcttcaatccctcctcgccccctgtcttcaactccccagggagctaccgggaacccaagcaccccttgggaggccgggaagcctgtggcatggacaccctgcccctgaacggcaacttcaataacagttactccttgcgaagtggggatttccctcccggggatgggggccctgagccgccccgaggccggaacctagccgatgcggcggcctttgagaagatgatcatctcagagctggtgcacaacaacctgcgggggagcagcagcgcggccaagggccctccaccgcctgagccccctgtgccacctgtgccagggggcgggggcgaggaagaggcgggcgggcccgggggtgctgaccgggccgagattgaacttctctataaggccctggaggagcctctgctgctgccccgggcccagtcggtgctgtaccagagcgatctggacgagtcggagagctgcacggccgaggacggcgccaccagccggcccctctcctcccctcctggccgggactccctctatgccagcggggccaacctgcgggactcaccctcctacccggacagcagccctgaggggcccagtgaggccctgcccccaccccctcccgcaccccccggcccccccgaaatctactacacctcgcgcccgccagccctggtggcccggaatcccctgcagggctactaccaggtgcggcgtcctagccacgagggctacctggcagccccaggccttgaggggccagggcccgatggggacgggcagatgcagctggtcaccagtctctgagggcacctcatggaccaggggctggtggcccaggccagggagggaaccctgggcagggctctggtgggagagggagacagatggaggcagtggctggtgggccactctctccaggtgcccctcagccatgggccctacagtcccctcaggggactctaacctgggggcctgaggtgccagggttcacagacagggtttcccaccagccacacgcaccagctctatttgggggaagtgtagtgaggaggagcccagaggaccccaggggagtgaggagggagaacttggaagggtgcagcccacttccagactctcccctctcccacccttctaccctgtgaagggaaatgagggctttagtttcctgggcagggaggggcagcttctgaggttgccaaaggcccccactggatggaacctgttagctgctcctctccgcagccagaaatgctgccggctgcacccagagggagcagtgaggcaggacagatggacaggttcctcctgcgctgtaattccctgctccctggagactgggaaaaggccgcagggcagggggactgggcggtggtggctggtggtttaaaggttgaactttctctgaagctcctttccccttgctcttggtccctgccccgcaagcaaacctgccccctctgcctcccagtgcacccaatgaccccctcccttggggcgactcctgatgaagcacaactccccgcagggcccccagcccacaggggtggccatatttgggcagttcccagtcctgtgggctcggctatctggggagcagattttgggtctggatctccctggggagtgggtcctgggcttggatctttccctagggggccctcttactccttcctctctcctcctccttccccattgctgtaaatatttcaacgaaatggaaa

SEQ ID NO: 2842 - DNA, 6533 bp, Homo sapiens
gaaaaacacgagccgtgttgtatgtggaggccccggtgtctgggtgtaattctcgttccttctgtgaggtgaggcagatgaagccatttcgtggttctgctgagcatggtcttggcagtgtttttgggagcatcacactgtgccccttttgttaacttgctagcccggcctgtcttttgccccgggctcaatggctggattgtggaaactgcacccgccttcaggttgttgagcaactgatgggacgatctcagggaccggcgtttacgaaagaaatgtttaatttggtaaattggaggaaaaaaacatggatttttagcaattgaagagcaaattaaggtttcagatttgggatattggtgtttctgttttggagaaattattctttttctttttaatttgaagaaaaatcatcagtcttggaatacagaagagaaactagaaatatacgtattttgtttcacatttgaacagtcattcttgaggaatactccatacctgagtagacagccatgtggccatcgcagctactaattttcatgatgctcttagctccaataattcatgctttcagccgtgccccaattccaatggctgtggtccgcagagagctatcctgtgagagctatcctatagagcttcgctgtccaggaacagacgtcatcatgatagaaagtgccaactatggcaggactgatgacaaaatttgtgactctgaccctgctcagatggagaatatccgatgttatctgccagatgcctataagattatgtctcaaagatgcaataacagaacccagtgtgcagtggtggcaggtcctgatgtttttccagacccgtgtccaggaacctataaataccttgaagtgcagtatgaatgtgtcccttacaaagtggaacaaaaagtttttctttgtcctggactactaaaaggagtataccagagtgaacatttgtttgagtccgaccaccaatctggggcgtggtgcaaagaccctctgcaggcatctgacaagatttattatatgccctggactccctacagaactgataccctgactgagtattcatccaaggatgacttcattgctggaagaccaactacaacctacaagctccctcatagggtggatggcacaggatttgtagtgtatgatggagctttgttcttcaacaaagagcgcaccaggaacatagtaaagtttgatttgcggactaggataaagagtggagaggctatcatagcaaatgccaattaccatgatacctccccttaccgatggggaggcaaatctgacatagacctggcagtagatgagaatgggctatgggtaatctatgcaacagaacaaaacaatggtaaaattgtcattagtcaattgaacccttacaccctacggatcgaaggaacatgggatactgcatatgataaaaggtcagcttccaatgcctttatgatttgtggaattctgtatgtggtcaaatctgtatatgaggatgatgacaatgaggctactggaaataagattgactacatttacaacactgaccaaagcaaggatagtttggtggatgtaccctttcctaattcataccagtacattgcagctgtggattacaaccccagggacaacctactttatgtatggaataactatcacgtcgtgaaatattctttggattttggacctctggatagtagatcagggcaggcacatcatggacaagtttcatacatttctccgccaattcaccttgactctgagctagaaagaccctctgttaaagatatctctaccacaggacctcttggcatgggaagcactaccaccagtaccacccttcggaccacaactttgagcccaggaaggagtaccaccccgtcagtgtcaggaagaagaaaccggagtactagtaccccatctccagctgtcgaggtacttgatgacatgaccacacaccttccatcagcatcgtcccaaatcccagctctcgaagagagctgtgaggctgtggaagcccgagaaatcatgtggtttaagactcgtcaaggacagatagcaaagcagccatgccctgcaggaactataggtgtatcaacttatctatgccttgctcctgatggaatttgggatccccaaggtccagatctcagcaactgttcttctccttgggtcaatcatataacacagaagttgaaatctggtgaaacagctgccaacattgctagagagctggctgaacagacaagaaatcacttgaatgctggggacatcacctactctgtccgggccatggaccagctggtaggcctcctagatgtacagcttcggaacttgaccccaggtggaaaagatagtgctgcccggagtttgaacaagcttcagaaaagagagcgctcttgcagagcctatgtccaggcaatggtcgagacagttaacaacctccttcagccacaagctttgaatgcatggagagacctgactacgagtgatcagctgcgtgcggccaccatgttgcttcatactgtggaggaaagtgcttttgtgctggctgataaccttttgaagactgacattgtcagggagaatacagacaatattaaattggaagttgcaagactgagcacagaaggaaacttagaagacctaaaatttccagaaaacatgggccatggaagcactatccagctgtctgcaaataccttaaagcaaaatggccgaaatggagagatcagagtggcctttgtcctgtataacaacttgggtccttatttatccacggagaatgccagtatgaagttgggaacggaagctttgtccacaaatcattctgttattgtcaattcccctgttattacggcagcaataaacaaagagttcagtaacaaggtttatttggctgatcctgtggtatttactgttaaacatatcaagcagtcagaggaaaatttcaaccctaactgttcattttggagctactccaagcgtacaatgacaggttattggtcaacacaaggctgtcggctcctgacaacaaataagacacatactacatgctcttgtaaccacctaacaaattttgcagtactgatggcacatgtggaagttaagcacagtgatgcggtccatgacctccttctggatgtgatcacgtgggttggaattttgctgtcccttgtttgtctcctgatttgcatcttcacattttgctttttccgcgggctccagagtgaccgtaacaccatccacaagaacctctgcatcagtctctttgtagcagagctgctcttcctgattgggatcaaccgaactgaccaaccaattgcctgtgctgttttcgctgccctgttacatttcttcttcttggctgccttcacctggatgttcctggagggggtgcagctttatatcatgctggtggaggtttttgagagtgaacattcacgtaggaaatacttttatctggtcggctatgggatgcctgcactcattgtggctgtgtcagctgcagtagactacaggagttatggaacagataaagtatgttggctccgacttgacacctacttcatttggagttttataggaccagcaactttgataattatgcttaatgtaatcttccttgggattgctttatataaaatgtttcatcatactgctatactgaaacctgaatcaggctgtcttgataacatcaactatgaggataacagacccttcatcaagtcatgggttataggtgcaatagctcttctctgcctattaggattgacctgggcctttggactcatgtatattaatgaaagcacagtcatcatggcctatctcttcaccattttcaattctctacagggaatgtttatatttattttccattgtgtcctacagaagaaggtacgaaaagagtatgggaaatgcctgcgaacacattgctgtagtggcaaaagtacagagagttccattggttcagggaaaacatctggttctcgaactcctggacgctactccacaggctcacagagccgaatccgtagaatgtggaatgacacggttcgaaagcagtcagagtcttcctttattactggagacataaacagttcagcgtcactcaacagagagccctacagagagacaagtatgggagtaaagctaaacattgcatatcaaataggggcttctgaacaatgccagggatacaagtgtcatggatactctaccactgaatggtaaccatggcaatagttacagcattgccagcggcgaatacctgagcaactgtgtgcaaatcatagaccgtggctataaccataacgagaccgccctagagaaaaagattctgaaggaactcactcccaactatatcccttcttacctgaacaaccatgagcgctccagtgaacagaacaggaatctgatgaacaagctggtgaataaccttggcagtggaagggaagatgatgccattgtcctggatgatgccacctcgtttaaccacgaggagagtttgggcctggaactcattcatgaggaatctgatgctcctttgctgcccccaagagtatactccaccgagaaccaccagccacaccattataccagaaggcggatcccccaagaccacagtgagagctttttccctttgctaaccaacgagcacacagaagatctccagtcaccccatagagactctctctataccagcatgccgacactggctggtgtggccgccacagagagtgttaccaccagcacccagaccgaacccccaccggccaaatgtggtgatgccgaagatgtttactacaaaagcatgccaaacctaggctccagaaaccacgtccatcagctgcatacttactaccagctaggtcgcggcagcagtgatggatttatagttcctccaaacaaagatgggacccctcccgagggaagttcaaaaggaccggctcatttggtcactagtctatagaagatgacacagaaattggaaccaacaaaactgctaacaccttgttgactgttctgagttgatataagcagtggtaataatgtgtgtactcctaaatctttatgctgtcctctaaagacaaacacaaactctcagacttttttttttttaatgggatttttaggtcagcccaggggagaaagataactgctaaaattcccctgtaccccatcctttcttgtcctttccccttcagatggagacttcattatgttaatgaacaagatatgaagaaaatggcactcattgtggccttgttgaattatgttgtgtatgttttaacatctctgatgctgtgttactaaaattacaaggacctgctttttaaaaggccagaacaattgtctgaaattagtaacaatgctgcatctagattggagtgctgcacaaacaaacataagagcaaagcaaaactgtatcacatagggtttttggtcactcacaacctgaattcaccacagctggaatagctgtggaaaacaaaataaaacaacaaaattaataatgaaatggaggggaattctagaattatatgctaaatgcatattttatgatttgctgtattaactgatgataaaactaatggcagaaaaagaagttgagcaatttctatgtaatgtacagatactagcattgcacatatagtctgctttctgttcctccagaatttgagtcctgttaatgtagtagaaaaaaaaaaaagaaattttctttttcttttgtgctggtcttgcaagtttgtctaccagtaagagagcaaagtttccttcctttcttctctttcttcattttctttttttcttttttgccttttattcctttaaaatttcgcctggcaaaaaataaataaatggaactatcactttataagaatcattttctagtaatgcaaacaaattattttttacaaaaaaacaaaataaataaaattagacttccttccctcactatatatctttatgcagtcagaatatttccaacagtgttttttgcaaattagagcaggacaaacttttatgtttacagggcacgtctgttgtaatgcaaagcatatttggcaagcagttcatcaccaggacactagctatgattctagaagtcaaaaggtgtctatagaactagtggggcttctgcatgtgaaaaacggttttccataggcattaaagtgctgaatgctcagtctgatcaacaagtgggcacctgcactaccactttttagaggaaattcactccctcgtaagcattggaaggtcaaattattttgaagtgattttttttaaaaaaaagtcttctgtttattaacaggaaaatttatttatttgacaggattttgagtaatgtaggaatacaaaaggtaaattagcagcacatataatttttttttaatttatgatccattttgtatggtctcaaagttggatgacctcattactaatatttgttgtaaaagtgaaacttgtttgccaaccaataaacaactgattgagatttagaagatattgtaaaaaaaaaaaaaaaaa

SEQ ID NO: 2843 - DNA, 1992 bp, Homo sapiens; identical to SEQ ID NO: 124

SEQ ID NO: 2844 - DNA, 3862 bp, Homo sapiens
ggcacgaggctgcagccaactccgctccccgcgcactcggctgcccaggcgctcggaacccagcagcggcgctcctccgcggtgccggtcgcccgcgatgcccgcttagcagcgtgtagcagcggccagcatcaccacacccgcggcaccgcgctgccggccgcagagccgggccagagccttgcccccctcccccagcccccaccccgccccccgccctgaaatgacttgttaatcggcgcagacaccaccaaggggactcaccgaagtggaatccaagtggaatttggatttggagaagagtttcttgaacatttaccctcttccttgttggttttctttttctttttcttctttttttttttggcttcttttttcctctccccttctccgctcgtcattggagatgaacacatcgcgtttgcatcccagaaagtagtcgccgcgactatttcccccaaagagacaagcacacatgtaggaatgacaaaggcttgcgaaggagagagccgcagccgcggcccggagagatcccctcgataatggattactaaatgggatacacgctgtaccagttcgctccgagccccggccgcctgtccgtcgatgcaccgaaaagggtgaagtagagaaataaagtctccccgctgaactactatgaggtcagaagccttgctgctatatttcacactgctacactttgctggggctggtttcccagaagattctgagccaatcagtatttcgcatggcaactatacaaaacagtatccggtgtttgtgggccacaagccaggacggaacaccacacagaggcacaggctggacatccagatgattatgatcatgaacggaaccctctacattgctgctagggaccatatttatactgttgatatagacacatcacacacggaagaaatttattgtagcaaaaaactgacatggaaatctagacaggccgatgtagacacatgcagaatgaagggaaaacataaggatgagtgccacaactttattaaagttcttctaaagaaaaacgatgatgcattgtttgtctgtggaactaatgccttcaacccttcctgcagaaactataagatggatacattggaaccattcggggatgaattcagcggaatggccagatgcccatatgatgccaaacatgccaacgttgcactgtttgcagatggaaaactatactcagccacagtgactgacttccttgccattgacgcagtcatttaccggagtcttggagaaagccctaccctgcggaccgtcaagcacgattcaaaatggttgaaagaaccatactttgttcaagccgtggattacggagattatatctacttcttcttcagggaaatagcagtggagtataacaccatgggaaaggtagttttcccaagagtggctcaggtttgtaagaatgatatgggaggatctcaaagagtcctggagaaacagtggacgtcgttcctgaaggcgcgcttgaactgctcagttcctggagactctcatttttatttcaacattctccaggcagttacagatgtgattcgtatcaacgggcgtgatgttgtcctggcaacgttttctacaccttataacagcatccctgggtctgcagtctgtgcctatgacatgcttgacattgccagtgtttttactgggagattcaaggaacagaagtctcctgattccacctggacaccagttcctgatgaacgagttcctaagcccaggccaggttgctgtgctggctcatcctccttagaaagatatgcaacctccaatgagttccctgatgataccctgaacttcatcaagacgcacccgctcatggatgaggcagtgccctccatcttcaacaggccatggttcctgagaacaatggtcagataccgccttaccaaaattgcagtggacacagctgctgggccatatcagaatcacactgtggtttttctgggatcagagaagggaatcatcttgaagtttttggccagaataggaaatagtggttttctaaatgacagccttttcctggaggagatgagtgtttacaactctgaaaaatgcagctatgatggagtcgaagacaaaaggatcatgggcatgcagctggacagagcaagcagctctctgtatgttgcgttctctacctgtgtgataaaggttccccttggccggtgtgaacgacatgggaagtgtaaaaaaacctgtattgcctccagagacccatattgtggatggataaaggaaggtggtgcctgcagccatttatcacccaacagcagactgacttttgagcaggacatagagcgtggcaatacagatggtctgggggactgtcacaattcctttgtggcactgaatgggcattccagttccctcttgcccagcacaaccacatcagattcgacggctcaagaggggtatgagtctaggggaggaatgctggactggaagcatctgcttgactcacctgacagcacagaccctttgggggcagtgtcttcccataatcaccaagacaagaagggagtgattcgggaaagttacctcaaaggccacgaccagctggttcccgtcaccctcttggccattgcagtcatcctggctttcgtcatgggggccgtcttctcgggcatcaccgtctactgcgtctgtgatcatcggcgcaaagacgtggctgtggtgcagcgcaaggagaaggagctcacccactcgcgccggggctccatgagcagcgtcaccaagctcagcggcctctttggggacactcaatccaaagacccaaagccggaggccatcctcacgccactcatgcacaacggcaagctcgccactcccggcaacacggccaagatgctcattaaagcagaccagcaccacctggacctgacggccctccccaccccagagtcaaccccaacgctgcagcagaagcggaagcccagccgcggcagccgcgagtgggagaggaaccagaacctcatcaatgcctgcacaaaggacatgccccccatgggctcccctgtgattcccacggacctgcccctgcgggcctcccccagccacatccccagcgtggtggtcctgcccatcacgcagcagggctaccagcatgagtacgtggaccagcccaaaatgagcgaggtggcccagatggcgctggaggaccaggccgccacactggagtataagaccatcaaggaacatctcagcagcaagagtcccaaccatggggtgaaccttgtggagaacctggacagcctgccccccaaagttccacagcgggaggcctccctgggtcccccgggagcctccctgtctcagaccggtctaagcaagcggctggaaatgcaccactcctcttcctacggggttgactataagaggagctaccccacgaactcgctcacgagaagccaccaggccaccactctcaaaagaaacaacactaactcctccaattcctctcacctctccagaaaccagagctttggcaggggagacaacccgccgcccgccccgcagagggtggactccatccaggtgcacagctcccagccatctggccaggccgtgactgtctcgaggcagcccagcctcaacgcctacaactcactgacaaggtcggggctgaagcgtacgccctcgctaaagccggacgtaccccccaaaccatcctttgctcccctttccacatccatgaagcccaatgatgcgtgtacataatcccagggggagggggtcaggtgtcgaaccagcaggcaaggcgaggtgcccgctcagctcagcaaggttctcaactgcctcgagtacccaccagaccaagaaggcctgcggc

SEQ ID NO: 2845 - DNA, 3644 bp, Homo sapiens
cggcggcgcaggtgaggcgcggggccggggccggaccgggaggcggggaccccccgccccaccgcccgcacctgcggggcagccggcgctcaggcgccgcagccgctcagcacctgcggcgccctcagggagccgggcgcggggccctgcgcactcggagctcggctcctctccttccttttcttttttttcggggggaggtgggggctggtttggatgttttccgagagccggggacggtctcaagctattttcgcggagggaagtctttgaaatacgacatctaaaagagtggccctcggcgacaatgccgggcgttcccggaccggggcaacgctgggattccggggaagtggaggcagagggagcgggcacggggccggcagccgctccacggagtccccggcaggggcgagcttagctgtccagccgggtcccctgcccaccccggcccgggccgcggtgacagctgagggtccagagagccggcaggaggggaccctgccgattgtctgccgcgatggggacgtgggcgtgcccgcggaattcacctcctccggggaccagccgcccagggaggagccggcacagaacgctggctcggagcgccggcaccctgggcctttgcgttgtttgtcggctgagcagctggttcccggaccccgtgggcctcctggccaatgcgagtgacagcgaccttctgggtttataataaagggcttgacgcgccggaaagtcccctcgccgctggccaccagccttccagcccttacggcccacgccgtaatcctggtgaccgagaagagagcagagccactgccagaaggaaggggacaagacccagcaggacaccttctttccacgctttccagcctgtgggagcggcaggggcaacagagagaggatctggagccaggattaatgactcatttatgaagcatcttattctgcgaccgaggctcagtggtcagtggcgacgtaaatggctcgactccccgctggcattcgcttcatcatctcattctccagggatcagtggtacagagccttcatttttattttgacatttctgctgtatgcaagttttcacttatctcgaaagcctatcagcatagttaagggtgagctccacaagtactgcactgcttgggatgaagctgacgtcaggttcagcagccagaacaggaagtctgggtccgctgccccccaccagctccctgacaatgagaccgactgtggctgggcaccgtttgataagaacaactatcagcagctgcttggggccctggactactccttcctgtgcgcctatgccgtggggatgtacctcagtggcatcattggggagcgcctgccgattaggtattacctaactttcgggatgctcgccagcggagccttcaccgccctgttcggcttagggtatttctacaacatccacagtttcggattctacgtggtaactcaggtcatcaacgggctggtgcagaccaccggctggcccagcgtcgtcacctgcctcggcaactggtttggaaaaggaaggagaggtttgattatgggggtctggaactcccacacctccgtgggcaacatcttggggtcattgatcgctggctactgggtgtccacatgctggggcctgtccttggtcgtgcctggagccatcgtggcagccatggggatagtgtgctttctcttcctcattgaacatccgaacgacgtcaggtgctcctccaccctggtgacgcactcaaaaggctatgagaatggtacaaacagattgagactccagaagcaaatcttgaagagcgaaaagaacaagcctctggacccagagatgcagtgcctgctgctctcagatgggaagggctccatccacccgaaccaggtcgtcattctccccggggacggtgggagtggcacggccgccatcagcttcacaggggccttgaaaattccaggcgtgatagagttctcactgtgtctgctgtttgccaagctggtcagctatactttcctcttctggctgcccctgtacatcacgaatgtggatcaccttgatgccaaaaaggcgggggagctctccaccctgtttgacgtgggcggaatctttggtgggatcctggcaggtgtgatctcagaccgactggagaaaagggcctccacctgcggcctgatgctgctgctcgcggcccccacgctctacatcttctccaccatcagcaagatggggcttgaggccaccatcgccatgctgctgctcagcggagccctggtcagtgggccctacacactcatcaccaccgccgtctccgccgacctggggactcataaaagtctgaaaggcaacgcgcacgccctctccaccgtgacggccatcattgacgggacgggctctgtaggagcagccctgggccccctgctggctgggctcctctccccgtccggctggagcaatgtgttttacatgctgatgtttgcagatgcctgtgccttactgttcctgatccgcctcatacacaaggagctgagctgcccagggtcagctacgggggaccaagttccatttaaggaacagtgacaccccaccccagtcccgtggagggggtctgggcccacccttcacaactgcctttcaaggacagttcagacaaagggccctgcatggaaagagtgacctccctttgccttttgcacacgcacctggaaaagacacagaagccaacctgagaacccctggtgctattttaaaggagacatattgctgaacagcagtgagaaaagtctgcaggaactgctgcctgagccaagccagagaaccgaagacccggccggccctggcctcacaggcgtgtgcccatgcagccacccaaatgcacgcgtgacaacaaggccgggagggtggggggggtgcacaggtagccccgaccctctcaggcattccagccacagaacatcaaagtgagcgagtactgcgctggctgtggcttcagagaacctgtatgtgccacgtggaaaaacaggacaccagagcccaccagacagtgccggccagcagagaagcagagagccagcgccacacaacatcaagaaggccgacaaccaggttggaaaccaagacggagctcagacccaccacatcgccccagaggcttttccagcacccatgatgttccggactgacctaaaaactaattgtcgagaagccaagggtgaggaggcaggaagcacctccggttggaggcacccaggcttgccagccacagagcgccccgaagtcaccgtcatcccagcccctggccttcctgccgccctccggggccatggcgctgctgttcagctcaggcacaggggcacagcagaggtttgggaagcggtctccccaccggcactgggattggcgggtccaagcccagcaaccggcttcgctccacaacacacaccacacctgggactgtttttaatacatagcaacagactgggttatttatttaagatgtgtattgtgtcatatgaagtttaagagacataaatggcattttgttatttattaagacaaactccaattgttctctggctgtttttttcagttgtgtctagcaaaatacttatctgccctttgaaataaaatgtttttgttt

SEQ ID NO: 2846 - DNA, 3607 bp, Homo sapiens
gggacgggaggagccggggcagccagaagaggtgggaaaagcggaggaggacgcccaggaggaggcggcggcggcggccgggaagtgaaaggtctcgcaaagttcatgcggcggctgcgggcgccgagccccgggatagcggcagacgagcccgcagggccgctccgcggggcagcgcagccaggccggctatggtcccggggctcccgccgccccccaggtgcccgggacccgccaggccggtgcgcgagggtcaccccacctccccgcgcggtcccggcccctggctcccagctgccggcgaccgctgaccgagcccggcgccccaggaggaggaagaaaccagggccccgttccctcccgaggacggcggcgcttcatcccgcagcccagaggtctcggctccctccggcacccgcccggcccggctgctccctggctcctcccggccatggggagctgcgcgcggctgctgctgctctggggctgcacggtggtggccgcaggactgagtggagtagctggagtgagttcccgctgtgaaaaagcctgcaaccctcggatgggaaatttggctttggggcgaaaactctgggcagacaccacctgcggtcagaatgctaccgaactgtactgcttctacagtgagaacaaggatctgacttgtcggcagcccaaatgtgacaagtgcaatgctgcctatcctcacctggctcacctgccatctgccatggcagactcatccttccggtttcctcgcacatggtggcagtctgcggaggatgtgcacagagaaaagatccagttagacctggaagctgaattctacttcactcacctaattgtgatgttcaagtcccccaggccggctgccatggtgctggaccgctcccaggactttgggaaaacatggaagccttataagtactttgcgactaactgctccgctacatttggcctggaagatgatgttgtcaagaagggcgctatttgtacttctaaatactccagtccttttccatgcactggaggagaggttattttcaaagctttgtcaccaccacacgatacagagaacccttacagtgccaaagttcaggagcagctgaagatcaccaaccttcgcgtgcagctgctgaaacgacagtcttgtccctgtcagagaaatgacctgaacgaagagcctcaacattttacacactatgcgatctatgatttcattgtcaagggcagctgcttctgcaatggccacgccgatcaatgcatacctgttcatggcttcagacctgtcaaggccccaggaacattccacatggtccatgggaagtgtatgtgtaagcacaacacagcaggcagccactgccagcactgtgccccgttatacaatgaccggccatgggaggcagctgatggcaaaacgggggctcccaacgagtgcagagcctgcaagtgtaatgggcatgctgatacctgtcacttcgacgttaatgtgtgggaggcatcagggaatcgtagtggtggtgtctgtgatgactgtcagcacaacacagaaggacagtattgccagaggtgcaagccaggcttctatcgtgacctgcggagacccttctcagctccagatgcttgcaaaccgtgttcctgccatccagtaggatcagctgtccttcctgccaactcagtgaccttctgcgaccccagcaatggtgactgcccttgcaagcctggggtggcagggcgacgttgtgacaggtgcatggtgggatactggggcttcggagactatggctgtcgaccatgtgactgtgcggggagctgtgaccctatcaccggagactgcatcagcagccacacagacatagactggtgtcatgaagttcctgacttccgtcccgtgcacaataagagcgaaccagcctgggagtgggaggatgcgcaggggttttctgcacttctacactcaggtaaatgcgaatgtaaggaacagacattaggaaatgccaaggcattctgtggaatgaaatattcatatgtgctaaaaataaagattttatcagctcatgataaaggtactcatgttgaggtcaatgtgaagattaaaaaggtcttaaaatctaccaaactgaagattttccgaggaaagcgaacattatatccagaatcatggacggacagaggatgcacttgtccaatcctcaatcctggtttggaataccttgtagcaggacatgaggatataagaacaggcaaactaattgtgaatatgaaaagctttgtccagcactggaaaccttctcttggaagaaaagtcatggatattttaaaaagagagtgcaagtagcattaagatggatagcacataatggcacttgtctatgtacaaaacacaaactttagagcaagaagacctcagacaggaaactggaattttttaaagtgccaaaacatatagaaatgtttgaatgcatgggtcttatctaatttatctcttctggacccatgtttaaatacagttttatttcatgaagagaaatgaaaacccctacactgatatctgttttctatgggactgattctgaaattcttaactattaagaatattttaatagcagcatgacatttagcagtaatccattaagggcagtacctctaacaaggacgccttccagcttcagctatgttacttacgtttgatgctacttaaagtaatgaatgacgttttaaggaatccctaaccctactatcagaaaaggtgtttgttaaagagccttctcttgtgtgttacgcatgaactttggtctgtaggtgttaaatggaacctctccatgtgtatatagtatttccttgtataaagcactttactacctaccacttgtgttgtgaacgtttggtgactgctgttgaaagaaggaaaagggtgtgtgagaaagcctactgaagcagctgcacggccactacatgtggacaaaagtgaacatataaaagaagttgtgctatttaactctgaatacttggagaaactaggtgaagatgcaaccagaaaggagaatatgtatgcgtgaagtctcagctttgagckggaggctagaaagagcagccagagaactttttaaaaactaaccagaagagctttaaaataagagaaagaaatcataaatgtagacatatgcttggctaaaggggaaatggactttaaattttaaagagctcatttgcaatgcacttgtatacacttcaaaaattattgtagacacagaatttgttatatttttgtgcttagtatttaaacctgaacattgaaacagttttcctccttgtctttcttaacagtaatagtcattatatttacctgttttttaacacaatgtatgtgatagtcaaaaaatcacagtttttcattattattcatcttctgtacccacgcataaccactatacatagtttcttttgtacttgaatatacaaaacatgaacacagtgccatatgaataatttcacatacagaacctttttttctctgaagtcctgtggacttgcaaatatatatatatattgctttgttaatttgtttttatatttcatatatgtaataaaggaatatgatctgaaa

SEQ ID NO: 2847 - DNA, 1897 bp, Homo sapiens
gtagatagtcagatgtcttttgaaaatgtgttttcggtgtggaatattaacccaatctttgataactcttccagaaccttcggctcgcgtgcttctgagctgctgtggatggcctcggctctctggactgtccttccgagtaggatgtcactgagatccctcaaatggagcctcctgctgctgtcactcctgagtttctttgtgatgtggtacctcagccttccccactacaatgtgatagaacgcgtgaactggatgtacttctatgagtatgagccgatttacagacaagactttcacttcacacttcgagagcattcaaactgctctcatcaaaatccatttctggtcattctggtgacctcccacccttcagatgtgaaagccaggcaggccattagagttacttggggtgaaaaaaagtcttggtggggatatgaggttcttacatttttcttattaggccaagaggctgaaaaggaagacaaaatgttggcattgtccttagaggatgaacaccttctttatggtgacataatccgacaagattttttagacacatataataacctgaccttgaaaaccattatggcattcaggtgggtaactgagttttgccccaatgccaagtacgtaatgaagacagacactgatgttttcatcaatactggcaatttagtgaagtatcttttaaacctaaaccactcagagaagtttttcacaggttatcctctaattgataattattcctatagaggattttaccaaaaaacccatatttcttaccaggagtatcctttcaaggtgttccctccatactgcagtgggttgggttatataatgtccagagatttggtgccaaggatctatgaaatgatgggtcacgtaaaacccatcaagtttgaagatgtttatgtcgggatctgtttgaatttattaaaagtgaacattcatattccagaagacacaaatcttttctttctatatagaatccatttggatgtctgtcaactgagacgtgtgattgcagcccatggcttttcttccaaggagatcatcactttttggcaggtcatgctaaggaacaccacatgccattattaacttcacattctacaaaaagcctagaaggacaggatactttgtggaaagtgttaaataaagtaggtactgtggaaaattcatggggaggtcagtgtgctggcttacactgaactgaaactcatgaaaaacccagactggagactggagggttacacttgtgatttattagtcaggcccttcaaagatgatatgtggaggaattaaatataaaggaattggaggtttttgctaaagaaattaataggaccaaacaatttggacatgtcattctgtagactagaatttcttaaaagggtgttactgaattataagctcactaggctgtaaaaacaaaacaatgtagagttttatttattgaacaatgtagtcacttgaaggttttgtgtatatcttatgtggattaccaatttaaaaatatatgtagttctgtgtcaaaaaacttcttcactgaagttatactgaacaaaattttacctgtttttggtcatttataaagtacttcaagatgttgcagtatttcacagttattattatttaaaattacttcaactttgtgtttttaaatgttttgacgatttcaatacaagataaaaaggatagtgaatcattctttacatgcaaacattttccagttacttaactgatcagtttattattgatacatcactccattaatgtaaagtcataggtcattattgcacatcagtaatctcttggactttgttaaatattttactgtggtaatatagagaagaattaaagcaaaaaaaaaaaaaaaaaaaaaaaaaaaaaa

SEQ ID NO: 2848 - DNA, 1358 bp, Homo sapiens
gcgacccggggcgtttgcagcggtgccgaggaagaggacgggaacggtgttacgattgcctgcgtttaggaggtggctgcgttgtgggaaaagctatcaaggaagaaattgccaaaccatgtctttttttctgttttcagagtagttcacaacagatctgagtgttttaattaagcatggaatacagaaaacaacaaaaaacttaagctttaatttcatctggaattccacagttttcttagctccctggacccggttgacctgttggctcttcccgctggctgctctatcacgtggtgctctccgactactcaccccgagtgtaaagaaccttcggctcgcgtgcttctgagctgctgtggatggcctcggctctctggactgtccttccgagtaggatgtcactgagatccctcaaatggagcctcctgctgctgtcactcctgagtttctttgtgatgtggtacctcagccttccccactacaatgtgatagaacgcgtgaactggatgtacttctatgagtatgagccgatttacagacaagactttcacttcacacttcgagagcattcaaactgctctcatcaaaatccatttctggtcattctggtgacctcccacccttcagatgtgaaagccaggcaggccattagagttacttggggtgaaaaaaagtcttggtggggatatgaggttcttacatttttcttattaggccaagaggctgaaaaggaagacaaaatgttggcattgtccttagaggatgaacaccttctttatggtgacataatccgacaagattttttagacacatataataacctgaccttgaaaaccattatggcattcaggtgggtaactgagttttgccccaatgccaagtacgtaatgaagacagacactgatgttttcatcaatactggcaatttagtgaagtatcttttaaacctaaaccactcagagaagtttttcacaggttatcctctaattgataattattcctatagaggattttaccaaaaaacccatatttcttaccaggagtatcctttcaaggtgttccctccatactgcagtgggttgggttatataatgtccagagatttggtgccaaggatctatgaaatgatgggtcacgtaaaacccatcaagtttgaagatgtttatgtcgggatctgtttgaatttattaaaagtgaacattcatattccagaagacacaaatcttttctttctatatagaatccatttggatgtctgtcaactgagacgtgtgattgcagcccatggcttttcttccaaggagatcatcactttttggcaggtcatgctaaggaacaccacatgccattattaa

SEQ ID NO: 2849 - DNA, 2094 bp, Homo sapiens
gatgcctgatctcatcaatctagcgggagagacaggataacctgtccgagagtatagcgccactatgactccgccggaaaaattactttaaaaatcgccaaaaattacttggagcaaagggcagtcggcggacgttcgccaaggctggccagtcggccgttttctcgacccggtgatggccgtcatctcgtgacaagaaacttaaggtcgacagaaaattcaggacccggagtcatgggtccctccggtgggtcgtggcaacagtcccccccgccaccgcccggcacccatctatctatattgtcttttgacgctgaagcgtggaggtgccccaggaaagagtttcccaagccctggctgccctcccccggcgcgctgggtcccggtgaggtctctaggtagggttttgacctgtagcagagaaccaattctggagaacagcctcacttctttgattgaatacttacataatgcattggaacatgacatgagattaaggtttaataatgatagaatgaagaccacaataaaagagacctctacttagctcagcaattcttacctttcttacctatttgatgaagatgtcttttgaaaggtgtactgcaaggaacaaaatgtttgtaaattctccttttaccaagaggtttcttttttaattgatgccaaagagttccaatattgaacatcttaagtctgttacttggattacggattgagtttggagcttactcagaggactacaggagagtatccaggaggtggataattactgtaccttcctcatggaaaaagttttatttaaagtgttatttctcattgaatactatcaaaaaggaaaaaaaaatgacctaaacttttgagatagatttggctctagtaagtatttagttatatcacttgcatatctgggagaagaaataagagactatcatcagtacattcccatctactaaaaaaatttattttacacatgtcaagggattacttataacttccattttattactaatagcttgaacccttttaatgaagacctaactcctccaccagaaatttaagtttatgttcttactttgtttacttataaaatacatctcaggtatttcggatgtcttttttttttctaagcctatatgaaatgaaaaatatattggcaaaataaatgtttaaaccttttacgttaaaattactttgaaagatgaaaagttagtgctgtttttgtctacgttatactgaaattaaatgtttataatttatattttgggtttatgtataaatcatggaatttatgcaaaaatatgagtagtacagattctcctctaattctgtaggactttgaataatgtgatatttttcttataattggacccttgtgttttgaagaaatgccaactgcttgaagaatctccttgttatttgtattatttgctatagggttagatgttgagaaattctgctgacaaaaaattttaagccagttttacactaaatgttcctcagtctgattaatttgttattggatgtattctgtatctttcttttgtaatttgtaacttttatccacttagcacgaatgattctattaaagaaaatcattaggaagtggtagaaactttaaatcgccccagagtttgcctgtttccatattttattaccttataatcttcgggagtgcttacacttatggagctaacattttcagagatacagcttcttatagtaacactaaaactttcttcctctttggactgaatacctataattataactatatggtagtttaagtttccttgtgattagtcaaaaataccattttagtatgaagcaatgaagtctattatttgttgtcccataattgagaaagcttaaatacaccttttattaagagtttgtaaattctagcttagtctacacagatttttatatcaatttgtttatatttttattaatgtcatttctggaagtgtgaaaatgttaatgttcaacaagcaacattaaaaatagatttgaaacatttatatatagagaggtacacatttatttactgtttaggtactgaagattatcacttaataaaaaatatatatccca

SEQ ID NO: 2850 - DNA, 7693 bp, Homo sapiens
atgccgccgctcctggcgcccctgctctgcctggcgctgctgcccgcgctcgccgcacgaggcccgcgatgctcccagcccggtgagacctgcctgaatggcgggaagtgtgaagcggccaatggcacggaggcctgcgtctgtggcggggccttcgtgggcccgcgatgccaggaccccaacccgtgcctcagcaccccctgcaagaacgccgggacatgccacgtggtggaccgcagaggcgtggcagactatgcctgcagctgtgccctgggcttctctgggcccctctgcctgacacccctggacaacgcctgcctcaccaacccctgccgcaacgggggcacctgcgacctgctcacgctgacggagtacaagtgccgctgcccgcccggctggtcagggaaatcgtgccagcaggctgacccgtgcgcctccaacccctgcgccaacggtggccagtgcctgcccttcgaggcctcctacatctgccactgcccacccagcttccatggccccacctgccggcaggatgtcaacgagtgtggccagaagcccaggctttgccgccacggaggcacctgccacaacgaggtcggctcctaccgctgcgtctgccgcgccacccacactggccccaactgcgagcggccctacgtgccctgcagcccctcgccctgccagaacgggggcacctgccgccccacgggcgacgtcacccacgagtgtgcctgcctgccaggcttcaccggccagaactgtgaggaaaatatcgacgattgtccaggaaacaactgcaagaacgggggtgcctgtgtggacggcgtgaacacctacaactgcccgtgcccgccagagtggacaggtcagtactgtaccgaggatgtggacgagtgccagctgatgccaaatgcctgccagaacggcgggacctgccacaacacccacggtggctacaactgcgtgtgtgtcaacggctggactggtgaggactgcagcgagaacattgatgactgtgccagcgccgcctgcttccacggcgccacctgccatgaccgtgtggcctccttttactgcgagtgtccccatggccgcacaggtctgctgtgccacctcaacgacgcatgcatcagcaacccctgtaacgagggctccaactgcgacaccaaccctgtcaatggcaaggccatctgcacctgcccctcggggtacacgggcccggcctgcagccaggacgtggatgagtgctcgctgggtgccaacccctgcgagcatgcgggcaagtgcatcaacacgctgggctccttcgagtgccagtgtctgcagggctacacgggcccccgatgcgagatcgacgtcaacgagtgcgtctcgaacccgtgccagaacgacgccacctgcctggaccagattggggagttccagtgcatgtgcatgcccggctacgagggtgtgcactgcgaggtcaacacagacgagtgtgccagcagcccctgcctgcacaatggccgctgcctggacaagatcaatgagttccagtgcgagtgccccacgggcttcactgggcatctgtgccagtacgatgtggacgagtgtgccagcaccccctgcaagaatggtgccaagtgcctggacggacccaacacttacacctgtgtgtgcacggaagggtacacggggacgcactgcgaggtggacatcgatgagtgcgaccccgacccctgccactacggctcctgcaaggacggcgtcgccaccttcacctgcctctgccgcccaggctacacgggccaccactgcgagaccaacatcaacgagtgctccagccagccctgccgcctacggggcacctgccaggacccggacaacgcctacctctgcttctgcctgaaggggaccacaggacccaactgcgagatcaacctggatgactgtgccagcagcccctgcgactcgggcacctgtctggacaagatcgatggctacgagtgtgcctgtgagccgggctacacagggagcatgtgtaacagcaacatcgatgagtgtgcgggcaacccctgccacaacgggggcacctgcgaggacggcatcaatggcttcacctgccgctgccccgagggctaccacgaccccacctgcctgtctgaggtcaatgagtgcaacagcaacccctgcgtccacggggcctgccgggacagcctcaacgggtacaagtgcgactgtgaccctgggtggagtgggaccaactgtgacatcaacaacaacgagtgtgaatccaacccttgtgtcaacggcggcacctgcaaagacatgaccagtggcatcgtgtgcacctgccgggagggcttcagcggtcccaactgccagaccaacatcaacgagtgtgcgtccaacccatgtctgaacaagggcacgtgtattgacgacgttgccgggtacaagtgcaactgcctgctgccctacacaggtgccacgtgtgaggtggtgctggccccgtgtgcccccagcccctgcagaaacggcggggagtgcaggcaatccgaggactatgagagcttctcctgtgtctgccccacggctggggccaaagggcagacctgtgaggtcgacatcaacgagtgcgttctgagcccgtgccggcacggcgcatcctgccagaacacccacggcgsstaccgctgccactgccaggccggctacagtgggcgcaactgcgagaccgacatcgacgactgccggcccaacccgtgtcacaacgggggctcctgcacagacggcatcaacacggccttctgcgactgcctgcccggcttccggggcactttctgtgaggaggacatcaacgagtgtgccagtgacccctgccgcaacggggccaactgcacggactgcgtggacagctacacgtgcacctgccccgcaggcttcagcgggatccactgtgagaacaacacgcctgactgcacagagagctcctgcttcaacggtggcacctgcgtggacggcatcaactcgttcacctgcctgtgtccacccggcttcacgggcagctactgccagcacgtagtcaatgagtgcgactcacgaccctgcctgctaggcggcacctgtcaggacggtcgcggtctccacaggtgcacctgcccccagggctacactggccccaactgccagaaccttgtgcactggtgtgactcctcgccctgcaagaacggcggcaaatgctggcagacccacacccagtaccgctgcgagtgccccagcggctggaccggcctttactgcgacgtgcccagcgtgtcctgtgaggtggctgcgcagcgacaaggtgttgacgttgcccgcctgtgccagcatggagggctctgtgtggacgcgggcaacacgcaccactgccgctgccaggcgggctacacaggcagctactgtgaggacctggtggacgagtgctcacccagcccctgccagaacggggccacctgcacggactacctgggcggctactcctgcaagtgcgtggccggctaccacggggtgaactgctctgaggagatcgacgagtgcctctcccacccctgccagaacgggggcacctgcctcgacctccccaacacctacaagtgctcctgcccacggggcactcagggtgtgcactgtgagatcaacgtggacgactgcaatccccccgttgaccccgtgtcccggagccccaagtgctttaacaacggcacctgcgtggaccaggtgggcggctacagctgcacctgcccgccgggcttcgtgggtgagcgctgtgagggggatgtcaacgagtgcctgtccaatccctgcgacgcccgtggcacccagaactgcgtgcagcgcgtcaatgacttccactgcgagtgccgtgctggtcacaccgggcgccgctgcgagtccgtcatcaatggctgcaaaggcaagccctgcaagaatgggggcacctgcgccgtggcctccaacaccgcccgcgggttcatctgcaagtgccctgcgggcttcgagggcgccacgtgtgagaatgacgctcgtacctgcggcagcctgcgctgcctcaacggcggcacatgcatctccggcccgcgcagccccacctgcctgtgcctgggccccttcacgggccccgaatgccagttcccggccagcagcccctgcctgggcggcaacccctgctacaaccaggggacctgtgagcccacatccgagagccccttctaccgttgcctgtgccccgccaaattcaacgggctcttgtgccacatcctggactacagcttcgggggtggggccgggcgcgacatccccccgccgctgatcgaggaggcgtgcgagctgcccgagtgccaggaggacgcgggcaacaaggtctgcagcctgcagtgcaacaaccacgcgtgcggctgggacggcggtgactgctccctcaacttcaatgacccctggaagaactgcacgcagtctctgcagtgctggaagtacttcagtgacggccactgtgacagccagtgcaactcagccggctgcctcttcgacggctttgactgccagcgtgcggaaggccagtgcaaccccctgtacgaccagtactgcaaggaccacttcagcgacgggcactgcgaccagggctgcaacagcgcggagtgcgagtgggacgggctggactgtgcggagcatgtacccgagaggctggcggccggcacgctggtggtggtggtgctgatgccgccggagcagctgcgcaacagctccttccacttcctgcgggagctcagccgcgtgctgcacaccaacgtggtcttcaagcgtgacgcacacggccagcagatgatcttcccctactacggccgcgaggaggagctgcgcaagcaccccatcaagcgtgccgccgagggctgggccgcacctgacgccctgctgggccaggtgaaggcctcgctgctccctggtggcagcgagggtgggcggcggcggagggagctggaccccatggacgtccgcggctccatcgtctacctggagattgacaaccggcagtgtgtgcaggcctcctcgcagtgcttccagagtgccaccgacgtggccgcattcctgggagcgctcgcctcgctgggcagcctcaacatcccctacaagatcgaggccgtgcagagtgagaccgtggagccgcccccgccggcgcagctgcacttcatgtacgtggcggcggccgcctttgtgcttctgttcttcgtgggctgcggggtgctgctgtcccgcaagcgccggcggcagcatggccagctctggttccctgagggcttcaaagtgtctgaggccagcaagaagaagcggcgggagcccctcggcgaggactccgtgggcctcaagcccctgaagaacgcttcagacggtgccctcatggacgacaaccagaatgagtggggggacgaggacctggagaccaagaagttccggttcgaggagcccgtggttctgcctgacctggacgaccagacagaccaccggcagtggactcagcagcacctggatgccgctgacctgcgcatgtctgccatggcccccacaccgccccagggtgaggttgacgccgactgcatggacgtcaatgtccgcgggcctgatggcttcaccccgctcatgatcgcctcctgcagcgggggcggcctggagacgggcaacagcgaggaagaggaggacgcgccggccgtcatctccgacttcatctaccagggcgccagcctgcacaaccagacagaccgcacgggcgagaccgccttgcacctggccgcccgctactcacgctctgatgccgccaagcgcctgctggaggccagcgcagatgccaacatccaggacaacatgggccgcaccccgctgcatgcggctgtgtctgccgacgcacaaggtgtcttccagatcctgatccggaaccgagccacagacctggatgcccgcatgcatgatggcacgacgccactgatcctggctgcccgcctggccgtggagggcatgctggaggacctcatcaactcacacgccgacgtcaacgccgtagatgacctgggcaagtccgccctgcactgggccgccgccgtgaacaatgtggatgccgcagttgtgctcctgaagaacggggctaacaaagatatgcagaacaacagggaggagacacccctgtttctggccgcccgggagggcagctacgagaccgccaaggtgctgctggaccactttgccaaccgggacatcacggatcatatggaccgcctgccgcgcgacatcgcacaggagcgcatgcatcacgacatcgtgaggctgctggacgagtacaacctggtgcgcagcccgcagctgcacggagccccgctggggggcacgcccaccctgtcgcccccgctctgctcgcccaacggctacctgggcagcctcaagcccggcgtgcagggcaagaaggtccgcaagcccagcagcaaaggcctggcctgtggaagcaaggaggccaaggacctcaaggcacggaggaagaagtcccaggatggcaagggctgcctgctggacagctccggcatgctctcgcccgtggactccctggagtcaccccatggctacctgtcagacgtggcctcgccgccactgctgccctccccgttccagcagtctccgtccgtgcccctcaaccacctgcctgggatgcccgacacccacctgggcatcgggcacctgaacgtggcggccaagcccgagatggcggcgctgggtgggggcggccggctggcctttgagactggcccacctcgtctctcccacctgcctgtggcctctggcaccagcaccgtcctgggctccagcagcggaggggccctgaatttcactgtgggcgggtccaccagtttgaatggtcaatgcgagtggctgtcccggctgcagagcggcatggtgccgaaccaatacaaccctctgcgggggagtgtggcaccaggccccctgagcacacaggccccctccctgcagcatggcatggtaggcccgctgcacagtagccttgctgccagcgccctgtcccagatgatgagctaccagggcctgcccagcacccggctggccacccagcctcacctggtgcagacccagcaggtgcagccacaaaacttacagatgcagcagcagaacctgcagccagcaaacatccagcagcagcaaagcctgcagccgccaccaccaccaccacagccgcaccttggcgtgagctcagcagccagcggccacctgggccggagcttcctgagtggagagccgagccaggcagacgtgcagccactgggccccagcagcctggcggtgcacactattctgccccaggagagccccgccctgcccacgtcgctgccatcctcgctggtcccacccgtgaccgcagcccagttcctgacgcccccctcgcagcacagctactcctcgcctgtggacaacacccccagccaccagctacaggtgcctgagcaccccttcctgaccccttcgccggagtcgcccgaccaatggtcgtcctcgtcgccgcactctaatgtgtctgactggtctgagggcgtgtcgtcgcccccgacctccatgcagtcccagatcgcgcgcatcccggaggcgttcaagtaatagctcgaggtgccagcagctc

SEQ ID NO: 2851 - DNA, 2249 bp, Homo sapiens
cccggatcggggaagtgaaagtgcctcggaggaggagggccggtccggcagtgcagccgcctcacaggtcggcggacgggccaggcgggcggcctcctgaaccgaaccgaatcggctcctcgggccgtcgtcctcccgcccctcctcgcccgccgccggagttttctttcggtttcttccaagattcctggccttccctcgacggagccgggcccagtgcgggggcgcagggcgcgggagctccacctcctcggctttccctgcgtccagaggctggcatggcgcgggccgagtactgagcgcacggtcggggcacagcagggccggtgggtgcagctggctcgcgcctcctctccggccgccgtctcctccggtccccggcgaaagccattgagacaccagctggacgtcacgcgccggagcatgtctgggagtcagagcgaggtggctccatccccgcagagtccgcggagccccgagatgggacgggacttgcggcccgggtcccgcgtgctcctgctcctgcttctgctcctgctggtgtacctgactcagccaggcaatggcaacgagggcagcgtcactggaagttgttattgtggtaaaagaatttcttccgactccccgccatcggttcagttcatgaatcgtctccggaaacacctgagagcttaccatcggtgtctatactacacgaggttccagctcctttcctggagcgtgtgtggaggcaacaaggacccatgggttcaggaattgatgagctgtcttgatctcaaagaatgtggacatgcttactcggggattgtggcccaccagaagcatttacttcctaccagccccccaacttctcaggcctcagagggggcatcttcagatatccacacccctgcccagatgctcctgtccaccttgcagtccactcagcgccccaccctcccagtaggatcactgtcctcggacaaagagctcactcgtcccaatgaaaccaccattcacactgcgggccacagtctggcagttgggcctgaggctggggagaaccagaagcagccggaaaaaaatgctggtcccacagccaggacatcagccacagtgccggtcctgtgcctcctggccatcatcttcatcctcaccgcagccctttcctatgtgctgtgcaagaggaggagggggcagtcaccgcagtcctctccagatctgccggttcattatatacctgtggcacctgactctaatacctgagccaagaatggaagcttgtgaggagacggactctatgttgcccaggctgttatggaactcctgagtcaagtgatcctcccaccttggcctctgaaggtgcgaggattataggcgtcacctaccacatccagcctacacgtatttgttaatatctaacataggactaaccagccactgccctctcttaggcccctcatttaaaaacggttatactataaaatctgcttttcacactgggtgataataacttggacaaattctatgtgtattttgttttgttttgctttgctttgttttgagacggagtctcgctctgtcatccaggctggagtgcagtggcatgatctcggctcactgcaacccccatctcccaggttcaagcgattctcctgcctcctcctaagtagctgggactacaggtgctcaccaccacacccggctaattttttgtatttttagtagagacggggtttcaccatgttgaccaggctggtctcgaactcctgacctggtgatctgcccacccaggcctcccaaagtgctgggattaaaggtgtgagccaccatgcctggccctatgtgtgttttttaactactaaaaattatttttgtaatgattgagtcttctttatggaaacaactggcctcagcccttgcgcccttactgtgattcctggcttcattttttgctgatggttccccctcgtcccaaatctctctcccagtacaccagttgttcctcccccacctcagccctctcctgcatcctcctgtacccgcaacgaaggcctgggctttcccaccctccctccttagcaggtgccgtgctgggacaccatacgggttggtttcacctcctcagtcccttgcctaccccagtgagagtctgatcttgtttttattgttattgcttttattattattgcttttattatcattaaaactctagttcttgttttgtctctcaaaaaaaaaaaaaaaaaaaaaaaaaaaaaaaaaaaaac

SEQ ID NO: 2852 - DNA, 2067 bp, Homo sapiens
cgctttttttttttttttttatgaataaattgtatgtgtttctagctgaaactactcaccaatatgcatgttaaattcaatcctctcttacctattctttgatataactccttgaagttttcccattctcctacatcatctcccccacccccactgagtcatttctataatacaaacatattatctttttattaaattaaaaatctacctgtacaccttgaatgacaatgctcggagctcccctgtggtcatcgacgcctccactgccattgatgcaccatccaacctgcgtttcctggccaccacacccaattccttgctggtatcatggcagccgccacgtgccaggattaccggctacatcatcaagtatgagaagcctgggtctcctcccagagaagtggtccctcggccccgccctggtgtcacagaggctactattactggcctggaaccgggaaccgaatatacaatttatgtcattgccctgaagaataatcagaagagcgagcccctgattggaaggaaaaagacaggacaagaagctctctctcagacaaccatctcatgggccccattccaggacacttctgagtacatcatttcatgtcatcctgttggcactgatgaagaacccttacagttcagggttcctggaacttctaccagtgccactctgacaggcctcaccagaggtgccacctacaacatcatagtggaggcactgaaagaccagcagaggcataaggttcgggaagaggttgttaccgtgggcaactctgtcaacgaaggcttgaaccaacctacggatgactcgtgctttgacccctacacagtttcccattatgccgttggagatgagtgggaacgaatgtctgaatcaggctttaaactgttgtgccagtgcttaggctttggaagtggtcatttcagatgtgattcatctagatggtgccatgacaatggtgtgaactacaagattggagagaagtgggaccgtcagggagaaaatggccagatgatgagctgcacatgtcttgggaacggaaaaggagaattcaagtgtgaccctcatgaggcaacgtgttatgatgatgggaagacataccacgtaggagaacagtggcagaaggaatatctcggtgccatttgctcctgcacatgctttggaggccagcggggctggcgctgtgacaactgccgcagacctgggggtgaacccagtcccgaaggcactactggccagtcctacaaccagtattctcagagataccatcagagaacaaacactaatgttaattgcccaattgagtgcttcatgcctttagatgtacaggctgacagagaagattcccgagagtaaatcatctttccaatccagaggaacaagcatgtctctctgccaagatccatctaaactggagtgatgttagcagacccagcttagagttcttctttctttcttaagccctttgctctggaggaagttctccagcttcagctcaactcacagcttctccaagcatcaccctgggagtttcctgagggttttctcataaatgagggctgcacattgcctgttctgcttcgaagtattcaataccgctcagtattttaaatgaagtgattctaagatttggtttgggatcaataggaaagcatatgcagccaaccaagatgcaaatgttttgaaatgatatgaccaaaattttaagtaggaaagtcacccaaacacttctgctttcacttaagtgtctggcccgcaatactgtaggaacaagcatgatcttgttactgtgatattttaaatatccacagtactcactttttccaaatgatcctagtaattgcctagaaatatctttctcttacctgttatttatcaatttttcccagtatttttatacggaaaaaattgtattgaaaacacttagtatgcagttgataagaggaatttggtataattatggtgggtgattattttttatactgtatgtgccaaagctttactactgtggaaagacaactgttttaataaaagatttacattccaaaaaaaaaaaaaaa

SEQ ID NO: 2853 - DNA, 699 bp, Homo sapiens; identical to SEQ ID NO: 1478

SEQ ID NO: 2854 - DNA, 1727 bp, Homo sapiens
gcaatggccacctttagccgccaggaatttttccagcagctactgcaaggctgtctcctgcctactgcccagcagggccttgaccagatctggctgctccttgccatctgcctcgcctgccgcctcctctggaggctcgggttgccatcctacctgaagcatgcaagcaccgtggcaggcgggttcttcagcctctaccacttcttccagctgcacatggtttgggtcgtgctgctcagcctcctgtgctacctcgtgctgttcctctgccgacattcctcccatcgaggcgtcttcctatccgtcaccatcctcatctacctactcatgggtgagatgcacatggtagacaccgtgacatggcacaagatgcgaggggcacagatgattgtggccatgaaggcagtgtctctgggcttcgacctggaccggggcgaggtgggtacggtgccctcgccagtggagttcatgggctacctctacttcgtgggcaccatcgtcttcgggccctggatatccttccacagctacctacaaactgtccaaggccgcccactgagctgccggtggctgcagaaggtggcccggagcctggcactggccctgctgtgccttgtgctgtccacttgcgtgggcccctacctcttcccgtacttcatccccctcaacggtgaccgcctccttcgcaacaagaaacgcaaagccaggggcaccatggtaaggtggctgcgagcctacgagagtgctgtctccttccacttcagcaactattttgtgggctttctttccgaggccacggccacgttggcgggggctggctttaccgaggagaaggatcacctggaatgggacctgacggtgtccaagccactgaatgtggagctgcctcggtcaatggtggaagttgtcacaagctggaacctgcccatgtcttattggctaaataactatgttttcaagaatgctctccgcctggggaccttctcggctgtgctggtcacctatgcagccagcgccctcctacatggcttcagtttccacctggctgcggtcctgctgtccctggcttttatcacttacgtggagcatgtcctccggaagcgcctggctcggatcctcagtgcctgtgtcttgtcaaagcggtgcccgccagactgttcgcaccagcatcgcttgggcctgggggtgcgagccttaaacttgctctttggagctctggccatcttccacctggcctacctgggctccctgtttgatgtcgatgtggatgacaccacagaggagcagggctacggcatggcatacactgtccacaagtggtcagagctcagctgggccagtcactgggtcacttttggatgctggatcttctaccgtctcataggctgaggcacatctgtggaccctcataaccctcttaagacccctctcagggtgccactgatgggggatgagggaaggccctctctctactccttgaccccctccatccttgacccccaacacctcaacacacacacacacacacacacacaaaatcacaccattttcatgcctgtcaatccccaccccaccacaaggcaggaagggggtggtgcctgctggggcctagagggggatgcttggggaaacagagaaggggagatccagggcctccccgccttccttcttcctttttatatacaatttgttattgtcaaataaaagtaggaaatattcaataggct

SEQ ID NO: 2855 - DNA, 1712 bp, Homo sapiens
gcaatggccacctttagccgccaggaatttttccagcagctactgcaaggctgtctcctgcctactgcccagcagggccttgaccagatctggctgctccttgccatctgcctcgcctgccgcctcctctggaggctcgggttgccatcctacctgaagcatgcaagcaccgtggcaggcgggttcttcagcctctaccacttcttccagctgcacatggtttgggtcgtgctgctcagcctcctgtgctacctcgtgctgttcctctgccgacattcctcccatcgaggcgtcttcctatccgtcaccatcctcatctacctactcatgggtgagatgcacatggtagacaccgtgacatggcacaagatgcgaggggcacagatgattgtggccatgaaggcagtgtctctgggcttcgacctggaccggggcgaggtgggtacggtgccctcgccagtggagttcatgggctacctctacttcgtgggcaccatcgtcttcgggccctggatatccttccacagctacctacaagctgtccaaggccgcccactgagctgccggtggctgcagaaggtggcccggagcctggcactggccctgctgtgccttgtgctgtccacttgcgtgggcccctacctcttcccgtacttcatccccctcaacggtgaccgcctccttcgcaacaagaaacgcaaagccaggtggctgcgagcctacgagagtgctgtctccttccacttcagcaactattttgtgggctttctttccgaggccacggccacgttggcgggggctggctttaccgaggagaaggatcacctggaatgggacctgacggtgtccaagccactgaatgtggagctgcctcggtcaatggtggaagttgtcacaagctggaacctgcccatgtcttattggctaaataactatgttttcaagaatgctctccgcctggggaccttctcggctgtgctggtcacctatgcagccagcgccctcctacatggcttcagtttccacctggctgcggtcctgctgtccctggcttttatcacttacgtggagcatgtcctccggaagcgcctggctcggatcctcagtgcctgtgtcttgtcaaagcggtgcccgccagactgttcgcaccagcatcgcttgggcctgggggtgcgagccttaaacttgctctttggagctctggccatcttccacctggcctacctgggctccctgtttgatgtcgatgtggatgacaccacagaggagcagggctacggcatggcatacactgtccacaagtggtcagagctcagctgggccagtcactgggtcacttttggatgctggatcttctaccgtctcataggctgaggcacatctgtggaccctcataaccctcttaagacccctctcagggtgccactgatgggggatgagggaaggccctctctctactccttgaccccctccatccttgacccccaacacctcaacacacacacacacacacacacacaaaatcacaccattttcatgcctgtcaatccccaccccaccacaaggcaggaagggggtggtgcctgctggggcctagagggggatgcttggggaaacagagaaggggagatccagggcctccccgccttccttcttcctttttatatacaatttgttattgtcaaataaaagtaggaaatattcaataggct

SEQ ID NO: 2856 - DNA, 1709 bp, Homo sapiens
gcaatggccacctttagccgccaggaatttttccagcagctactgcaaggctgtctcctgcctactgcccagcagggccttgaccagatctggctgctccttgccatctgcctcgcctgccgcctcctctggaggctcgggttgccatcctacctgaagcatgcaagcaccgtggcaggcgggttcttcagcctctaccacttcttccagctgcacatggtttgggtcgtgctgctcagcctcctgtgctacctcgtgctgttcctctgccgacattcctcccatcgaggcgtcttcctatccgtcaccatcctcatctacctactcatgggtgagatgcacatggtagacaccgtgacatggcacaagatgcgaggggcacagatgattgtggccatgaaggcagtgtctctgggcttcgacctggaccggggcgaggtgggtacggtgccctcgccagtggagttcatgggctacctctacttcgtgggcaccatcgtcttcgggccctggatatccttccacagctacctacaaactgtccaaggccgcccactgagctgccggtggctgcagaaggtggcccggagcctggcactggccctgctgtgccttgtgctgtccacttgcgtgggcccctacctcttcccgtacttcatccccctcaacggtgaccgcctccttcgcaagggcaccatggtaaggtggctgcgagcctacgagagtgctgtctccttccacttcagcaactattttgtgggctttctttccgaggccacggccacgttggcgggggctggctttaccgaggagaaggatcacctggaatgggacctgacggtgtccaagccactgaatgtggagctgcctcggtcaatggtggaagttgtcacaagctggaacctgcccatgtcttattggctaaataactatgttttcaagaatgctctccgcctggggaccttctcggctgtgctggtcacctatgcagccagcgccctcctacatggcttcagtttccacctggctgcggtcctgctgtccctggcttttatcacttacgtggagcatgtcctccggaagcgcctggctcggatcctcagtgcctgtgtcttgtcaaagcggtgcccgccagactgttcgcaccagcatcgcttgggcctgggggtgcgagccttaaacttgctctttggagctctggccatcttccacctggcctacctgggctccctgtttgatgtcgatgtggatgacaccacagaggagcagggctacggcatggcatacactgtccacaagtggtcagagctcagctgggccagtcactgggtcacttttggatgctggatcttctaccgtctcataggctgaggcacatctgtggaccctcataaccctcttaagacccctctcagggtgccactgatgggggatgagggaaggccctctctctactccttgaccccctccatccttgacccccaacacctcaacacacacacacacacacacacacaaaatcacaccattttcatgcctgtcaatccccaccccaccacaaggcaggaagggggtggtgcctgctggggcctagagggggatgcttggggaaacagagaaggggagatccagggcctccccgccttccttcttcctttttatatacaatttgttattgtcaaataaaagtaggaaatattcaataggct

SEQ ID NO: 2857 - DNA, 1694 bp, Homo sapiens
gcaatggccacctttagccgccaggaatttttccagcagctactgcaaggctgtctcctgcctactgcccagcagggccttgaccagatctggctgctccttgccatctgcctcgcctgccgcctcccctggaggctcgggttgccatcctacctgaagcatgcaagcaccgtggcaggcgggttcttcagcctctaccacttcttccagctgcacatggtttgggtcgtgctgctcagcctcctgtgctacctcgtgctgttcctctgccgacattcctcccatcgaggcgtcttcctatccgtcaccatcctcatctacctactcatgggtgagatgcacatggtagacaccgtgacatggcacaagatgcgaggggcacagatgattgtggccatgaaggcagtgtctctgggcttcgacctggaccggggcgaggtgggtacggtgccctcgccagtggagttcatgggctacctctacttcgtgggcaccatcgtcttcgggccctggatatccttccacagctacctacaagctgtccaaggccgcccactgagctgccggtggctgcagaaggtggcccggagcctggcactggccctgctgtgccttgtgctgtccacttgcgtgggcccctacctcttcccgtacttcatccccctcaacggtgaccgcctccttcgcaagtggctgcgagcctacgagagtgctgtctccttccacttcagcaactattttgtgggctttctttccgaggccacggccacgttggcgggggctggctttaccgaggagaaggatcacctggaatgggacctgacggtgtccaagccactgaatgtggagctgcctcggtcaatggtggaagttgtcacaagctggaacctgcccatgtcttattggctaaataactatgttttcaagaatgctctccgcctggggaccttctcggctgtgctggtcacctatgcagccagcgccctcctacatggcttcagtttccacctggctgcggtcctgctgtccctggcttttatcacttacgtggagcatgtcctccggaagcgcctggctcggatcctcagtgcctgtgtcttgtcaaagcggtgcccgccagactgttcgcaccagcatcgcttgggcctgggggtgcgagccttaaacttgctctttggagctctggccatcttccacctggcctacctgggctccctgtttgatgtcgatgtggatgacaccacagaggagcagggctacggcatggcatacactgtccacaagtggtcagagctcagctgggccagtcactgggtcacttttggatgctggatcttctaccgtctcataggctgaggcacatctgtggaccctcataaccctcttaagacccctctcagggtgccactgatgggggatgagggaaggccctctctctactccttgaccccctccatccttgacccccaacacctcaacacacacacacacacacacacacaaaatcacaccattttcatgcctgtcaatccccaccccaccacaaggcaggaagggggtggtgcctgctggggcctagagggggatgcttggggaaacagagaaggggagatccagggcctccccgccttccttcttcctttttatatacaatttgttattgtcaaataaaagtaggaaatattcaataggct

SEQ ID NO: 2858 - DNA, 2210 bp, Homo sapiens
aattccctaccctcgacctgtcgatgccccgcggccccgcccgccctcttaagcctggctcagccctcagggcccgcccgaagtctaccgagcccgagtggcctaccgagcccgagtggccccgcagcgtccaggaggcgcccgctccgcggtggcgctcttggaggtggtgtcggagagccgccgagcgtgcggtcccgggatggctctaccccggccaagtgaggccgtgcctcaggacaaggtgtgctacccgccggagagcagcccgcagaacctggccgcgtactacacgcctttcccgtcctatggacactacagaaacagcctggccaccgtggaggaagacttccaacctttccggcagctggaggccgcagcgtctgctgcccccgccatgccccccttccccttccggatggcgcctcccttgctgagcccgggtctgggcctacagagggagcctctctacgatctgccctggtacagcaagctgccaccgtggtacccaattccccacgtccccagggaagtgccgcccttcctgagcagcagccacgagtacgcgggtgccagcagtgaagatctgggccaccaaatcattggtggcgacaacgagagtggcccgtgttgtggacctgacactttaattccaccgccccctgcggatgcttctctgttacctgaggggctgaggacctcccagttattaccttgctcacccagcaagcagtcagaggatggtcccaaaccctccaaccaagaagggaagtcccctgctcggttccagttcacggaggaggacctgcacttcgttctgtacggggtcactcccagcctggagcacccagccagcctgcaccatgcgatttcaggcctcctggtccccccagacagctctggatctgattctcttcctcaaactctggataaagactcccttcaacttccagaaggtctatgcctcatgcagacggtgtttggtgaagtcccacattttggtgtgttctgcagtagttttatcgccaaaggagtcaggtttgggccctttcaaggtaaagtggtcaatgccagtgaagtgaagacctacggagacaattctgtgatgtgggagatctttgaagatggtcatttgagccactttatagatggaaaaggaggtacggggaactggatgtcctatgtcaactgtgcccgcttccccaaggagcagaacctagttgctgtgcagtgtcaagggcatatattttatgagagctgcaaagagatccatcagaaccaagagctccttgtgtggtatggagactgctatgagaaatttctggatattcctgtgagccttcaggtcacagagccggggaagcagccatctgggccctctgaagagtctgcagaaggctacagatgtgaaagatgtgggaaggtatttacctacaaatattacagagataagcacctcaagtacaccccctgtgtggacaagggcgataggaaatttccctgttctctctgcaaacgatcctttgagaagcgggaccggcttcggatccacattcttcatgttcatgagaagcaccggcctcacaagtgttctacatgtgggaaatgtttctctcagtcttccagcctaaacaaacacatgcgagtccactctggagacagaccataccagtgtgtgtattgtactaagaggttcacagcctccagcatactccgcacacacatcaggcagcactccggggagaagcccttcaaatgcaagtactgtggtaaatcttttgcatcccatgctgcccatgacagccatgtccggcgttcacacaaggaggatgatggctgctcatgcagcatctgtgggaaaatcttctcagatcaagaaacattctactcccacatgaagtttcatgaagactactagccctgccaggcacaatgactcacgcctgtaatcccagcactttgggaggcagaggtgggtggatcactcaagtccaggagttcgagaccagcctgggcaacatggtgaaatcctgtctctaccaaaaaaatacaaaaatcagctgggggtggtggcacatgcctgtggttccagccactcaggaggtcgaggtggcgggatggtttgagcacaggagacggaggttgctgtgagctgagatcgccccactgcttttcaacctgggtgacagaaccagaccctgtctcaaaac

SEQ ID NO: 2859 - DNA, 1008 bp, Homo sapiens; identical to SEQ ID NO: 1789

SEQ ID NO: 2860 - DNA, 1877 bp, Homo sapiens
ttgaaaagggtatcattcatgtggtttcagtttagaagagtccctcagagctttgcctcaagcaatttcaaattgtagtgataccctaaatcatgtattcaggatgccttctttagcatttagaaccccaactagacttatactttgactaaagtcagaggcagaccaatttagggaacagattttgttctttgcttttatgatacatttgtaactcacagctgttagcatgacctcacatcactgcgtaggacccggaaatcacatctcctggtcaggtcacgagaaagaacacaggcttgactattgtccagaagttactttccccttgactaaaggtttccccttagggtacacattgctatttaactttgcctcctacccttttttgttaccttccaaaatcaagacacttttaagaaacaaagatagttttctgaacattctgtgtcctgcctgtctcctgttgattcgcagatgtaatatcgagtattcatcaactggtctcaatttcctgaacacattcactgtatccctcattgtaaccgttatccccctgcttcaaaatgtgccagttccacttggtaataacgttgggaaaatgcaggtttatgaatgatgtggacttttagaggatcaaatcaataaattggattttttattttttgagggcagctgcctcactgttttaaataaagaatcttacataagaatgttgacaacattcacagtaagccattggcagaaaattgatctgcatgtcctagaccaatgattacaaggtgtctgtgggtctgtggtttagggggcccagcctatcattccttttccccttggcactcatgagagagatgccaagttcagtgtggatttttcttggtgctctatggagaaatggagtctgtgtgcttactgaagagtcccaaaaaccagagaccattttcatttactgccatcataaatattctccaccattcaagatgcctgtgtacacggctatttgggaaacttaagtgttggaggaggcaggggctgaaggtgtcaaaacctcctcagtaggataacccctttctcccctttggaccatctgccatctttcatgagtgtttcccatggtgtttttgcatccagagttgacagcaactcaattttgccttgaatttactcagtcttataaattaaaaatgtgcattttatataaagatgcattttatataaaaatgcacacctttaatctctatatggcagcatatacatatatatatatatataaaatgcacacttttaatctctatatggcagcatttttgaggctttatatctgcccgtgtaccctcaactgcctcttttttgcagagaacgatccccacaggaactggtctaagaacactgtctgcacatgattgatgcttaaaatccaatataccaccacatatcaaaggttgggattttcagagtccttcttgatttctgagctgaaaccttaacaaatagggaatttggcagggaagacacctgggtttttaattcagaaccctatttatatactgttaaaatttgaggtactatagtttatataaaagtcggatgttaagatattatatttcagtactaggagcttctttgcagtcattaacatgacaaattaagtaataaatataaaagtgattgtccataaattatcattgaattttttgtttattttgtagtgttctgtatttatctgcactttgtgtatatatacacacatacatatgccaacatgtaaataacctcatgtttattcctaatctaaattgccacaatatttttaatgtatggttacactgtgttttaaattactttaaaaataaactttgtaagcagaaaaaaaaaaa

SEQ ID NO: 2861 - DNA, 3758 bp, Homo sapiens
gcgtgtgctggggcgagcgggagcgggcgaggatgggcacaggatagaggcagagccacccacgccgccgcggccccacgctgggcgacagagcctccagttccccttcaatggtggcgggtcgccggagctctgatcgccgggaacccttgccgctgctgtcctgcgaccccaagcaggtatagacacgtgtggccgtttacgctgtaggatcctcattcccactggctttgaacattttggggacttacaatgccgccacccgcggacatcgtcaaggtggccatagaatggccgggcgcctaccccaaactcatggaaattgatcagaaaaaaccactgtctgcaataataaaggaagtctgtgatgggtggtctcttgccaaccatgaatattttgcactccagcatgccgatagttcaaacttctatatcacagaaaagaaccgcaatgagataaaaaatggcactatccttcgattaaccacatctccagctcagaacgcccagcagctccatgaacgaatccagtcctcgagtatggatgccaagctggaagccctgaaggacttggccagcctctcccgggatgtcacgtttgcccaggagtttataaacctggacggtatctctctcctcacgcagatggtggagagcggcactgagcgataccagaaattgcagaagatcatgaagccttgctttggagacatgctgtccttcaccctgacggccttcgttgagctgatggaccatggcatagtgtcctgggatacattttcggtggcgttcattaagaagatagcaagttttgtgaacaagtcagccatagacatctcgatcctgcagcggtccttggccattttggagtcgatggtgctcaatagccatgacctctaccagaaagtggcgcaggagatcaccatcggccagctcattccacacctgcaagggtcagatcaagaaatccaaacctatactattgcagtgattaatgcgcttttcctgaaggctcctgatgagaggaggcaggagatggcgaatattttggctcagaagcaactgcgttccatcattttaacacatgtcatccgagcccagcgggccatcaacaatgagatggcgcaccagctgtatgttctacaagtgctcacctttaacctcctggaagacaggatgatgaccaaaatggacccccaggaccaggctcagagggacatcatatttgaacttcgaagaattgcttttgatgctgagtctgaacctaacaacagcagtggcagcatggagaaacgcaagtccatgtacacgcgagattataagaagcttgggttcattaatcatgtcaaccctgccatggacttcacgcagactccacctgggatgttggctctggacaacatgctgtactttgccaagcaccaccaagatgcctacatccggattgtgcttgagaacagtagtcgagaagacaagcatgaatgtccctttggccgcagtagtatagagctgaccaagatgctatgtgagatcttgaaagtgggcgagttgcctagtgagacctgcaacgacttccacccgatgttcttcacccacgacagatcctttgaggagtttttctgcatctgtatccagctcctgaacaagacatggaaggaaatgagggcaacttctgaagacttcaacaaggtaatgcaggtggtgaaggagcaggttatgagagcacttacaaccaagcctagctccctggaccagttcaagagcaaactgcagaacctgagctacactgagatcctgaaaatccgccagtccgagaggatgaaccaggaagatttccagtcccgcccgattttggaactaaaggagaagattcagccagaaatcttagagctgatcaaacagcaacgcctgaaccgccttgtggaagggacctgctttaggaaactcaatgcccggcggaggcaagacaagttttggtattgtcggctttcgccaaatcacaaagtcctgcattacggagacttagaagagagtcctcagggagaagtgccccacgattccttgcaggacaaactgccggtggcagatatcaaagccgtggtgacgggaaaggactgccctcatatgaaagagaaaggtgcccttaaacaaaacaaggaggtgcttgaactcgctttctccatcttgtatgactcaaactgccaactgaacttcatcgctcctgacaagcatgagtactgtatctggacagatggactgaatgcgctactcgggaaggacatgatgagcgacctgacgcggaatgacctggacaccctgctcagcatggaaatcaagctccgcctcctggacctggaaaacatccagatccctgacgcacctccgccgattcccaaggcgcccagcaactatgacttcgtctatgactgtaactgaagtggccgggcccagacatgccccttccaaaactggaacacctagctaacaggagagaggaatgaaaacacacccacgccttggaaccgtcctttggtaaagggaagctgtgggtccacattcccttcagcatcacctctagccctggcaactttcagcccctagctggcatcttgctcaccgccctgattctgttcctcggctccactgcttcaggtcacttcccatggctgcagtccactggtgggacaagagcaaagcccactgccagtaagaaggccaaagggcccttccatcctagccctctgcaggcatgcccttccttcccttgggcaggaaagccagcagccccagactgcccaaaaacttgcccaccagaccaagggcagtgccccaaggcccctgtctggaggaaatggcctagctatttgatgagaagaccaaaccccacatcctcctttcccctctctctagaatcatctcgcaccaccagttacacttgaattaagatctgcgctcaaatctcctcccacctctctccctgcttttgccttgctctgttcctctttggtcccaagagcagcagccgcagcctcctcgtgatcctccctagcataaatttcccaaacagtccacaggtcccatgcccactttgcgtctgcactgtgatcgtgacaaatcttccctcctcaccagctagtctggggtttcctctccctgccccaggccagaactgccttcttcatttccacccacgctcccagcctcttagctgaaagcacaaatggtgaaatcagtagtctcgctccatctctaatagactaaacctaaatgcctctaggacggactgttgctatccaagcgtttggtgttaccttctcctgggaggtcctgctgcaactcaagttccacaggatggtcaagctgtcagacatccaagtttacatcattgtaattattactggtatttacaatttgcaagagttttgggttagtttttttttttttttttgctttgtttttgtacaaaagagtctaacattttttgccaaacagatatatatttaatgaaaagaagagatacataaatgtgtgaatttccagtttttttttaattattttaatcccaaacatcttcctgaaaataacattcccttaaacatgctgtggaataaaatggattgtgatgaaaaaaaaaaaaaaaaaaaaaaaaaaaaaaaaaaaaaaaaaaaaaaaaaaaaaaaaaaaaaaaaaaaaaaaaaaaaaaaaaaaaaaaaaaaaaaaaaaaaaaaaaaaaaaaaaaaaaaaaaaaaaaaaaaaaa

SEQ ID NO: 2862 - DNA, 3079 bp, Homo sapiens
tagcccggcgctctcgccggccacacggagcggcgcccgggagctatgagccatgaagccgcccggcagcagctcgcggcagccgcccctggcgggctgcagccttgccggcgcttcctgcggcccccaacgcggccccgccggctcggtgcctgccagcgccccggcccgcacgccgccctgccgcctgcttctcgtccttctcctgctgcctccgctcgccgcctcgtcccggccccgcgcctggggggctgctgcgcccagcgctccgcattggaatgaaactgcagaaaaaaatttgggagtcctggcagatgaagacaatacattgcaacagaatagcagcagtaatatcagttacagcaatgcaatgcagaaagaaatcacactgccttcaagactcatatattacatcaaccaagactcggaaagcccttatcacgttcttgacacaaaggcaagacaccagcaaaaacataataaggctgtccatctggcccaggcaagcttccagattgaagccttcggctccaaattcattcttgacctcatactgaacaatggtttgttgtcttctgattatgtggagattcactacgaaaatgggaaaccacagtactctaagggtggagagcactgttactaccatggaagcatcagaggcgtcaaagactccaaggtggctctgtcaacctgcaatggacttcatggcatgtttgaagatgataccttcgtgtatatgatagagccactagagctggttcatgatgagaaaagcacaggtcgaccacatataatccagaaaaccttggcaggacagtattctaagcaaatgaagaatctcactatggaaagaggtgaccagtggccctttctctctgaattacagtggttgaaaagaaggaagagagcagtgaatccatcacgtggtatatttgaagaaatgaaatatttggaacttatgattgttaatgatcacaaaacgtataagaagcatcgctcttctcatgcacataccaacaactttgcaaagtccgtggtcaaccttgtggattctatttacaaggagcagctcaacaccagggttgtcctggtggctgtagagacctggactgagaaggatcagattgacatcaccaccaaccctgtgcagatgctccatgagttctcaaaataccggcagcgcattaagcagcatgctgatgctgtgcacctcatctcgcgggtgacatttcactataagagaagcagtctgagttactttggaggtgtctgttctcgcacaagaggagttggtgtgaatgagtatggtcttccaatggcagtggcacaagtattatcgcagagcctggctcaaaaccttggaatccaatgggaaccttctagcagaaagccaaaatgtgactgcacagaatcctggggtggctgcatcatggaggaaacaggggtgtcccattctcgaaaattttcaaagtgcagcattttggagtatagagactttttacagagaggaggtggagcctgccttttcaacaggccaacaaagctatttgagcccacggaatgtggaaatggatacgtggaagctggggaggagtgtgattgtggttttcatgtggaatgctatggattatgctgtaagaaatgttccctctccaacggggctcactgcagcgacgggccctgctgtaacaatacctcatgtctttttcagccacgagggtatgaatgccgggatgctgtgaacgagtgtgatattactgaatattgtactggagactctggtcagtgcccaccaaatcttcataagcaagacggatatgcatgcaatcaaaatcagggccgctgctacaatggcgagtgcaagaccagagacaaccagtgtcagtacatctggggaacaaaggctgcagggtctgacaagttctgctatgaaaagctgaatacagaaggcactgagaagggaaactgcgggaaggatggagaccggtggattcagtgcagcaaacatgatgtgttctgtggattcttactctgtaccaatcttactcgagctccacgtattggtcaacttcagggtgagatcattccaacttccttctaccatcaaggccgggtgattgactgcagtggtgcccatgtagttttagatgatgatacggatgtgggctatgtagaagatggaacgccatgtggcccgtctatgatgtgtttagatcggaagtgcctacaaattcaagccctaaatatgagcagctgtccactcgattccaagggtaaagtctgttcgggccatggggtgtgtagtaatgaagccacctgcatttgtgatttcacctgggcagggacagattgcagtatccgggatccagttaggaaccttcacccccccaaggatgaaggacccaagggtcctagtgccaccaatctcataataggctccatcgctggtgccatcctggtagcagctattgtccttgggggcacaggctggggatttaaaaatgtcaagaagagaaggttcgatcctactcagcaaggccccatctgaatcagctgcgctggatggacaccgccttgcactgttggattctgggtatgacatactcgcagcagtgttactggaactattaagtttgtaaacaaaacctttgggtggtaatgactacggagctaaagttggggtgacaaggatggggtaaaagaaaactgtctcttttggaaataatgtcaaagaacacctttcaccacctgtcagtaaacgggggagggggcaaaagaccatgctataaaaagaactgttccagaatcttttttttccctaatggacgaaggaacaacacacacacaaaaattaaatgcaataaaggaatcattaaaaaaaatagtaaatgattttttttccctcagcctgctggcacttaatatcttctaaatgatttggcatgatttttttttctttactaccgatgacaaactccagtggcatgaagatctaattttcaaaagggtaaaaactgcatggcatatatacaacaagctagcaagccaattctcagcaaaacctgcaacagaattc

SEQ ID NO: 2863 - DNA, 5115 bp, Homo sapiens
gaattccgggagcgggcgggctgcgaggccgcggggcatgcgggaggcggaggggtgggaccgggtggctgcgcccattccacacccgccgaaagcggacactgtcagctgaatcactccccttttaggaggagggagggggaaaaggtgtctagctaatttctgcttaaaaaagcacaggagatcgcgggtcagctttgcagtcgctgccttctcgcgcctgaccatgcacccctgcatcttcctgctgggcacaggcgagcgctttatttctggagctgagggctaaaacttttttcacttttcttctcctcaacatctgaatcatgccatgtgcccagaggagctggcttgcaaacctttccgtggtggctcagctccttaactttggggcgctttgctatgggagacagcctcagccaggcccggttcgcttcccggacaggaggcaagagcattttatcaagggcctgccagaataccacgtggtgggtccagtccgagtagatgccagtgggcattttttgtcatatggcttgcactatcccatcacgagcagcaggaggaagagagatttggatggctcagaggactgggtgtactacagaatttctcacgaggagaaggacctgttttttaacttgacggtcaatcaaggatttctttccaatagctacatcatggagaagagatatgggaacctctcccatgttaagatgatggcttcctctgcccccctctgccatctcagtggcacggttctacagcagggcaccagagttgggacggcagccctcagtgcctgccatggactgactggatttttccaactaccacatggagactttttcattgaacccgtgaagaagcatccactggttgagggagggtaccacccgcacatcgtttacaggaggcagaaagttccagaaaccaaggagccaacctgtggattaaaggacagtgttaacatctcccagaagcaagagctatggcgggagaagtgggagaggcacaacttgccaagcagaagcctctctcggcgttccatcagcaaggagagatgggtggagacactggtggtggccgacacaaagatgattgaataccatgggagtgagaatgtggagtcctacatcctcaccatcatgaacatggtcactgggttgttccataacccaagcattggcaatgcaattcacattgttgtggttcggctcattctactcgaagaagaagagcaaggactgaaaatagttcaccatgcagaaaagacactgtctagcttctgcaagtggcagaagagtatcaatcccaagagtgacctcaatcctgttcatcacgacgtggctgtccttctcaccagaaaggacatctgtgctggtttcaatcgcccctgcgagaccctgggcctgtctcacctttcaggaatgtgtcagcctcaccgcagttgtaacatcaatgaagattcgggactccctctggctttcacaattgcccatgagctaggacacagcttcggcatccagcatgatgggaaagaaaatgactgtgagcctgtgggcagacatccgtacatcatgtcccgccagctccagtacgatcccactccgctgacatggtccaagtgcagcgaggagtacatcacccgcttcttggaccgaggctgggggttctgtcttgatgacatacctaaaaagaaaggcttgaagtccaaggtcattgcccccggagtgatctatgatgttcaccaccagtgccagctacaatatggacccaatgctaccttctgccaggaagtagaaaacgtctgccagacactgtggtgctccgtgaagggcttttgtcgctctaagctggacgctgctgcagatggaactcaatgtggtgagaagaagtggtgtatggcaggcaagtgcatcacagtggggaagaaaccagagagcattcctggaggctggggccgctggtcaccctggtcccactgttccaggacctgtggggctggagtccagagcgcagagaggctctgcaacaaccccgagccaaagtttggagggaaatattgcactggagaaagaaaacgctatcgcttgtgcaacgtccacccctgtcgctcagaggcaccaacatttcggcagatgcagtgcagtgaatttgacactgttccctacaagaatgaactctaccactggtttcccatttttaacccagcacatccttgtgagctctactgccgacccatagatggccagttttctgagaaaatgctggatgctgtcattgatggtaccccttgctttgaaggcggcaacagcagaaatgtctgtattaatggcatatgtaagatggttggctgtgactatgagatcgattccaatgccaccgaggatcgctgcggtgtgtgcctgggagatggctcttcctgccagactgtgagaaagatgtttaagcagaaggaaggatctggttatgttgacattgggctcattccaaaaggagcaagggacataagagtgatggaaattgagggagctggaaacttcctggccatcaggagtgaagatcctgaaaaatattacctgaatggagggtttattatccagtggaacgggaactataagctggcagggactgtctttcagtatgacaggaaaggagacctggaaaagctgatggccacaggtcccaccaatgagtctgtgtggatccagcttctattccaggtgactaaccctggcatcaagtatgagtacacaatccagaaagatggccttgacaatgatgttgagcagatgtacttctggcagtacggccactggacagagtgcagtgtgacctgcgggacaggtatccgccgccaaactgcccattgcataaagaagggccgcgggatggtgaaagctacattctgtgacccagaaacacagcccaatgggagacagaagaagtgccatgaaaaggcttgtccacccaggtggtgggcaggggagtgggaagcatgctcggcgacatgcgggccccacggggagaagaagcgaaccgtgctgtgcatccagaccatggtctctgacgagcaggctctcccgcccacagactgccagcacctgctgaagcccaagaccctcctttcctgcaacagagacatcctgtgcccctcggactggacagtgggcaactggagtgagtgttctgtttcctgtggtggtggagtgcggattcgcagtgtcacatgtgccaagaaccatgatgaaccttgcgatgtgacaaggaaacccaacagccgagctctgtgtggcctccagcaatgcccttctagccggagagttctgaaaccaaacaaaggcactatttccaatggaaaaaacccaccaacactaaagcccgtccctccacctacatccaggcccagaatgctgaccacacccacagggcctgagtctatgagcacaagcactccagcaatcagcagccctagtcctaccacagcctccaaagaaggagacctgggtgggaaacagtggcaagatagctcaacccaacctgagctgagctctcgctatctcatttccactggaagcacttcccagcccatcctcacttcccaatccttgagcattcagccaagtgaggaaaatgtttccagttcagatactggtcctacctcggagggaggccttgtagctacaacaacaagtggttctggcttgtcatcttcccgcaaccctatcacttggcctgtgactccattttacaataccttgaccaaaggtccagaaatggagattcacagtggctcaggggaagaaagagaacagcctgaggacaaagatgaaagcaatcctgtaatatggaccaagatcagagtacctggaaatgacgctccagtggaaagtacagaaatgccacttgcacctccactaacaccagatctcagcagggagtcctggtggccacccttcagcacagtaatggaaggactgctccccagccaaaggcccactacttccgaaactgggacacccagagttgaggggatggttactgaaaagccagccaacactctgctccctctgggaggagaccaccagccagaaccctcaggaaagacggcaaaccgtaaccacctgaaacttccaaacaacatgaaccaaacaaaaagttctgaaccagtcctgactgaggaggatgcaacaagtctgattactgagggctttttgctaaatgcctccaattacaagcagctcacaaacggccacggctctgcacactggatcgtcggaaactggagcgagtgctccaccacatgtggcctgggggcctactggaaaagggtggagtgcaccacccagatggattctgactgtgcggccatccagagacctgaccctgcaaaaagatgccacctccgtccctgtgctggctggaaagtgggaaactggagcaagtgctccagaaactgcagtgggggcttcaagatacgcgagattcagtgcgtggacagccgggaccaccggaacctgaggccatttcactgccagttcctggccggcattcctcccccattgagcatgagctgtaacccggagccctgtgaggcgtggcaggtggagccttggagccagtgctccaggtcctgtggaggtggagttcaggagagaggagtgttctgtccaggaggcctctgtgattggacaaaaagacccacatccaccatgtcttgcaatgagcacctgtgctgtcactgggccactgggaactgggacctgtgttccacttcctgtggaggtggctttcagaagaggattgtccaatgtgtgccctcagagggcaataaaactgaagaccaagaccaatgtctatgtgatcacaaacccagacctccagaattcaaaaaatgcaaccagcaggcctgcaagaaaagtgccgatttactttgcactaaggacaaactgtcagccagtttctgccagacactgaaagccatgaagaaatgttctgtgcccaccgtgagggctgagtgctgcttctcgtgtccccagacacacatcacacacacccaaaggcaaagaaggcaacggttgctccaaaagtcaaaagaactctaagcccaaa

SEQ ID NO: 2864 - DNA, 1410 bp, Homo sapiens
aaaacagaacagacccccatccctgggctggaggacccgcctcttggcagccagctgagaaggcgccccggggagggggaaactgacatcccatctagagccgtccctcctcttcctcccctcccgactctctgctcctttcccgccccagaagttcaagggcccccggcctcctgcgctcctgccgcagggaccctcgacctcctcagagcagccggctgccgccccgggaagatggcgaggaggagccgccaccgcctcctcctgctgctgctgcgctacctggtggtcgccctgggctatcataaggcctatgggttttctgccccaaaagaccaacaagtagtcacagcagtagagtaccaagaggctattttagcctgcaaaaccccaaagaagactgtttcctccagattagagtggaagaaactgggtcggagtgtctcctttgtctactatcaacagactcttcaaggtgattttaaaaatcgagctgagatgatagatttcaatatccggatcaaaaatgtgacaagaagtgatgcggggaaatatcgttgtgaagttagtgccccatctgagcaaggccaaaacctggaagaggatacagtcactctggaagtattagtggctccagcagttccatcatgtgaagtaccctcttctgctctgagtggaactgtggtagagctacgatgtcaagacaaagaagggaatccagctcctgaatacacatggtttaaggatggcatccgtttgctagaaaatcccagacttggctcccaaagcaccaacagctcatacacaatgaatacaaaaactggaactctgcaatttaatactgtttccaaactggacactggagaatattcctgtgaagcccgcaattctgttggatatcgcaggtgtcctgggaaacgaatgcaagtagatgatctcaacataagtggcatcatagcagccgtagtagttgtggccttagtgatttccgtttgtggccttggtgtatgctatgctcagaggaaaggctacttttcaaaagaaacctccttccagaagagtaattcttcatctaaagccacgacaatgagtgaaaatgatttcaagcacacaaaatcctttataatttaaagactccactttagagatacaccaaagccaccgttgttacacaagttattaaactattataaaactctgctttgtccgacatttgcaaagaggtacacgaggaaatggaattggtatttcattttaattttcatgactactaactcacctgaacttgctattttaaacaaatagttctgtcgacacctaaaatataatctggcttcttgtgtctggactaagttaaaagaattaaaatactttgtaatgtaaaaaaaaaaaaaaaaaaaaaaaaaaaaa

SEQ ID NO: 2865 - DNA, 1082 bp, Homo sapiens
atggcgggacacctggcttcggatgcctgccttcttgccccctccaggcggtggaggtgatgggccaggggggccggagccgggctgggttgatcctcggacctggctaagcttccaaggccctcctggagggccaggaatcgggccgggagttgggtcaggctctgaggtgtgggggattcccccatgccccccgctgtatgagttctgtggggggatggcgtactgtgggcctcaggttggagtgcggctagtgccccaaggcggcttggagacctctcagcctgagggcgaagcaggagtcagggtggagagcaactccgatggcacctccctggagccctgcaccgtcccccctggtgccgtgaaactggagaaggagaagctggagcaaaacccgcaggagtcccagaacatcaaagctctgcagaaagaactcgaacaatttgccaagctcctgaagcagaagaggatcaccctgggatatacacaggccgatgtggggctcaccctgggggttctatttgggaaggtgttcagccaaacgaccatctgccgctttgagggtctgcagcttagcttcaagaacatgtgtaagctgcggcccttgctgcagaagtgggtggaggaagctgacaacaatgaaaatcttcaggagacatgcaaagcagaaaccctcttgcaggctcgaaagagaaagcgaaccagtatcgagaaccgagtgagaggcaacctggagaatttgttcctgcagtgcccgaaacccacactgcagcagatcagccacatcgcccagcagcttgggctcgagaaggatgtggtccgagtgtggttctgtaaccggtgccagaaaggcaagcaatcaagcagcgactatgcataacgagaggattttgaggctgctgggtctcctttctcaggggtaccagtatcctttcctctggccccagggccccattttggtaccccaggctatgggagccctcacttcactgcactgtactcctcggtccctttccctgagggggaagcctttccccgtctccgtcaccaccctgggctctcccatgcattcaaactga

SEQ ID NO: 2866 - DNA, 1080 bp, Homo sapiens
atggcgggacacctggcttcggatttcgccttctcgccccctccaggcggtgggggtgatgggccatggggggcggagccgggctgggttgatcctctgacctggctaagcttccaaggccctcctggagggccaggaatcgggccgggggttgggccaggctctgaggtgtgggggattcccccttgccccccgccgtatgagttatgtggggggatggcgtactgtgggcctcaggttggagtggggctagtgccccaaggcggcttggagacctctcagcctgagagcgaagcaggagtcggggtggagagcaactccaatggggcctccccggaaccctgcaccgtcccccctggtgccgtgaagctggagaaggagaagctagagcaaaacccggagaagtcccaggacatcaaagctctgcagaaagaactcgagcaatttgccaagctcctgaagcagaagaggatcaccctgggatatacacaggccgatgtggggctcatcctgggggttctatttgggaaggtgttcagccaaaagaccatctgccgctttgaggctctgcagcttagcttcaagaacatgtgtaagctgcggcccttgctgcagaagtgggtggaggaagctgacaacaatgaaaatcttcaggagatatgcaaagcagaaaccctcatgcaggcccgaaagagaaagcgaaccagtatcgagaaccgagtgagaggcaacctggagaatttgttcctgcagtgcccgaaacccacactgcagatcagccacatcgcccagcagcttgggctcgagaaggatgtggtccgagtgtggttctgtaaccggcgccagaagggcaagcgatcaagcagcgactatgcacaacgagaggattttgaggctgctgggtctcctttctcagggggaccagtgtcctttcctccggccccagggccccattttggtaccccaggctatgggagccctcacttcactgcactgtactcctcagtccctttccctgagggggaagtctttcccccagtctccgtcatcactctgggctctcccatgcattcaaactga

SEQ ID NO: 2867 - DNA, 1081 bp, Homo sapiens
atggcgggacacctggcttcggatttcgccttctcaccccctccaggcggtggaggtgatgggccaggggggccggagccgggctgggttgatcctcggacctggctaagcttccaaggccctcctggagggccaggaatcgggccggggtttgggccaggctctgaggagtgggggattcccccatgtcccccgccgtatgagttctgcggggggatggcgtactgtgggcctcagactggagtggggctagtgccccaagacggcttggagacctctcagcctgagggcgaagcaggagtcggggtggagagcaactccgatggggcctccccggagccctgcaccgtcccctctggtgccgtgaagctggagaaggagaagctggagcaaaacccgaaggagtcccaggacatcaaagctctgcagaaagaactcgagcaatttgccaagctcctgaagcagaagaggatcaccctgggatatacacaggccgatgtggctcaccctgggggttctatttgggaaggtgttcagccaaacgaccatctgccgctttgaggctctgcagcttagcttcaagaacatgtgtgagctgcggcccttgctgcagaagtgggtggaggaagctgacaacaatgaaaatcttcaggagatatgcaaagcagaaaccctcgtgcaggccggaaagagaaagcgaaccagtatcgagaaccaagtgagaggcaacctggagaatttgttcctgcggtgcccgaaacccacactgcagcagatcagccacatcgcccagcagcttgggctggagaaggatgtggtccgagtgtggttctgtaaccggcgccagaagggcaagcgatcaagcagtggctatgcacaacgagaggattttgaggctgttgggtctcctttctcagggggaccagtgtcctttcctctggccccagggccccattttggtaccccaggctatgggagccctcacttcactgcactgtactcctcggtccctttccctgagggggaagcctttccccctgtctccgtcaccactctgggctctcccatgcattcaaactga

SEQ ID NO: 2868 - DNA, 1080 bp, Homo sapiens
atggcgggacacctggcttcggatttcgccttctcgccccctccaggcggtgggggtgatgggccatggggggcggagccgggctgggttgatcctctgacctggctaagcttccaaggccctcctggagggccaggaatcgggccgggggttgggccaggctctgaggtgtgggggattcccccttgccccccgccgtatgagttatgtggggggatggcgtactgtgggcctcaggttggagtggggctagtgccccaaggcggcttggagacctctcagcctgagagcgaagcaggagtcggggtggagagcaactccaatggggcctccccggaaccctgcaccgtcccccctggtgccgtgaagctggagaaggagaagctagagcaaaacccggagaagtcccaggacatcaaagctctgcagaaagaactcgagcaatttgccaagctcctgaagcagaagaggatcaccctgggatatacacaggccgatgtggggctcatcctgggggttctatttgggaaggtgttcagccaaacgaccatctgccgctttgaggctctgcagcttagcttcaagaacatgtgtaagctgcggcccttgctgcagaagtgggtggaggaagctgacaacgatgaaaatcttcaggagatatgcaaagcagaaaccctcatgcaggcccgaaagagaaagcgaaccagtatcgagaaccgagtgagaggcaacctggagaatttgttcctgcagtgcccgaaacccacactgcagatcagccacatcgcccagcagcttgggctcgagaaggatgtggtccgagtgtggttctgtaaccggcgccagaagggcaagcgatcaagcagcgactatgcacaacgagaggattttgaggctgctgggtctcctttctcagggggaccagtgtcctttcctccggccccagggccccattttggtaccccaggctatgggagccctcacttcactgcactgtactcctcagtccctttccctgagggggaagtctttcccccagtctccgtcatcactctgggctctcccatgcattcaaactga

SEQ ID NO: 2869 - DNA, 2189 bp, Homo sapiens
gcagagggagcgagcgggcggccggctagggtggaagagccgggcgagcagagctgcgctgcgggcgtcctgggaagggagatccggagcgaatagggggcttcgcctctggcccagccctcccgctgatcccccagccagcggtccgcaacccttgccgcatccacgaaactttgcccatagcagcgggcgggcactttgcactggaacttacaacacccgagcaaggacgcgactctcccgacgcggggaggctattctgcccatttggggacacttccccgccgctgccaggacccgcttctctgaaaggctctccttgcagctgcttagacgctggatttttttcgggtagtggaaaaccagcagcctcccgcgacgatgcccctcaacgttagcttcaccaacaggaactatgacctcgactacgactcggtgcagccgtatttctactgcgacgaggaggagaacttctaccagcagcagcagcagagcgagctgcagcccccggcgcccagcgaggatatctggaagaaattcgagctgctgcccaccccgcccctgtcccctagccgccgctccgggctctgctcgccctcctacgttgcggtcacacccttctcccttcggggagacaacgacggcggtggcgggagcttctccacggccgaccagctggagatggtgaccgagctgctgggaggagacatggtgaaccagagtttcatctgcgacccggacgacgagaccttcatcaaaaacatcatcatccaggactgtatgtggagcggcttctcggccgccgccaagctcgtctcagagaagctggcctcctaccaggctgcgcgcaaagacagcggcagcccgaaccccgcccgcggccacagcgtctgctccacctccagcttgtacctgcaggatctgagcgccgccgcctcagagtgcatcgacccctcggtggtcttcccctaccctctcaacgacagcagctcgcccaagtcctgcgcctcgcaagactccagcgccttctctccgtcctcggattctctgctctcctcgacggagtcctccccgcagggcagccccgagcccctggtgctccatgaggagacaccgcccaccaccagcagcgactctgaggaggaacaagaagatgaggaagaaatcgatgttgtttctgtggaaaagaggcaggctcctggcaaaaggtcagagtctggatcaccttctgctggaggccacagcaaacctcctcacagcccactggtcctcaagaggtgccacgtctccacacatcagcacaactacgcagcgcctccctccactcggaaggactatcctgctgccaagagggtcaagttggacagtgtcagagtcctgagacagatcagcaacaaccgaaaatgcaccagccccaggtcctcggacaccgaggagaatgtcaagaggcgaacacacaacgtcttggagcgccagaggaggaacgagctaaaacggagcttttttgccctgcgtgaccagatcccggagttggaaaacaatgaaaaggcccccaaggtagttatccttaaaaaagccacagcatacatcctgtccgtccaagcagaggagcaaaagctcatttctgaagaggacttgttgcggaaacgacgagaacagttgaaacacaaacttgaacagctacggaactcttgtgcgtaaggaaaagtaaggaaaacgattccttctaacagaaatgtcctgagcaatcacctatgaacttgtttcaaatgcatgatcaaatgcaacctcacaaccttggctgagtcttgagactgaaagatttagccataatgtaaactgcctcaaattggactttgggcataaaagaacttttttatgcttaccatcttttttttttctttaacagatttgtatttaagaattgtttttaaaaaattttaagatttacacaatgtttctctgtaaatattgccattaaatgtaaataactttaataaaacgtttatagcagttacacagaatttcaatcctagtatatagtacctagtattataggtactataaaccctaattttttttatttaagtacattttgctttttaaagttgatttttttctattgtttttagaaaaaataaaataactggcaaatatatcattgagccaaaaaaaaaaaaaaaaaaaaa

SEQ ID NO: 2870 - DNA, 2546 bp, Homo sapiens
gctgccgctgccgcacctccgtagctgactcggtactctctgaagatggcagaagctcaccaagctgtggcctttcagttcacggtcactccggacgggattgacctgcggctgagccatgaagctcttagacaaatctatctctctggacttcattcctggaaaaagaagttcatcagattcaagaacggcatcatcactggcgtgtacccggcaagcccctccagttggcttatcgtggtggtgggcgtgatgacaacgatgtacgccaagatcgacccctcgttaggaataattgcaaaaatcaatcggactctggaaacggccaactgcatgtccagccagacgaagaacgtggtcagcggcgtgctgtttggcaccggcctgtgggtggccctcatcgtcaccatgcgctactccctgaaagtgctgctctcctaccacgggtggatgttcactgagcacggcaagatgagtcgtgccaccaagatctggatgggtatggtcaagatcttttcaggccgaaaacccatgttgtacagcttccagacatcgctgcctcgcctgccggtcccggctgtcaaagacactgtgaacaggtatctacagtcggtgaggcctcttatgaaggaagaagacttcaaacggatgacagcacttgctcaagattttgctgtcggtcttggaccaagattacagtggtatttgaagttaaaatcctggtgggctacaaattacgtgagcgactggtgggaggagtacatctacctccgaggacgagggccgctcatggtgaacagcaactattatgccatggatctgctgtatatccttccaactcacattcaggcagcaagagccggcaacgccatccatgccatcctgctttacaggcgcaaactggaccgggaggaaatcaaaccaattcgtcttttgggatccacgattccactctgctccgctcagtgggagcggatgtttaatacttcccggatcccaggagaggagacagacaccatccagcacatgagagacagcaagcacatcgtcgtgtaccatcgaggacgctacttcaaggtctggctctaccatgatgggcggctgctgaagccccgggagatggagcagcagatgcagaggatcctggacaatacctcggagcctcagcccggggaggccaggctggcagccctcaccgcaggagacagagttccctgggccaggtgtcgtcaggcctattttggacgtgggaaaaataagcagtctcttgatgctgtggagaaagcagcgttcttcgtgacgttagatgaaactgaagaaggatacagaagtgaagacccggatacgtcaatggacagctacgccaaatctctactacacggccgatgttacgacaggtggtttgacaagtcgttcacgtttgttgtcttcaaaaacgggaagatgggcctcaacgctgaacactcctgggcagatgcgccgatcgtggcccacctttgggagtacgtcatgtccattgacagcctccagctgggctatgcggaggatgggcactgcaaaggcgacatcaatccgaacattccgtaccccaccaggctgcagtgggacatcccgggggaatgtcaagaggttatagagacctccctgaacaccgcaaatcttctggcaaacgacgtggatttccattccttcccattcgtagcctttggtaaaggaatcatcaagaaatgtcgcacgagcccagacgcctttgtgcagctggccctccagctggcgcactacaaggacatgggcaagttttgcctcacatacgaggcctccatgacccggctcttccgagaggggaggacggagaccgtgcgctcctgcaccactgagtcatgcgacttcgtgcgggccatggtggacccggcccagacggtggaacagaggctgaagttgttcaagttggcgtctgagaagcatcagcatatgtatcgcctcgccatgaccggctctgggatcgatcgtcacctcttctgcctttacgtggtgtctaaatatctcgctgtggagtcccctttccttaaggaagttttatctgagccttggagattatcaacaagccagacccctcagcagcaagtggagctgtttgacttggagaataacccagagtacgtgtccagcggagggggctttggaccggttgctgatgacggctatggtgtgtcgtacatccttgtgggagagaacctcatcaatttccacatttcttccaagttctcttgccctgagacggggattataagtcaaggaccaagttcagatacttgagacaaagtggaaagtctcagcatatggaaacaaggccttggaggagaccatggacatcaccaagttcatgtgctgggctggaaagaaaagcctgttgattttcacttgctgtgcatttattcatccattccattgcctcaatgctgagaacagtgcctgacacataaaagatgctcaataaatatgttaaaagtaaaaaaaaaaaaaaaaaaaaaaaaaaaaaaaaaaaa

SEQ ID NO: 2871 - DNA, 1489 bp, Homo sapiens
ccggacccggagccagcgcggagcacctgcgcccgcggctgacaccttcgctcgcagtttgttcgcagtttactcgcacaccagtttcccccaccgcgctttggattagtgtgatctcagctcaaggcaaaggtgggatatcatggcatctatctgggttggacaccgaggaacagtaagagattatccagactttagcccatcagtggatgctgaagctattcagaaagcaatcagaggaattggaactgatgagaaaatgctcatcagcattctgactgagaggtcaaatgcacagcggcagctgattgttaaggaatatcaagcagcatatggaaaggagctgaaagatgacttgaagggtgatctctctggccactttgagcatctcatggtggccctagtgactccaccagcagtctttgatgcaaagcagctaaagaaatccatgaagggcgcgggaacaaacgaagatgccttgattgaaatcttaactaccaggacaagcaggcaaatgaaggatatctctcaagcctattatacagtatacaagaagagtcttggagatgacattagttccgaaacatctggtgacttccggaaagctctgttgactttggcagatggcagaagagatgaaagtctgaaagtggatgagcatctggccaaacaagatgcccagattctctataaagctggtgagaacagatggggcacggatgaagacaaattcactgagatcctgtgtttaaggagctttcctcaattaaaactaacatttgatgaatacagaaatatcagccaaaaggacattgtggacagcataaaaggagaattatctgggcattttgaagacttactgttggccatagttaattgtgtgaggaacacgccggcctttttagccgaaagactgcatcgagccttgaagggtattggaactgatgagtttactctgaaccgaataatggtgtccagatcagaaattgaccttttggacattcgaacagagttcaagaagcattatggctattccctatattcagcaattaaatcggatacttctggagactatgaaatcacactcttaaaaatctgtggtggagatgactgaaccaagaagataatctccaaaggtccacgatgggctttcccaacagctccaccttacttcttctcatactatttaagagaacaagcaaatataaacagcaacttgtgttcctaacaggaattttcattgttctataacaacaacaacaaaagcgattattattttagagcatctcatttataatgtagcagctcataaatgaaattgaaaatggtattaaagatctgcaactactatccaacttatatttctgctttcaaagttaagaatctttatagttctactccattaaatataaagcaagataataaaaattgttgcttttgttaaaaaaaaaaataaaaaaaaaaaaaaaaaaaaaaaaaaaaaaaaaaa

SEQ ID NO: 2872 - DNA, 2915 bp, Homo sapiens
gcggataactcagacgccattaagctggggaatccaaactctaaaagaaggacgcattttaggtaagatctagtggctagatcttcagggtgggcttcgttcttgtggaaatcagtcaagaaagatcggattcgcggttatttatgcaaatcatctgggtggattgtgtacggagttaaactgcgccttctggaccgggtctgaacaatggagactgcgctagcaaaaacgccacagaaaaggcaagttatgtttcttgctatattgttgcttttgtgggaggctggctctgaggcagttaggtattccataccagaagaaacagaaagtggctattctgtggccaacctggcaaaagacctgggtcttggggtgggggaactggccactcggggcgcgcgaatgcattacaaaggaaacaaagagctcttgcagcttgatataaagaccggcaatttgcttctatatgaaaaactagaccgggaggtgatgtgcggggcgacagaaccctgtatattgcatttccagctcttactagaaaatccagtgcagttttttcaaactgatctgcagctcacagatataaatgaccatgccccagagttcccagagaaggaaatgctcctaaaaatcccagagagcacccagccagggactgtgtttcccttaaaaatagcccaggactttgacataggtagcaacactgttcagaactacacaatcagcccaaattcacactttcatgttgctacgcataatcgcggagatggcagaaaatacccagagctggtgctggacaaagcgctggaccgggaggagcggcctgagctcagcttaacactcactgcactggacggtggggctccgcccaggtccgggaccaccacaattcgcattgtcgtcttggataataatgacaacgcccccgaatttttacaatcattctatgaggtacaggtgcccgagaacagcccccttaactccttagttgtcgttgtctccgctcgagatttagatgcaggagcatatgggagtgtagcctatgctctattccaaggcgatgaagttactcaaccatttgtaatagacgagaaaacagcagaaattcgcctgaaaagggcattggatttcgaggcaactccatattataacgtggaaattgtagccacagatggtgggggcctttcaggaaaatgcactgtggctatagaagtggtggatgtgaatgacaacgcccctgaactcaccatgtctacgctctccagccctaccccagaaaatgccccggaaactgtagttgccgttttcagtgtttctgatccagactccggggacaacggtaggatgatttgctccatccagaatgatctcccctttcttttgaagcccacattaaaaaacttttacaccctagtgacacagagaacactggacagagagagccaagccgagtacaacatcaccatcactgtcaccgacatggggacacccaggctgaaaaccgagcacaacataacggtcctggtctccgacgtcaatgacaacgcccccgccttcacccaaacctcctacaccctgttcgtccgagagaacaacagccccgccctgcacatcggcagtgtcagcgccacagacagagactcaggcaccaacgcccaggtcacctactcgctgctgccgccccagaatccacacctgcgcctcgcctccctggtctccatcaacgcggacaacggccacctgtttgccctcaggtcgctggactacgaggccctgcaggcgttcgagttccgcgtgggagccacagaccgcggctccccggcgctgagcagcgaggcgctggtgcgcgtgctggtgctggacgccaacgacaactcgcccttcgtgctgtatccgctgcagaacggctcggcgccttgcaccgagctggtgccccgggcggccgagccgggctacctggtgaccaaggtggtggcggtggacggtgactcgggccagaacgcctggctgtcgtaccagctgctcaaggccacggagcccgggctgttcagcatgtgggcgcacaatggcgaggtgcgcaccgccaggctgctgagcgagcgcgacgcggccaagcacaggctggtggtgctggtcaaggacaatggcgagcctccgcgctcggccaccgccacgctgcacgtgctcctggtggacggcttctcccagccctacctgccgctgccggaggcggccccggcccaggcccaggccgactcgctcactgtctacctggtggtggcattggcctcggtgtcgtcgctcttcctcttttcggtgctcctgttcgtggcagtgcggctgtgcaggaggagcagggcggccccggtcggtcgctgctcggtgcccgagggcccctttccagggcatctggtggacgtgagcggcaccgggaccctatcccagagctaccactacgaggtgtgtttgaccggagactcaggggccggcgagttcaagttcctgaagccgattattcctaaccttttgccccagggcgctggtgaagaaatagggaaaactgctgccttccggaatagctttggattaaattagagatctcgtgatgacgcgttgttttctgccatttatcccaaactttttcagatctagaattcgagagtgtcatggacaaaaatttcaccttgagattgagcttttatttccctttttaatggatttgtctgttgaacttcatgctgtccaagtgttgaaaagtcaattttatttcattgcatttatttacatagtgtcattccaaatccatgcatgctgttgattttcctgagatttttttctcttcttgttggtatttgttgtgataaaccaccttaataaaatcaagtattaattttaaaaaaaaaaaaaaaaaaaaa

SEQ ID NO: 2873 - DNA, 1723 bp, Homo sapiens
ggcgcgcgggtgcgatcgcggagctgtgaggcgcaggcagggctctggggcacctagagaccggggccggagacgtggcagccgccctgcccgccagaaagtttcctagaagtttgctgggcgcgggcgcacgactgactggctggaccatgaacgtgttccgaatcctcggcgacctgagccacctcctggccatgatcttgctgctggggaagatctggaggtccaagtgctgcaagggcatctctgggaagagccagatcctgtttgctctcgtcttcaccaccaggtacctggacctgttcaccaacttcatctccatctacaacacagtaatgaaggtggtttttctcctctgtgcctatgttacagtgtacatgatatatgggaaattccgtaaaacttttgacagtgagaatgacacattccgcctggagtttcttctggtcccagtcattggcctttccttccttgaaaactacagtttcactctgctggagatcctctggactttctctatctatctggaatcagtggctatcctgccccagctcttcatgatcagcaagactggagaggctgagaccataactactcactacctgttctttctgggtctgtaccgggcactctacctggctaactggatcaggcggtaccagactgagaatttctatgaccaaattgcagtcgtgtctggagtagtacaaaccatcttctactgtgacttcttctacttgtatgtgaccaaagtccttaagggaaagaagttaagtcttccaatgccaatctgaggaccttcagagacagtctacgccttaacaagcacatgaaggaaactattttgaatgttctctttggcaacttatccataatttgggatcaaatgttaaaaccagaaaagtgtttagtgtggatttcagcaaaacctgatcatcccacccagaagaccttctcatcaatagatcgcccttaaagacccattgtaaggtcataaaaaacctcggccaactgcacaaagatggtgcctcactgcaacaagaaaccttaaggtgtcttaccgacgaaataaaaaacataaatgattgttctccaaggcctgagggcaagactcatgatgagcaagtcaaccccaatctggaacaatgtccctcctcttagaatgtcccaactaaagaccagttaaaatattagggtacgttcttgtgaatttccactttccaggtagatgaccaaatttaggtggtcaagatataaaggtgacagctagttttaagtgtgaaacttatttcactttcacactgccttcaggccagaagcaaaccaaatttaccaggtttggctggaggagttttgtgactcatcttttactggtttgaattttttcaaaccagtggctgatacctgccttgtacttagtaccttaataccaataacctaatggtacttaggcgagtaccatttgcacaatcactgttttacttatgagcagatacagatatatccaaacccttacctactaggtatcctgctagggttttcaattccaattcttgtattaagttttttcctttcagttttaggtgcgaaagtaatcagtcaatccaatatcccccatctttgtcttgaaacaaaaactgttttaagacgtctacgttgaattattcagagaattaagcaataaaagctcacaccttattgtcaaaaaaaaaaaaaaaaaaaa

SEQ ID NO: 2874 - DNA, 2148 bp, Homo sapiens
gactgggtttgttgtgaagttgcggtgatccagcgcagagccccgtcctgattgatcgcatcgcggggctcagatgactgtaaaatgaatagatgaaattcttgcttctcgaagattttcttgggcatctcccggaaagtgcgttttaaggcgaagtcatgatgtattctcccatctgtctcactcaggatgaatttcacccattcatcgaggcacttcttccacatgtccgtgcaattgcctatacttggttcaacctgcaggctcgaaaacgcaagtactttaaaaagcatgagaagcgaatgtcaaaggatgaagaaagagcagtcaaagatgagcttctcagtgaaaagcctgaaatcaaacagaagtgggcatccaggctccttgccaaactgcgcaaagatattcgccaggagtatcgagaggactttgtgctcaccgtgactggcaagaagcacccgtgctgtgtcttatccaatcccgaccagaagggtaagattaggagaatcgactgcctgcgacaggcagacaaagtctggcgtctggatctagtcatggtgatcctgttcaaaggcatccccttggaaagtaccgatggagagcggctcatgaaatccccacattgcacaaacccagcactttgtgtccagccacatcatatcacagtatcagttaaggagcttgatttgtttttggcatactacgtgcaggagcaagattctggacaatcaggaagtccaagccacaatgatcctgccaagaatcctccaggttaccttgaggatagttttgtaaaatctggagtcttcaatgtatcagaacttgtaagagtatccagaacgcccataacccagggaactggagtcaacttcccaattggagaaatcccaagccaaccatactatcatgacatgaactcgggggtcaatcttcagaggtctctgtcttctccaccaagcagcaaaagacccaaaactatatccatagatgaaaatatggaaccaagtcctacaggagacttttacccctctccaagttcaccagctgctggaagtcgaacatggcacgaaagagatcaagatatgtcttctccgactactatgaagaagcctgaaaagccattgttcagctctgcatctccacaggattcttccccaagactgagcactttcccccagcaccaccatcccggaatacctggagttgcacacagtgtcatctcaactcgaactccacctccaccttcaccgttgccatttccaacacaagctatccttcctccagccccatcgagctacttttctcatccaacaatcagatatcctccccacctgaatcctcaggatactctgaagaactatgtaccttcttatgacccatccagtccacaaaccagccagtcctggtacctgggctagcttggttcctttccaagtgtcaaataggacacccatcttaccggccaatgtccaaaattacggtttgaacataattggagaacctttccttcaagcagaaacaagcaactgagggaaaaagaaacacaacaatagtttaagaaattttttttttaaataaaaaaaaaggaaaagaggaagactggacaaaacaacacaaaggcagaaaggaaagaaactgaagaaagaagataatagaccagcaattgcagcacttacaatcactaattcccttaaggttgaaactgtaatgacataaaaagggtcgatgatatttcactgatggtagatcgcagcccctgcaacgtagcctttgttacatgaagtccgctgggaaatagatgttctgtctctatgacaatatattttaactgactttctagatgccttaatatttgcatgataagctagttttattggtttagtattcttgttgtttacgcatggaatcactattcctggttatctcaccaacgaaggctaggaggcggcgtcagaggtgctgggtgacagagccatgagccagccattttataagcactctgatttctaaaagttaaaaaaaatatatgaaatctctgtagcctttagttatcagtacagatttattaaatttcggcccttaacccagccttttccagtgtgtaacccagtttgaaatcttaaaaaaagaaaaaaaaaaaaaaaa

SEQ ID NO: 2875 - DNA, 3246 bp, Homo sapiens
  misc_feature (2530)..(2530): n is a, c, g, or t
agtgtggttttagtttttcctaagaagtggcgtggtttggggctttatatccgggaggagcatatgtacgcaaatcctggggcgtttgcaaacccggatccggggcgtctggccccatgcccggccgggcgtttgagggctactgccacgcagcgtttctggagcctgccggctggtgccctggtggcctttatctctgtccccctttgtcctctttatctcaggctctccaggaggccggggggcccactccgcctatcgctcccctcggctacgctgccactccaatgccccgcaggtcgcgagctgctgttctttcgaaggcgccggagaaccaggggcgtcccgcgccacctctgactcggagcagcgccgagcactgacgctcccgcccttgggcaaggacgccagtgcgcccgcgcgcgtccctctgcgcggcagcccgtcgcgggccctcaaggggaagcccaggccaggatggccccgggtcgcgcggtggccgggctcctgttgctggcggccgccggcctcggaggagtggcggaggggccagggctagccttcagcgaggatgtgctgagcgtgttcggcgcgaatctgagcctgtcggcggcgcagctccagcacttgctggagcagatgggagccgcctcccgcgtgggcgtcccggagcctggccagctgcacttcaaccagtgtttaactgctgaagagatcttttcccttcatggcttttcaaatgctacccaaataaccagctccaaattctctgtcatctgtccagcagtcttacagcaattgaactttcacccatgtgaggatcggcccaagcacaaaacaagaccaagtcattcagaagtttggggatatggattcctgtcagtgacgattattaatctggcatctctcctcggattgattttgactccactgataaagaaatcttatttcccaaagattttgaccttttttgtggggctggctattgggactcttttttcaaatgcaattttccaacttattccagaggcatttggatttgatcccaaagtcgacagttatgttgagaaggcagttgctgtgtttggtggattttacctacttttcttttttgaaagaatgctaaagatgttattaaagacatatggtcagaatggtcatacccactttggaaatgataactttggtcctcaagaaaaaactcatcaacctaaagcattacctgccatcaatggtgtgacatgctatgcaaatcctgctgtcacagaagctaatggacatatccattttgataatgtcagtgtggtatctctacaggatggaaaaaaagagccaagttcatgtacctgtttgaaggggcccaaactgtcagaaatagggacgattgcctggatgataacgctctgcgatgccctccacaatttcatcgatggcctggcgattggggcttcctgcaccttgtctctccttcagggactcagtacttccatagcaatcctatgtgaggagtttccccacgagttaggagactttgtgatcctactcaatgcagggatgagcactcgacaagccttgctattcaacttcctttctgcatgttcctgctatgttgggctagcttttggcattttggtgggcaacaatttcgctccaaatattatatttgcacttgctggaggcatgttcctctatatttctctggcagatatgtttccagagatgaatgatatgctgagagaaaaggtaactggaagaaaaaccgatttcaccttcttcatgattcagaatgctggaatgttaactggattcacagccattctactcattaccttgtatgcaggagaaatcgaattggagtaatagaaaatggaagatggtgttgttaataaaggcatttaatagataaaaacatctccaaaaaggattttgaagctgatcctatttagttaaaaagataattttgctttcaactgtaggtccagaaaactaattattggcatcagtctgtgaaatagtccattatttgttgttaaaaatgcttcaaaaggttttcagtgtcagtctgagatgcctggtatataggagcctttgggaaatacttatttttcagtattccatgcatattagatatcaccatgaagcaagagacatgcattctataatcatgtagacactcagactcaggggaaaatacaagttatatcctgaaagcctttaaaactctatggtaggatcaaagattcaaatggtttcagagaggttttatttcaattaatttgttctagtgctttcaagagcaagtacatcaaaatgtagaaggtaaaatgtatgcaacactaatataaattattccaagtctttaaggagccaaagaaaaaaaagatttctcacagctttttgttctgttttgtatttcaattaggaacttgcagtattattttgaaaaccattctaaaataataggagttaggaaataaataaagttttgctagccctgctaagttcaggcttagaggcttatcgctaagtntaaacttcaccagattccacgaaaagctggatagctttttttctgacttatgttgtggttgcacccctcacaaatggcagaacagtatgtaaagctggtaacacctcggtttcagtgcaccatgtgtttgctttgtgaaggtgaagaatatgttggtttagagaaagaaattggatgtaattttatgcaatttacttttaaagacaaacataactatttagcagagaatattttaataaatgcaaaacaacagctggactgctgtacatcaaggacagattaactggaaaacatatgttccttatgtgtgattgagagccattcagaaaagacttcctttgtgttcagcctatacttttccatatggtataccttgaaaaaaattagcacaccatggttatttttctaccttttataaaagacagagcctgtttactcatttagaagatagagaaaattggtctaaaattgaacatcctagattcacactcccaagtcacttaaggtgatttgatggtgaggaaaatgattgacaaagcccaacaatgatctcaggaattacattttccaacagaccaaaaaatgttttcatgtagcagcaatgcagatttggtgaatatttaatatatattttagtatgtatttcactttatgactgacaattaaaaaatattgtttggccaaatagtaaacacccttttgaaaccatgaaaaaa

SEQ ID NO: 2876 - DNA, 3020 bp, Homo sapiens
cagccgccggcggcgctagcacctcggagtcgggcggccggagcagcggagcgcagcgcggcgcagggaacggcactgggggtggggagaccagcccggccgagccgagggccaccccctggtcctctgccctcgcgccccgctagggccaggtgcacaaaaagctttaaacaagttaaaatctaggcaacagactccctgaagtgttgactgcccaacttaatcatgactgtgattcaaaaatgttaataaataaaccaaggtgtagatcatggggaattcatatgctgggcaactgaaatctgctcgatttgaggaagctctccacaactccatagaagcctccctcagatgtagtagtgtggtaccacggccaattttttcccagctatacctggaccctgaccagcatcctttctcatctgcagatgtcaaacccaaggtggaggatctggacaaagatttggtaaaccgctacactcaaaatggaagtctggatttttctaacaatctaacagttaatgaaatggaagatgatgaagacgatgaagaaatgtctgattcaaacagcccaccaattccctattcacaaaaacctgccccagaaggatcttgcactacagatggtttttgtcaagcaggaaaggatttgcgtttggtatcactgtgtatggaacaaattgacatcccagcaggattcctcctggtgggggccaagtctcccaatctgcctgaacacatcctagtttgtgctgtggacaagcgatttctaccagatgatcatggaaaaaatgcacttttagggttttctggaaattgtatcggctgtggagaaagaggatttcgatatttcacggaattttccaaccacattaacttgaagctcaccactcagccaaagaagcagaagcacttaaagtactacctagtcagaagctcccagggtgtactgtctaaaggacctcttatctgctggaaagaatgtagaagccgacaatcctctgcttcttgccactctattaagccaagctcttcagtgtcgtcaactgtgaccccagaaaatgggacaactaatggatacaaatcaggattcactcagacagatgctgctaatggaaacagtagccatggagggaagggcagtgcatccagctccactccagcccacacagggaattactctttgtcaccacgacctagctatgcatcaggagatcaagctaccatgttcatttctgggccaccaaagaaacgacaccggggatggtatcctgggtcacctctcccccaacctggcttagttgtacctgtccctacagttcgccctctttcaagaacggagccccttttatctgccccagttccacagaccccactaactggaattttacaacccaggcccattcctgcaggggaaactgtaattgttcctgaaaacctgctgagtaactcaggagttagaccagtaattctgataggctatggcactttaccctatttctatggaaatgttggtgacattgttgtgagtcctctgctggtgaattgctacaagattccacagttggaaaacaaagatttggaaaaattagggttgaccggcagccaatttctgagcgtggaaaacatgattcttctgacgatacagtatcttgtgcggctgggtcctgatcaggtacctctcagggaagaatttgagcaaattatgctgaaagctatgcaagaatttactctgagagaaagagccctgcagataggtgctcagtgtgtccctgtgtcaccaggacaactcccctggcttgctagattaattgccagcgtatctcaagacttggttcatgtggttgtgacccagaactctttggcggagggcatttcagagaccttaaggactctcagtgaaatgagacactatcaaaggctgccagattatgtggtggtaatttgtgcatcgaaaatcagaggaaatgaattttgtgtggtagtgttaggtcagcaccagtcccgagctctggcagagagcatgctcaccacaagtgagtttttgaaagaaattagttatgagcttatcacaggaaaggtcagtttcctggcatcacatttcaaaaccacatcattaggcgatgacctagacaagctgctggaaaaaatgcaacaaagaagaggagacagtgtggttacccctttcgatggagaccttaatgaatgtgtgtcaccccaggaggctgctgctatgattcccacacaaaacctggatttagataatgaaaccttccacatttatcaaccgcagctaacagttgccagaaaactcttatcccaggtgtgtgctatagcggacagtggcagccagagcctggacctcggtcacttcagcaaagtagacttcatcatcattgttcccagatcggaggtgttggttcagcaaactcttcagcggattcgacaatcaggtaagagtgaactttcaaagaggagcccacctagatccagcttcagatcccctctgcctctttcttttgcttaatccaaacgtctagaggatgcttaaaaccttcttcagtaataaaaatcataaaagcactttgttattttgggtttatctgaagttttccctcaaagtactctgtcctttttccctcaaggtcaagggtaaattgttgtgcatgtttgccaggtatcattaagttcatgatgtaatctgtgggactagaatctggtcatttatggatgaagagaaattttctcaaggcgaggatggccctgcatgggttgatggcgtctgtgccacctgaactcctcccacctgcaggcctcatttgcataggtggattcttggccatctagcacattaacagcacgtctgggacctggaaaccagaacaccatcccccatgtcagcaatgacgttctttaagaaaaaaaggttagcgttatttctaataactttaagtgtaaagaaaaaaaaatgtttttcccagaaaatgtgaaaaggtagagagcaaaaattttacaagtct

SEQ ID NO: 2877 - DNA, 1149 bp, Homo sapiens
ccacaccgtgctcagcgccttcactgccatccccgctgtccttgccgcccccgccatgggcctagagctgtttcttgacctggtgtcccagcccagccgcgccgtctacatcttcgccaagaagaatggcatccccttagagctgcgcaccgtggatttggtcaaagggcagcacaagagcaaggagttcttgcagatcaacagcctggggaaactgccgacgctcaaggatggtgatttcatcttgaccgaaagctcggccatcctgatttacctgagctgtaagtaccagacgccggaccactggtatccatctgacctgcaggctcgtgcccgtgttcatgagtacctgggctggcatgccgactgcatccgtggcacctttggtatacccctgtgggtccaggtgttggggccactcattggggtccaggtgcccgaggagaaggtggaacgcaacaggactgccatggaccaggccctgcaatggctggaggacaagttcctgggggacaggcccttcctcgctggccagcaggtgacactggctgatctcatggccctggaggagctgatgcagccggtggctctcggctacgaactgtttgagggacggccacgactggcagcatggcgtggacgagtggaggctttcctgggtgctgagctatgccaggaggcccacagcatcatcttgagcatcctggaacaggcggccaagaaaaccctcccaacaccctcaccagaggcctatcaggctatgctgcttcgaatcgccaggatcccctgaagggtctgggatgggggccaggagattagcaacaaggattcattctgttacttacttgcccctttttatctttccctcttgccccagtcccttctctccagcttcatgtgaagctctgcacagacaagacactcagtgtccttggcagtgctgctactcctcaggtgcagcatacataaccagtaagagactaaatctgcaatatataaagagctcctacaaatcagtaacatgaagaacactcaaaaattggcaaatgtcatcagtgttttaaacagaataaagattccaaacactttgaatagaaaaaaaaaaaaaaaaaaaaaaaaaaaaaaaaaaaaaaaaaaaaaaaaaaaaaa

SEQ ID NO: 2878 - DNA, 2415 bp, Homo sapiens
caggagaagaggacaaagatactcagagagaaaaagtaaaagaccgaagaaggaggctggagagaccaggatccttccagctgaacaaagtcagccacaaagcagactagccagccggctacaattggagtcagagtcccaaagacatgggcttgttagagtgctgtgcaagatgtctggtaggggccccctttgcttccctggtggccactggattgtgtttctttggggtggcactgttctgtggctgtggacatgaagccctcactggcacagaaaagctaattgagacctatttctccaaaaactaccaagactatgagtatctcatcaatgtgatccatgccttccagtatgtcatctatggaactgcctctttcttcttcctttatggggccctcctgctggctgagggcttctacaccaccggcgcagtcaggcagatctttggcgactacaagaccaccatctgcggcaagggcctgagcgcaacgtttgtgggcatcacctatgccctgaccgttgtgtggctcctggtgtttgcctgctctgctgtgcctgtgtacatttacttcaacacctggaccacctgccagtctattgccttccccagcaagacctctgccagtataggcagtctctgtgctgacgccagaatgtatggtgttctcccatggaatgctttccctggcaaggtttgtggctccaaccttctgtccatctgcaaaacagctgagttccaaatgaccttccacctgtttattgctgcatttgtgggggctgcagctacactggtttccctgctcaccttcatgattgctgccacttacaactttgccgtccttaaactcatgggccgaggcaccaagttctgatcccccgtagaaatccccctttctctaatagcgaggctctaaccacacagcctacaatgctgcgtctcccatcttaactctttgcctttgccaccaactggccctcttcttacttgatgagtgtaacaagaaaggagagtcttgcagtgattaaggtctctctttggactctcccctcttatgtacctcttttagtcattttgcttcatagctggttcctgctagaaatgggaaatgcctaagaagatgacttcccaactgcaagtcacaaaggaatggaggctctaattgaattttcaagcatctcctgaggatcagaaagtaatttcttctcaaagggtacttccactgatggaaacaaagtggaaggaaagatgctcaggtacagagaaggaatgtctttggtcctcttgccatctataggggccaaatatattctctttggtgtacaaaatggaattcattctggtctctctattaccactgaagatagaagaaaaaagaatgtcagaaaaacaataagagcgtttgcccaaatctgcctattgcagctgggagaagggggtcaaagcaaggatctttcacccacagaaagagagcactgaccccgatggcgatggactactgaagccctaactcagccaaccttacttacagcataagggagcgtagaatctgtgtagacgaagggggcatctggccttacacctcgttagggaagagaaacagggtgttgtcagcatcttctcactcccttctccttgataacagctaccatgacaaccctgtggtttccaaggagctgagaatagaaggaaactagcttacatgagaacagactggcctgaggagcagcagttgctggtggctaatggtgtaacctgagatggccctctggtagacacaggatagataactctttggatagcatgtctttttttctgttaattagttgtgtactctggcctctgtcatatcttcacaatggtgctcatttcatggggtattatccattcagtcatcgtaggtgatttgaaggtcttgatttgttttagaatgatgcacatttcatgtattccagtttgtttattacttatttggggttgcatcagaaatgtctggagaataattctttgattatgactgttttttaaactaggaaaattggacattaagcatcacaaatgatattaaaaattggctagttgaatctattgggattttctacaagtattctgcctttgcagaaacagatttggtgaatttgaatctcaatttgagtaatctgatcgttctttctagctaatggaaaatgattttacttagcaatgttatcttggtgtgttaagagttaggtttaacataaaggttattttctcctgatatagatcacataacagaatgcaccagtcatcagctattcagttggtaagcttccaggaaaaaggacaggcagaaagagtttgagacctgaatagctcccagatttcagtcttttcctgtttttgttaactttgggttaaaaaaaaaaaaaaaaaaa

SEQ ID NO: 2879 - DNA, 1457 bp, Homo sapiens
ggcgcgtgcagcagctccagaaagcagcgagttggcagagcagggctgcatttccagcaggagctgcgagcacagtgctggctcacaacaagatgctcaaggtgtcagccgtactgtgtgtgtgtgcagccgcttggtgcagtcagtctctcgcagctgccgcggcggtggctgcagccggggggcggtcggacggcggtaattttctggatgataaacaatggctcaccacaatctctcagtatgacaaggaagtcggacagtggaacaaattccgagacgatgattatttccgcacttggagtccaggaaaacccttcgatcaggctttagatccagctaaggatccatgcttaaagatgaaatgtagtcgccataaagtatgcattgctcaagattctcagactgcagtctgcattagtcaccggaggcttacacacaggatgaaagaagcaggagtagaccataggcagtggaggggtcccatattatccacctgcaagcagtgcccagtggtctatcccagccctgtttgtggttcagatggtcatacctactcttttcagtgcaaactagaatatcaggcatgtgtcttaggaaaacagatctcagtcaaatgtgaaggacattgcccatgtccttcagataagcccaccagtacaagcagaaatgttaagagagcatgcagtgacctggagttcagggaagtggcaaacagattgcgggactggttcaaggcccttcatgaaagtggaagtcaaaacaagaagacaaaaacattgctgaggcctgagagaagcagattcgataccagcatcttgccaatttgcaaggactcacttggctggatgtttaacagacttgatacaaactatgacctgctattggaccagtcagagctcagaagcatttaccttgataagaatgaacagtgtaccaaggcattcttcaattcttgtgacacatacaaggacagtttaatatctaataatgagtggtgctactgcttccagagacagcaagacccaccttgccagactgagctcagcaatattcagaagcggcaaggggtaaagaagctcctaggacagtatatccccctgtgtgatgaagatggttactacaagccaacacaatgtcatggcagtgttggacagtgctggtgtgttgacagatatggaaatgaagtcatgggatccagaataaatggtgttgcagattgtgctatagattttgagatctccggagattttgctagtggcgattttcatgaatggactgatgatgaggatgatgaagacgatattatgaatgatgaagatgaaattgaagatgatgatgaagatgaaggggatgatgatgatggtggtgatgaccatgatgtatacatttgattgatgacagttgaaatcaataaattctacatttctaatatttacaaaaaaaaaaaaaaaaaa

SEQ ID NO: 2880 - DNA, 2162 bp, Homo sapiens
catttaaaggtgtgcggcgggtctctgttcacatggctcaactggaaacctgtttcatgaacaagcttactcaggaaccatctggtggtattccagcacattgttcttcagggggacgactctaagtcgctttgtggtggcagcagcttagaatcagtatttgtggttgggaaagatggacttacgggagcttggtaatgcaggtggtgaaggagcaggttatgagagcacttacaaccaagcctagctccctggaccagttcaagagcaaactgcagaacctgagctacactgagatcctgaaaatccgccagtccgagaggatgaaccaggaagatttccagtcccgcccgattttggaactaaaggagaagattcagccagaaatcttagagctgatcaaacagcaacgcctgaaccgccttgtggaagggacctgctttaggaaactcaatgcccggcggaggcaagacaagttttggtattgtcggctttcgccaaatcacaaagtcctgcattacggagacttagaagagagtcctcagggagaagtgccccacgattccttgcaggacaaactgccggtggcagatatcaaagccgtggtgacgggaaaggactgccctcatatgaaagagaaaggtgcccttaaacaaaacaaggaggtgcttgaactcgctttctccatcttgtatgactcaaactgccaactgaacttcatcgctcctgacaagcatgagtactgtatctggacggatggactgaatgcgctactcgggaaggacatgatgagcgacctgacgcggaatgacctggacaccctgctcagcatggaaatcaagctccgcctcctggacctggaaaacatccagatccctgacgcacctccgccgattcccaaggagcccagcaactatgacttcgtctatgactgtaactgaagtggccgggcccagacatgccccttccaaaactggaacacctagctaacaggagagaggaatgaaaacacacccacgccttggaaccgtcctttggtaaagggaagctgtgggtccacattcccttcagcatcacctctagccctggcaactttcagcccctagctggcatcttgctcaccgccctgattctgttcctcggctccactgcttcaggtcacttcccatggctgcagtccactggtgggacaagagcaaagcccactgccagtaagaaggccaaagggcccttccatcctagccctctgcaggcatgcccttccttcccttgggcaggaaagccagcagccccagactgcccaaaaacttgcccaccagaccaagggcagtgccccaaggcccctgtctggaggaaatggcctagctatttgatgagaagaccaaaccccacatcctcctttcccctctctctagaatcatctcgcaccaccagttacacttgaattaagatctgcgctcaaatctcctcccacctctctccctgcttttgccttgctctgttcctctttggtcccaagagcagcagccgcagcctcctcgtgatcctccctagcataaatttcccaaacagtccacaggtcccatgcccactttgcgtctgcactgtgatcgtgacaaatcttccctcctcaccagctagtctggggtttcctctccctgccccaggccagaactgccttcttcatttccacccacgctcccagcctcttagctgaaagcacaaatggtgaaatcagtagtctcgctccatctctaatagactaaacctaaatgcctctaggacggactgttgctatccaagcgtttggtgttaccttctcctgggaggtcctgctgcaactcaagttccacaggatggtcaagctgtcagacatccaagtttacatcattgtaattattactggtatttacaatttgcaagagttttgggttagttttttttttttttttgctttgtttttggacaaaagagtctaacattttttgccaaacagatatatatttaatgaaaagaagagatacataaatgtgtgaatttccagtttttttttaattattttaatcccaaacatcttcctgaaaataacattcccttaaacatgctgtggaataaaatggattgtgatgaaaaaaaaaaaaaaaaaaaaaaaaaaaaaaaaa

SEQ ID NO: 2881 - DNA, 2025 bp, Homo sapiens
cagcaccaagtccgcttccaggctttcggtttctttgcctccatcttgggtgcgccttcccggcgtctaggggagcgaaggttgaggtggcagcggcaggagagtccggccgcgacaggacgaactcccccactggaaaggattctgaaagaaatgaagtcagccctcagaaatgaagttgactgcctgctggctttctgttgactggcccggagctgtactgcaagacccttgtgagcttccctagtctaagagtaggatgtctgctgaagtcatccatcaggttgaagaagcacttgatacagatgagaaggagatgctgctctttttgtgccgggatgttgctatagatgtggttccacctaatgtcagggaccttctggatattttacgggaaagaggtaagctgtctgtcggggacttggctgaactgctctacagagtgaggcgatttgacctgctcaaacgtatcttgaagatggacagaaaagctgtggagacccacctgctcaggaaccctcaccttgtttcggactatagagtgctgatggcagagattggtgaggatttggataaatctgatgtgtcctcattaattttcctcatgaaggattacatgggccgaggcaagataagcaaggagaagagtttcttggaccttgtggttgagttggagaaactaaatctggttgccccagatcaactggatttattagaaaaatgcctaaagaacatccacagaatagacctgaagacaaaaatccagaagtacaagcagtctgttcaaggagcagggacaagttacaggaatgttctccaagcagcaatccaaaagagtctcaaggatccttcaaataacttcaggctccataatgggagaagtaaagaacaaagacttaaggaacagcttggcgctcaacaagaaccagtgaagaaatccattcaggaatcagaagcttttttgcctcagagcatacctgaagagagatacaagatgaagagcaagcccctaggaatctgcctgataatcgattgcattggcaatgagacagagcttcttcgagacaccttcacttccctgggctatgaagtccagaaattcttgcatctcagtatgcatggtatatcccagattcttggccaatttgcctgtatgcccgagcaccgagactacgacagctttgtgtgtgtcctggtgagccgaggaggctcccagagtgtgtatggtgtggatcagactcactcagggctccccctgcatcacatcaggaggatgttcatgggagattcatgcccttatctagcagggaagccaaagatgttttttattcagaactatgtggtgtcagagggccagctggaggacagcagcctcttggaggtggatgggccagcgatgaagaatgtggaattcaaggctcagaagcgagggctgtgcacagttcaccgagaagctgacttcttctggagcctgtgtactgcggacatgtccctgctggagcagtctcacagctcaccatccctgtacctgcagtgcctctcccagaaactgagacaagaaagaaaacgcccactcctggatcttcacattgaactcaatggctacatgtatgattggaacagcagagtttctgccaaggagaaatattatgtctggctgcagcacactctgagaaagaaacttatcctctcctacacataagaaaccaaaaggctgggcgtagtggctcacacctgtaatcccagcactttgggaggccaaggagggcagatcacttcaggtcaggagttcgagaccagcctggccaacatggtaaacgctgtccctagtaaaaatacaaaaattagctgggtgtgggtgtgggtacctgtattcccagttacttgggaggctgaggtgggaggatcttttgaacccaggagttcagggtcatagcatgctgtgattgtgcctacgaatagccactgcataccaacctgggcaatatagcaagatcccatctctttaaaaaaaaaaaaaaaaaa

SEQ ID NO: 2882 - DNA, 1859 bp, Homo sapiens
ggcttccggcggcgtgacctgaccgcaagaggccaatggagtgtgggagctgaaagggtcttcgctggcggccggacagtactgcttttaaagagacagtgttagggatcttggaagcacagccaacatgtgtgacattgaagaagccactaaccaactcctagatgtgaaccttcatgagaaccagaagtctgtacaagtgacagaaagcgacctcggaagtgaatctgagcttctagtcactattggagccactgtacctactggctttgagcaaacagctgcagatgaagtcagagagaaacttgggtcatcatgcaaaatcagcagagaccgtggcaagatatattttgtcatttcagtggaaagtctggcacaggttcattgtctgagatcagttgataacttatttgtggtggttcaggagtttcaagattaccagttcaaacaaacaaaggaagaagttctaaaggattttgaagacttggctggaaaactcccatggtcaaaccccttaaaagtgtggaaaattaatgccagttttaaaaagaaaaaagcaaagcgcaaaaagataaatcagaattcaagtaaagagaagattaataatggacaagaagtcaaaatcgatcagagaaatgttaaaaaagagttcactagccatgctttagattctcatatcttagattattatgaaaatccagccatcaaagaggatgtatcaacattaataggtgatgatttggcatcttgcaaagatgagactgatgaaagctcaaaagaagaaactgagcctcaagtgctgaagtttagagtcacatgcaacagggcaggagagaaacattgctttacctcaaatgaggctgcaagagattttgggggtgctgttcaagattattttaagtggaaggccgacatgaccaactttgatgtggaggttcttttgaacatccatgataatgaagtcattgtgggcattgcattgactgaagagagtctccaccgaagaaatataacacattttggacctacaactcttagatcaactcttgcctatgggatgctcaggctctgtgatcctctaccttatgatataatagtcgatccaatgtgtggaactggggcaataccaatagagggggccactgaatggtctgactgcttccatattgctggtgataataatccactggctgtgaatagagcagcaaataacattgcatctttattgaccaagagccaaattaaagaaggcaaaccctcctggggcttgcccatagatgctgttcagtgggatatctgcaatctgccattgagaactggctctgtggatattattgtaacagatttgccatttggaaaaaggatgggatccaagaaaagaaactggaacctttatccagcttgcctacgggagatgagccgtgtctgcacacctaccacaggccgagctgtactacttactcaagacacaaaatgctttaccaaggcgttatctggaatgcgacacgtatggcgaaaggtggatacagtctgggtgaacgttggtggtcttcgtgctgcagtttacgttctgatacgtacacctcaagcttttgttcatccttcagaacaagacggagaaagaggaactctttggcaatgcaaagaatgaagatgactaatagtacttgtacttcccaccactggaaatgttagcataaaagaacttggagaggaaaaaagtattaacaaaactgcagtctgcactctttaaacctgtttaaggctcttcatcctggttagcaaaaggtgtgaatgtaatgtgatggaatttaaaagttttatgagaccaggaaaaaaaaaaaaaaaaaaaaaaaaaa

SEQ ID NO: 2883 - DNA, 3003 bp, Homo sapiens
ctagccgaagcggctgcatctggcgccgcgtctgccccgcgtgctcggagcggattctgcccgccgtccccggagccctcggcgccccgctgagcccgcgatcacttcctccctgtgaccaaccggcgctgcaggttagagcctggcaatgccgtttgggtgtgtgactctgggcgacaagaagaactataaccagccatcggaggtgactgacagatatgatttgggacaggtcatcaagactgaggagttttgtgaaatcttccgggccaaggacaagacgacaggcaagctgcacacctgcaagaagttccagaagcgggacggccgcaaggtgcggaaagctgccaagaacgagataggcatcctcaagatggtgaagcatcccaacatcctacagctggtggatgtgtttgtgacccgcaaggagtactttatcttcctggagctggccacggggagggaggtgtttgactggatcctggaccagggctactactcggagcgagacacaagcaacgtggtacggcaagtcctggaggccgtggcctatttgcactcactcaagatcgtgcacaggaatctcaagctggagaacctggtttactacaaccggctgaagaactcgaagattgtcatcagtgacttccatctggctaagctagaaaatggcctcatcaaggagccctgtgggacccccgagtatctggccccagaggtggtaggccggcagcggtatggacgccctgtggactgctgggccattggagtcatcatgtacatcctgctttcaggcaatccacctttctatgaggaggtggaagaagatgattatgagaaccatgataagaatctcttccgcaagatcctggctggtgactatgagtttgactctccatattgggatgatatttcgcaggcagccaaagacctggtcacaaggctgatggaggtggagcaagaccagcggatcactgcagaagaggccatctcccatgagtggatttctggcaatgctgcttctgataagaacatcaaggatggtgtctgtgcccagattgaaaagaactttgccagggccaagtggaagaaggctgtccgagtgaccaccctcatgaaacggctccgggcaccagagcagtccagcacggctgcagcccagtcggcctcagccacagacactgccacccccggggctgcaggtggggccacagctgcagctgcgagtggagctacctcagcccctgagggtgatgctgctcgtgctgcaaagagtgataatgtggcccccgcagaccgtagtgccaccccagccacagatggaagtgccaccccagccactgatggcagtgtcaccccagccaccgatggaagcatcactccagccactgatgggagtgtcaccccagccactgacaggagcgctactccagccactgatgggagagccacaccagccacagaagagagcactgtgcccaccacccaaagcagtgccatgctggccaccaaggcagctgccacccctgagccggctatggcccagccggacagcacagccccagagggcgccacaggccaggctccaccctctagtaaaggggaagaggctgctggttgtgcccaggagtctcaaagggaggaggccagctgagtaggcagcctggtgagggggggcaggggatgggcaggagggtgggagagtggatgaggggcttctcactgtacatagagtcactggcatgatgccctcgctcccccatgcccccacatcccagtggggcataactaggggtcacgggagagcagtctcgtctcctgtgtgtatgtgtgtgagtggtgggcaggccagtggcagggccggccccagcccctgcatggattccttgtggcttttctgtcttttgctagcttcaccagtttctgttccttgtgggatgctgctctagggatactcagggggctcctgctctccttccccttcccttcttgcctcaccattcccctaggcaggccctgcaggtcccacactctcccaggccctaaacttgggcggccttgccctgagagctggtcctccagcgaggccctgtcagcggtcttaggctcctgcacatgaaggtgtgtgcctgtggtgtgtgggctgctctaggagcagatacaggctggtatagaggatgcagaaaggtagggcagtatgtttaagtccagacttggcacatggctagggatactgctcactagctgtggaggtcctcaggagtggagagaatgagtaggagggcagaagcttccatttttgtccttcctaagaccctgttatttgtgttatttcctgcctttccgagtcctgcagtgggctgccctgtaccctgaacctcatgagcctctaagggaaaggaggaacaattaggacgtggcaatgagacctggcagggcagagtacaagcccagcacccagtgtcccagccttactgggtccttaccctgggccaaacagggagggctgatacctccttgctcttcctagatgcccacctcctacaatctcagcccacaagtcctctccaccctagggggcttgctgcatggcaataactcataatctgatttggaggtttgccctttacaggggcagattttctgctcagttcaacaatgaaatgaagaggaactccctctttctacagctcacttctatcagaggcccaggtgcctcagagccacattgagttgctttttctgggatgaggaagtagggttaaactccccagtttcctgagggaggctcctgacaggtgccctttgtcagaccctaccacagcctggataggcagccacattggtcctcgcccttgctcggcactccgtggtggtcctgcccttctccctgcatgcctgtgggtctgctctggtgtgtgaaggtcggtgggttaactgtgtgcctactgaacctggcaaataaacatcaccctgcaaagccaaaaaaaaaaaaaaaaaaaa

SEQ ID NO: 2884 - DNA, 4215 bp, Homo sapiens
cctgtttcccagagtaatgtgggccatggagtcaggccacctcctctgggctctgctgttcatgcagtccttgtggcctcaactgactgatggagccactcgagtctactacctgggcatccgggatgtgcagtggaactatgctcccaagggaagaaatgtcatcacgaaccagcctctggacagtgacatagtggcttccagcttcttaaagtctgacaagaaccggatagggggaacctacaagaagaccatctataaagaatacaaggatgactcatacacagatgaagtggcccagcctgcctggttgggcttcctggggccagtgttgcaggctgaagtgggggatgtcattcttattcacctgaagaattttgccactcgtccctataccatccaccctcatggtgtcttctacgagaaggactctgaaggttccctatacccagatggctcctctgggccactgaaagctgatgactctgttcccccggggggcagccatatctacaactggaccattccagaaggccatgcacccaccgatgctgacccagcgtgcctcacctggatctaccattctcatgtagatgctccacgagacattgcaactggcctaattgggcctctcatcacctgtaaaagaggagccctggatgggaactcccctcctcaacgccaggatgtagaccatgatttcttcctcctcttcagtgtggtagatgagaacctcagctggcatctcaatgagaacattgccacttactgctcagatcctgcttcagtggacaaagaagatgagacatttcaggagagcaataggatgcatgcaatcaatggctttgtttttgggaatttacctgagctgaacatgtgtgcacagaaacgtgtggcctggcacttgtttggcatgggcaatgaaattgatgtccacacagcatttttccatggacagatgctgactacccgtggacaccacactgatgtggctaacatctttccagccacctttgtgactgctgagatggtgccctgggaacctggtacctggttaattagctgccaagtgaacagtcactttcgagatggcatgcaggcactctacaaggtcaagtcttgctccatggcccctcctgtggacctgctcacaggcaaagttcgacagtacttcattgaggcccatgagattcaatgggactatggcccgatggggcatgatgggagtactgggaagaatttgagagagccaggcagtatctcagataagtttttccagaagagctccagccgaattgggggcacttactggaaagtgcgatatgaagcctttcaagatgagacattccaagagaagatgcatttggaggaagataggcatcttggaatcctggggccagtgatccgggctgaggtgggtgacaccattcaggtggtcttctacaaccgtgcctcccagccattcagcatgcagccccatggggtcttttatgagaaagactatgaaggcactgtgtacaatgatggctcatcttaccctggcttggttgccaagccctttgagaaagtaacataccgctggacagtcccccctcatgccggtcccactgctcaggatcctgcttgtctcacttggatgtacttctctgctgcagatcccataagagacacaaattctggcctggtgggcccgctgctggtgtgcagggctggtgccttgggtgcagatggcaagcagaaaggggtggataaagaattctttcttctcttcactgtgttggatgagaacaagagctggtacagcaatgccaatcaagcagctgctatgttggatttccgactgctttcagaggatattgagggcttccaagactccaatcggatgcatgccattaatgggtttctgttctctaacctgcccaggctggacatgtgcaagggtgacacagtggcctggcacctgctcggcctgggcacagagactgatgtgcatggagtcatgttccagggcaacactgtgcagcttcagggcatgaggaagggtgcagctatgctctttcctcatacctttgtcatggccatcatgcagcctgacaaccttgggacatttgagatttattgccaggcaggcagccatcgagaagcagggatgagggcaatctataatgtctcccagtgtcctggccaccaagccacccctcgccaacgctaccaagctgcaagaatctactatatcatggcagaagaagtagagtgggactattgccctgaccggagctgggaacgggaatggcacaaccagtctgagaaggacagttatggttacattttcctgagcaacaaggatgggctcctgggttccagatacaagaaagctgtattcagggaatacactgatggtacattcaggatccctcggccaaggactggaccagaagaacacttgggaatcttgggtccacttatcaaaggtgaagttggtgatatcctgactgtggtattcaagaataatgccagccgcccctactctgtgcatgctcatggagtgctagaatctactactgtctggccactggctgctgagcctggtgaggtggtcacttatcagtggaacatcccagagaggtctggccctgggcccaatgactctgcttgtgtttcctggatctattattctgcagtggatcccatcaaggacatgtatagtggcctggtggggcccttggctatctgccaaaagggcatcctggagccccatggaggacggagtgacatggatcgggaatttgcattgttgttcttgatttttgatgaaaataagtcttggtatttggaggaaaatgtggcaacccatgggtcccaggatccaggcagtattaacctacaggatgaaactttcttggagagcaataaaatgcatgcaatcaatgggaaactctatgccaaccttaggggtcttaccatgtaccaaggagaacgagtggcctggtacatgctggccatgggccaagatgtggatctacacaccatccactttcatgcagagagcttcctctatcggaatggcgagaactaccgggcagatgtggtggatctgttcccagggacttttgaggttgtggagatggtggccagcaaccctgggacatggctgatgcactgccatgtgactgaccatgtccatgctggcatggagaccctcttcactgttttttctcgaacagaacacttaagccctctcaccgtcatcaccaaagagactgaaaaagcagtgccccccagagacattgaagaaggcaatgtgaagatgctgggcatgcagatccccataaagaatgttgagatgctggcctctgttttggttgccattagtgtcacccttctgctcgttgttctggctcttggtggagtggtttggtaccaacatcgacagagaaagctacgacgcaataggaggtccatcctggatgacagcttcaagcttctgtctttcaaacagtaacatctggagcctggagatatcctcaggaagcacatctgtagtgcactcccagcaggccatggactagtcactaaccccacactcaaaggggcatgggtggtggagaagcagaaggagcaatcaagcttatctggatatttctttctttatttattttacatggaaataatatgatttcactttttctttagtttctttgctctacgtgggcacctggcactaagggagtaccttattatcctacatcgcaaatttcaacagctacattatatttccttctgacacttggaaggtattgaaatttctagaaatgtatccttctcacaaagtagagaccaagagaaaaactcattgattgggtttctacttctttcaaggactcaggaaatttcactttgaactgaggccaagtgagctgttaagataacccacacttaaactaaaggctaagaatataggcttgatgggaaattgaaggtaggctgagtattgggaatccaaattgaattttgattctccttggcagtgaactactttgaagaagtggtcaatgggttgttgctgccatgagcatgtacaacctctggagctagaagctcctcaggaaagccagttctccaagttcttaacctgtggcactgaaaggaatgttgagttacctcttcatgttttagacagcaaaccctatccattaaagtacttgttagaacact

SEQ ID NO: 2885 - DNA, 1641 bp, Homo sapiens
gccggctgagccacagcagggtcgccgcggggtcccggggccgtgctcccctgcccctcccgggagcgcgcggggcggggcggggcggggcgggaccaggcgggcgagctgggccctcgcccctccctcgggcggtcacctgggcacgggcgctgcaggtgtcggggcctcaaccttgcggagccgacagccatcgatcctcgggtggcctcgaggtggtggcagggccgccccctgcagtccggagacgaacgcacggaccgggcctccggaggcaggttcggctggaaggaaccgctctcgcttcgtcctacacttgcgcaaatgtctccgagcttactcacatagcatattggtatatcaaaatgaaatgcaaggaaccaaaaataacataattgaaggcagtaaaagtgaaattaaataggaagatcatcagtcaaggaagacccactggagaggacagaaaatgaagcagtgttttatcatgtgtatttcagcaggtcttcttgaaatttaactaaaaatatgactgctctctcttcagagaactgctcttttcagtaccagttacgtcaaacaaaccagcccctagatgttaactatctgctattcttgatcatacttgggaaaatattattaaatatccttacactaggaatgagaagaaaaaacacctgtcaaaattttatggaatatttttgcatttcactagcattcgttgatcttttacttttggtaaacatttccattatattgtatttcagggattttgtacttttaagcattaggttcactaaataccacatctgcctatttactcaaattatttcctttacttatggctttttgcattatccagttttcctgacagcttgtatagattattgcctgaatttctctaaaacaaccaagctttcatttaagtgtcaaaaattattttatttctttacagtaattttaatttggatttcagtccttgcttatgttttgggagacccagccatctaccaaagcctgaaggcacagaatgcttattctcgtcactgtcctttctatgtcagcattcagagttactggctgtcatttttcatggtgatgattttatttgtagctttcataacctgttgggaagaagttactactttggtacaggctatcaggataacttcctatatgaatgaaactatcttatattttcctttttcatcccactccagttatactgtgagatctaaaaaaatattcttatccaagctcattgtctgttttctcagtacctggttaccatttgtactacttcaggtaatcattgttttacttaaagttcagattccagcatatattgagatgaatattccctggttatactttgtcaatagttttctcattgctacagtgtattggtttaattgtcacaagcttaatttaaaagacattggattacctttggatccatttgtcaactggaagtgctgcttcattccacttacaattcctaatcttgagcaaattgaaaagcctatatcaataatgatttgttaatattattaattaaaagttacagctgtcataagatcataattttatgaacagaaagaactcaggacatattaaaaaataaactgaactaaaacaaaaaaa

SEQ ID NO: 2886 - DNA, 2574 bp, Homo sapiens
gggaggagaagcctgggtgccccccactgataagcaggctccacccagaggccagtcctgtgtgtctggggacaaggcgaaagagcagcagaagtgccccttctccaggatcaaggaactggggcggggggtgtttcctggaccccagtcctccgaatcagctcctagagtggaaccaggaaggattctggagccacagaagatagacagatggaaggtggggaccaaagtgaggaagagccgagggaacgcagccaggcaggtggaatgggaactctctggagccaagagagcactccagaagagaggctgcccgtggaagggagcaggccatgggcagtggccaggcgggtgctgacagctatcctgattttgggcctgctcctttgtttttctgtgcttttgttctacaacttccagaactgtggccctcgcccctgtgagacatctgtgtgtttggatctccgggatcattacctggcctctgggaacacaagtgtggccccctgcaccgacttcttcagctttgcctgtggaagggccaaagagaccaataattcttttcaggagcttgccacaaagaacaaaaaccgacttcggagaatactggaggtccagaattcctggcacccaggctctggggaggagaaagccttccagttctacaactcctgcatggatacacttgccattgaagctgcagggactggtcccctcagacaagttattgaggagcttggaggctggcgcatctctggtaaatggacttccttaaactttaaccgaacgctgagacttctgatgagtcagtatggccatttccctttcttcagagcctacctaggacctcatcctgcctctccacacacaccagtcatccagatagaccagccagagtttgatgttcccctcaagcaagatcaagaacagaagatctatgcccagatctttcgggaatacctgacttacctgaatcagctgggaaccttgctgggaggagacccaagcaaggtgcaagaacactcttccttgtcaatctccatcacttcacggctgttccagtttctgaggcccctggagcagcggcgggcacagggcaagctcttccagatggtcactatcgaccagctcaaggaaatggcccccgccatcgactggttgtcctgcttgcaagcgacattcacaccgatgtccctgagcccttctcagtccctcgtggtccatgacgtggaatatttgaaaaacatgtcacaactggtggaggagatgctgctaaagcagagggactttctgcagagccacatgatcttagggctggtggtgaccctttctccagccctggacagtcaattccaggaggcacgcagaaagctcagccagaaactgcgggaactgacagagcaaccacccatgcctgcccgcccacgatggatgaagtgcgtggaggagacaggcacgttcttcgagcccacgctggcggctttgtttgttcgtgaggcctttggcccgagcacccgaagtgctgccatgaaattattcactgcgatccgggatgccctcatcactcgcctcagaaaccttccctggatgaatgaggagacccagaacatggcccaggacaaggttgctcaactgcaggtggagatgggggcttcagaatgggccctgaagccagagctggcccgacaagaatacaacgatatacagcttggatcgagcttcctgcagtctgtcctgagctgtgtccggtccctccgagctagaattgtccagagcttcttgcagcctcacccccaacacaggtggaaggtgtccccttgggacgtcaatgcttactattcggtatctgaccatgtggtagtctttccagctggactcctccaacccccattcttccaccctggctatcccagagccgtgaactttggcgctgctggcagcatcatggcccacgagctgttgcacatcttctaccagctcttactgcctgggggctgcctcgcctgtgacaaccatgccctccaggaagctcacctgtgcctgaagcgccattatgctgcctttccattacctagcagaacctccttcaatgactccctcacattcttagagaatgctgcagacgttggggggctagccatcgcgctgcaggcatacagcaagaggctgttacggcaccatggggagactgtcctgcccagcctggacctcagcccccagcagatcttctttcgaagctatgcccaggtgatgtgtaggaagcccagcccccaggactctcacgacactcacagccctccacacctccgagtccacgggcccctcagcagcaccccagcctttgccaggtatttccgctgtgcacgtggtgctctcttgaacccctccagccgctgccagctctggtaacttggttaccaaagatgccacagcacagaaatatcgaccaacacctccctggtcacatccatggaatcagagcaagatttcctttctgcttctgttccaaaaataaaagctggcacttggcttccgcttgtctcttaaaaaaaaaaaaaaaaaaaaaaaaaaaaa

SEQ ID NO: 2887 - DNA, 1149 bp, Homo sapiens
ctgtcctgccgccttcgcccacgccctgcactccgggaccgtccctgcgcgctctgggcgcaccatggcccgcggggctgcgctggcgctgctgctcttcggcctgctgggtgttctggtcgccgccccggatggtggtttcgatttatccgatgcccttcctgacaatgaaaacaagaaacccactgcaatccccaagaaacccagtgctggggatgactttgacttaggagatgctgttgttgatggagaaaatgacgacccacgaccaccgaacccacccaaaccgatgccaaatccaaaccccaaccaccctagttcctccggtagcttttcagatgctgaccttgcggatggcgtttcaggtggagaaggaaaaggaggcagtgatggtggaggcagccacaggaaagaaggggaagaggccgacgccccaggcgtgatccccgggattgtgggggctgtcgtggtcgccgtggctggagccatctctagcttcattgcttaccagaaaaagaagctatgcttcaaagaaaatgcagaacaaggggaggtggacatggagagccaccggaatgccaacgcagagccagctgttcagcgtactcttttagagaaatagaagattgtcggcagaaacagcccaggcgttggcagcagggttagaacagctgcctgaggctcctccctgaaggacacctgcctgagagcagagatggaggccttctgttcacggcggattctttgttttaatcttgcgatgtgctttgcttgttgctgggcggatgatgtttactaacgatgaattttacatccaaagggggataggcacttggacccccattctccaaggcccgggggggcggtttcccatgggatgtgaaaggctggccattattaagtccctgtaactcaaatgtcaaccccaccgaggcacccccccgtcccccagaatcttggctgtttacaaatcacgtgtccatcgagcacgtctgaaacccctggtagccccgacttctttttaattaaaataaggtaagcccttcaatttgtttcttcaatatttctttcatttgtagggatatttgtttttcatatcagactaataaaaagaaattagaaaaaaaaaaaaaaaaaaaaaaaaaaaaa

SEQ ID NO: 2888 - DNA, 9176 bp, Homo sapiens
ctggtggtccagtacctccaaagatatggaatacactcctgaaatatcctgaaaacttttttttttcagaatcctttaataagcagttatgtcaatctgaaagttgcttacttgtactttatattaatagctattcttgtttttcttatccaaagaaaaatcctctaatccccttttcacatgatagttgttaccatgtttaggcattagtcacatcaacccctctcctctcccaaacttctcttcttcaaatcaaactttattagtccctcctttataatgattccttgcctcgttttatccagatcaattttttttcactttgatgcccagagctgaagaaatggactactgtataaattattcattgccaagagaataattgcattttaaacccatattataacaaagaataatgattatattttgtgatttgtaacaaataccctttattttcccttaactattgaattaaatattttaattatttgtattctctttaactatcttggtatattaaagtattatcttttatatatttatcaatggtggacacttttataggtactctgtgtcatttttgatactgtaggtatcttatttcatttatctttattcttaatgtacgaattcataatatttgattcagaacaaatttatcactaattaacagagtgtcaattatgctaacatctcatttactgattttaatttaaaacagtttttgttaacatgcatgtttagggttggcttcttaataatttcttcttcctcttctctctctcctcttcttttggtcagtgttgtgcgggttaatacaacaaactgtaacaagtgtacctggtatggacttgttgtccgggacgtacattttcgcggtcctgctagcatgcgtggtgttccactctggcgcccaggagaaaaactacaccatccgagaagaaatgccagaaaacgtcctgataggcgacttgttgaaagaccttaacttgtcgctgattccaaacaagtccttgacaactgctatgcagttcaagctagtgtacaagaccggagatgtgccactgattcgaattgaagaggatactggtgagatcttcactactggcgctcgcattgatcgtgagaaattatgtgctggtatcccaagggatgagcattgcttttatgaagtggaggttgccattttgccggatgaaatatttagactggttaagatacgttttctgatagaagatataaatgataatgcaccattgttcccagcaacagttatcaacatatcaattccagagaactcggctataaactctaaatatactctcccagcggctgttgatcctgacgtaggaataaacggagttcaaaactacgaactaattaagagtcaaaacatttttggcctcgatgtcattgaaacaccagaaggagacaagatgccacaactgattgttcaaaaggagttagatagggaagagaaggatacctacgtgatgaaagtaaaggttgaagatggtggctttcctcaaagatccagtactgctattttgcaagtgagtgttactgatacaaatgacaaccacccagtctttaaggagacagagattgaagtcagtataccagaaaatgctcctgtaggcacttcagtgacacagctccatgccacagatgctgacataggtgaaaatgccaagatccacttctctttcagcaatctagtctccaacattgccaggagattatttcacctcaatgccaccactggacttatcacaatcaaagaaccactggatagggaagaaacaccaaaccacaagttactggttttggcaagtgatggtggattgatgccagcaagagcaatggtgctggtaaatgttacagatgtcaatgataatgtcccatccattgacataagatacatcgtcaatcctgtcaatgacacagttgttctttcagaaaatattccactcaacaccaaaattgctctcataactgtgacggataaggatgcggaccataatggcagggtgacatgcttcacagatcatgaaatccctttcagattaaggccagtattcagtaatcagttcctcctggagactgcagcatatcttgactatgagtccacaaaagaatatgccattaaattactggctgcagatgctggcaaacctcctttgaatcagtcagcaatgctcttcatcaaagtgaaagatgaaaatgacaatgctccagttttcacccagtctttcgtaactgtttctattcctgagaataactctcctggcatccagttgacgaaagtaagtgcaatggatgcagacagtgggcctaatgctaagatcaattacctgctaggccctgatgctccacctgaattcagcctggattgtcgtacaggcatgctgactgtagtgaagaaactagatagagaaaaagaggataaatatttattcacaattctggcaaaagataacggggtaccacccttaaccagcaatgtcacagtctttgtaagcattattgatcagaatgacaatagcccagttttcactcacaatgaatacaacttctatgtcccagaaaaccttccaaggcatggtacagtaggactaatcactgtaactgatcctgattatggagacaattctgcagttacgctctccattttagatgagaatgatgacttcaccattgattcacaaactggtgtcatccgaccaaatatttcatttgatagagaaaaacaagaatcttacactttctatgtaaaggctgaggatggtggtagagtatcacgttcttcaagtgccaaagtaaccataaatgtggttgatgtcaatgacaacaaaccagttttcattgtccctccttccaactgttcttatgaattggttctaccgtccactaatccaggcacagtggtctttcaggtaattgctgttgacaatgacactggcatgaatgcagaggttcgttacagcattgtaggaggaaacacaagagatctgtttgcaatcgaccaagaaacaggcaacataacattgatggagaaatgtgatgttacagaccttggtttacacagagtgttggtcaaagctaatgacttaggacagcctgattctctcttcagtgttgtaattgtcaatctgttcgtgaatgagtcggtgaccaatgctacactgattaatgaactggtgcgcaaaagcactgaagcaccagtgaccccaaatactgagatagctgatgtatcctcaccaactagtgactatgtcaagatcctggttgcagctgttgctggcaccataactgtcgttgtagttattttcatcactgctgtagtaagatgtcgccaggcaccacaccttaaggctgctcagaaaaacaagcagaattctgaatgggctaccccaaacccagaaaacaggcagatgataatgatgaagaaaaagaaaaagaagaagaagcattcccctaagaacttgctgcttaattttgtcactattgaagaaactaaggcagatgatgttgacagtgatggaaacagagtcacactagaccttcctattgatctagaagagcaaacaatgggaaagtacaattgggtaactacacctactactttcaagcccgacagccctgatttggcccgacactacaaatctgcctctccacagcctgccttccaaattcagcctgaaactcccctgaattcgaagcaccacatcatccaagaactgcctctcgataacacctttgtggcctgtgactctatctccaagtgttcctcaagcagttcagatccctacagcgtttctgactgtggctatccagtgacgaccttcgaggtacctgtgtccgtacacaccagaccgccaatgaaggaggttgtgcgatcttgcacccccatgaaagagtctacaactatggagatctggattcatccccaaccacagcggaaatctgaagggaaagtggcaggaaagtcccagcggcgtgtcacatttcacctgccagaaggctctcaggaaagcagcagtgatggtggactgggagaccatgatgcaggcagccttaccagcacatctcatggcctgccccttggctatcctcaggaggagtactttgatcgtgctacacccagcaatcgcactgaaggggatggcaactccgatcctgaatctactttcatacctggactaaagaaagctgcagaaataactgttcaaccaactgtggaagaggcctctgacaactgcactcaagaatgtctcatctatggccattctgatgcctgctggatgccggcatctctggatcattccagctcttcgcaagcacaggcctctgctctatgccacagcccaccactgtcacaggcctctactcagcaccacagcccacgagtgacacagaccattgctctctgccacagccctccagtgacacagaccatcgcattgtgccacagcccaccaccgatacaggtgtctgctctccaccacagtcctcctctagtgcaggctactgcacttcaccacagcccaccatcagcacaggcctcagccctctgctacagccctcctttagcacaggctgctgcaatcagccacagctctcctctgccacaggttattgccctccatcgtagtcaggcccaatcatcagtcagtttgcagcaaggttgggtgcaaggtgctgatgggctatgctctgttgatcagggagtgcaaggtagtgcaacatctcagttttacaccatgtctgaaagacttcatcccagtgatgattcaattaaagtcattcctttgacaaccttcactccacgccaacaggccagaccgtccagaggtgattcccccattatggaagaacatcccttgtaaagctaaaatagttacttcaaattttcagaaaagatgtatatagtcaaaatttaagatacaattccaatgagtattctgattatcagatttgtaaataactatgtaaatagaaacagataccagaataaatctacagctagacccttagtcaatagttaaccaaaaaattgcaatttgtttaattcagaatgtgtatttaaaaagaaaaggaatttaacaatttgcatccccttgtacagtaaggcttatcatgacagagcgcactatttctgatgtacagtattttttgttgtttttatcatcatgtgcaatattactgatttgtttccatgctgattgtgtggaaccagtatgtagcaaatggaaagcctagaaatatcttattttctaagtttacctttagtttacctaaacttttgttcagataacgttaaaaggtatacgtactctagcctttttttgggctttctttttgatttttgtttgttgttttcagtttttttgttgttgttagtgagtctcccttcaaaatacgcagtaggtagtgtaaatactgcttgtttgtgtctctctgctgtcatgttttctaccttattccaatactatattgttgataaaatttgtatatacattttcaataaagaatatgtataaactgtacagatctagatctacaacctatttctctactctttagtagagttcgagacacagaagtgcaataactgccctaattaagcaactatttgttaaaaagggcctctttttactttaatagtttagtgtaaagtacatcagaaataaagctgtatctgccattttaagcctgtagtccattattacttgggtctttacttctgggaatttgtatgtaacagcctagaaaattaaaaggaggtggatgcatccaaagcacgagtcacttaaaatatcgacggtaaactactattttgtagagaaactcaggaagatttaaatgttgatttgacagctcaataggctgttaccaaagggtgttcagtaaaaataacaaatacatgtaactgtagataaaaccatatactaaatctataagactaagggatttttgttattctagctcaacttactgaagaaaaccactaataacaacaagaatatcaggaaggaacttttcaagaaatgtaattataaatctacatcaaacagaattttaaggaaaaatgcagagggagaaataaggcacatgactgcttcttgcagtcaacaagaaataccaataacacacacagaacaaaaaccatcaaaatctcatatatgaaataaaatatattcttctaagcaaagaaacagtactattcatagaaaacattagttttcttctgttgtctgttatttccttcttgtatcctcttaactggccattatcttgtatgtgcacattttataaatgtacagaaacatcaccaacttaattttcttccatagcaaaactgagaaaataccttgtttcagtataacactaaaccaagagacaattgatgtttaatgggggcggttggggtgggggggggagtcaatatctcctattgattaacttagacatagattttgtaatgtataacttgatatttaatttatgattaaactgtgtgtaaattttgtaacataaactgtggtaattgcataatttcattggtgaggatttccactgaatattgagaaagtttcttttcatgtgcccagcaggttaagtagcgttttcagaatatacattattcccatccattgtaaagttccttaagtcatatttgactgggcgtgcagaataacttcttaacttttaactatcagagtttgattaataaaattaattaatgttttttctccttcgtgttgttaatgttccaagggatttggagcatactggttttccaggtgcatgtgaatcccgaaggactgatgatatttgaatgtttattaaattattatcatacaaatgtgttgatattgtggctattgttgatgttgaaaattttaaacttggggaagattaagaaaagaaccaatagtgacaaaaatcagtgcttccagtagattttagaacattctttgcctcaaaaaacctgcaaagatgatgtgagattttttcttgtgttttaattattttcacattttctctctgcaaaactttagttttctgatgatctacacacacacacacacacacacgtgcacacacacacacatttaaatgatataaaaagaagaggttgaaagattattaaataacttatcaggcatctcaatggttactatctatgttagtgaaaatcaaataggactcaaagttggatatttgggatttttcttctgacagtataatttattgagttactagggaggttcttaaatcctcatatctggaaacttgtgacgttttgacacctttcctatagatgatataggaatgaaccaatacgcttttattaccctttctaactctgattttataatcagacttagattgtgtttagaatattaaatgactgggcaccctcttcttggtttttaccagagaggctttgaatggaagcaggctgagagtagccaaagaggcaaggggtattagcccagttattctcccctatgccttccttctctttctaagcatccactaggtctggccttggaaacctgttacttctagggcttcagatctgatgatatctttttcatcacattacaagttatttctctgactgaatagacagtggtataggttgacacagcacacaagtggctattgtgatgtatgatgtatgtagtcctacaactgcaaaacgtcttactgaaccaacaatcaaaaaatggttctgttttaaaaaggattttgtttgatttgaaattaaaacttcaagctgaatgacttatatgagaataatacgttcaatcaaagtagttattctattttgtgtccatattccattagattgtgattattaattttctagctatggtattactatatcacacttgtgagtatgtattcaaatactaagtatcttatatgctacgtgcatacacattcttttcttaaactttacctgtgttttaactaatattgtgtcagtgtattaaaaattagcttttacatatgatatctacaatgtaataaatttagagagtaattttgtgtattcttatttacttaacattttacttttaattatgtaaatttggttagaaaataataataaatggttagtgctattgtgtaatggtagcagttacaaagagcctctgccttcccaaactaatatttatcacacatggtcattaaatgggaaaaaaatagactaaacaaatcacaaattgttcagttcttaaaatgtaattatgtcacacacacaaaaaatccttttcaatcctgagaaaattaaaggcgttttactcacatggctatttcaacattagttttttttgtttgtttctttttcatggtattactgaaggtgtgtatactccctaatacacatttatgaaaatctacttgtttaggcttttatttatactcttctgatttatattttttattataattattatttcttatctttcttcttttatattttttggaaaccaaatttatagttagtttaggtaaactttttattatgaccattagaaactattttgaatgcttccaactggctcaattggccgggaaaacatgggagcaagagaagctgaaatatatttctgcaagaacctttctatattatgtgccaattaccacaccagatcaattttatgcagaggccttaaaatattctttcacagtagctttcttacactaaccgtcatgtgcttttagtaaatatgatttttaaaagcagttcaagttgacaacagcagaaacagtaacaaaaaaatctgctcagaaaaatgtatgtgcacaaataaaaaaaattaatggcaattgtttagtgattgtaagtgatactttttaaagagtaaactgtgtgaaatttatactatccctgcttaaaatattaagatttttatgaaatatgtatttatgtttgtattgtgggaagattcctcctctgtgatatcatacagcatctgaaagtgaacagtatcccaaagcagttccaaccatgctttggaagtaagaaggttgactattgtatggccaaggatggcagtatgtaatccagaagcaaacttgtattaattgttctatttcaggttctgtattgcatgttttcttattaatatatattaataaaagttatgagaaat

SEQ ID NO: 2889 - DNA, 9146 bp, Homo sapiens
ctggtggtccagtacctccaaagatatggaatacactcctgaaatatcctgaaaacttttttttttcagaatcctttaataagcagttatgtcaatctgaaagttgcttacttgtactttatattaatagctattcttgtttttcttatccaaagaaaaatcctctaatccccttttcacatgatagttgttaccatgtttaggcattagtcacatcaacccctctcctctcccaaacttctcttcttcaaatcaaactttattagtccctcctttataatgattccttgcctcgttttatccagatcaattttttttcactttgatgcccagagctgaagaaatggactactgtataaattattcattgccaagagaataattgcattttaaacccatattataacaaagaataatgattatattttgtgatttgtaacaaataccctttattttcccttaactattgaattaaatattttaattatttgtattctctttaactatcttggtatattaaagtattatcttttatatatttatcaatggtggacacttttataggtactctgtgtcatttttgatactgtaggtatcttatttcatttatctttattcttaatgtacgaattcataatatttgattcagaacaaatttatcactaattaacagagtgtcaattatgctaacatctcatttactgattttaatttaaaacagtttttgttaacatgcatgtttagggttggcttcttaataatttcttcttcctcttctctctctcctcttcttttggtcagtgttgtgcgggttaatacaacaaactgtaacaagtgtacctggtatggacttgttgtccgggacgtacattttcgcggtcctgctagcatgcgtggtgttccactctggcgcccaggagaaaaactacaccatccgagaagaaatgccagaaaacgtcctgataggcgacttgttgaaagaccttaacttgtcgctgattccaaacaagtccttgacaactgctatgcagttcaagctagtgtacaagaccggagatgtgccactgattcgaattgaagaggatactggtgagatcttcactactggcgctcgcattgatcgtgagaaattatgtgctggtatcccaagggatgagcattgcttttatgaagtggaggttgccattttgccggatgaaatatttagactggttaagatacgttttctgatagaagatataaatgataatgcaccattgttcccagcaacagttatcaacatatcaattccagagaactcggctataaactctaaatatactctcccagcggctgttgatcctgacgtaggaataaacggagttcaaaactacgaactaattaagagtcaaaacatttttggcctcgatgtcattgaaacaccagaaggagacaagatgccacaactgattgttcaaaaggagttagatagggaagagaaggatacctacgtgatgaaagtaaaggttgaagatggtggctttcctcaaagatccagtactgctattttgcaagtgagtgttactgatacaaatgacaaccacccagtctttaaggagacagagattgaagtcagtataccagaaaatgctcctgtaggcacttcagtgacacagctccatgccacagatgctgacataggtgaaaatgccaagatccacttctctttcagcaatctagtctccaacattgccaggagattatttcacctcaatgccaccactggacttatcacaatcaaagaaccactggatagggaagaaacaccaaaccacaagttactggttttggcaagtgatggtggattgatgccagcaagagcaatggtgctggtaaatgttacagatgtcaatgataatgtcccatccattgacataagatacatcgtcaatcctgtcaatgacacagttgttctttcagaaaatattccactcaacaccaaaattgctctcataactgtgacggataaggatgcggaccataatggcagggtgacatgcttcacagatcatgaaatccctttcagattaaggccagtattcagtaatcagttcctcctggagactgcagcatatcttgactatgagtccacaaaagaatatgccattaaattactggctgcagatgctggcaaacctcctttgaatcagtcagcaatgctcttcatcaaagtgaaagatgaaaatgacaatgctccagttttcacccagtctttcgtaactgtttctattcctgagaataactctcctggcatccagttgacgaaagtaagtgcaatggatgcagacagtgggcctaatgctaagatcaattacctgctaggccctgatgctccacctgaattcagcctggattgtcgtacaggcatgctgactgtagtgaagaaactagatagagaaaaagaggataaatatttattcacaattctggcaaaagataacggggtaccacccttaaccagcaatgtcacagtctttgtaagcattattgatcagaatgacaatagcccagttttcactcacaatgaatacaacttctatgtcccagaaaaccttccaaggcatggtacagtaggactaatcactgtaactgatcctgattatggagacaattctgcagttacgctctccattttagatgagaatgatgacttcaccattgattcacaaactggtgtcatccgaccaaatatttcatttgatagagaaaaacaagaatcttacactttctatgtaaaggctgaggatggtggtagagtatcacgttcttcaagtgccaaagtaaccataaatgtggttgatgtcaatgacaacaaaccagttttcattgtccctccttccaactgttcttatgaattggttctaccgtccactaatccaggcacagtggtctttcaggtaattgctgttgacaatgacactggcatgaatgcagaggttcgttacagcattgtaggaggaaacacaagagatctgtttgcaatcgaccaagaaacaggcaacataacattgatggagaaatgtgatgttacagaccttggtttacacagagtgttggtcaaagctaatgacttaggacagcctgattctctcttcagtgttgtaattgtcaatctgttcgtgaatgagtcggtgaccaatgctacactgattaatgaactggtgcgcaaaagcactgaagcaccagtgaccccaaatactgagatagctgatgtatcctcaccaactagtgactatgtcaagatcctggttgcagctgttgctggcaccataactgtcgttgtagttattttcatcactgctgtagtaagatgtcgccaggcaccacaccttaaggctgctcagaaaaacaagcagaattctgaatgggctaccccaaacccagaaaacaggcagatgataatgatgaagaaaaagaaaaagaagaagaagcattcccctaagaacttgctgcttaattttgtcactattgaagaaactaaggcagatgatgttgacagtgatggaaacagagtcacactagaccttcctattgatctagaagagcaaacaatgggaaagtacaattgggtaactacacctactactttcaagcccgacagccctgatttggcccgacactacaaatctgcctctccacagcctgccttccaaattcagcctgaaactcccctgaattcgaagcaccacatcatccaagaactgcctctcgataacacctttgtggcctgtgactctatctccaagtgttcctcaagcagttcagatccctacagcgtttctgactgtggctatccagtgacgaccttcgaggtacctgtgtccgtacacaccagaccgccaatgaaggaggttgtgcgatcttgcacccccatgaaagagtctacaactatggagatctggattcatccccaaccacagtcccagcggcgtgtcacatttcacctgccagaaggctctcaggaaagcagcagtgatggtggactgggagaccatgatgcaggcagccttaccagcacatctcatggcctgccccttggctatcctcaggaggagtactttgatcgtgctacacccagcaatcgcactgaaggggatggcaactccgatcctgaatctactttcatacctggactaaagaaagctgcagaaataactgttcaaccaactgtggaagaggcctctgacaactgcactcaagaatgtctcatctatggccattctgatgcctgctggatgccggcatctctggatcattccagctcttcgcaagcacaggcctctgctctatgccacagcccaccactgtcacaggcctctactcagcaccacagcccacgagtgacacagaccattgctctctgccacagccctccagtgacacagaccatcgcattgtgccacagcccaccaccgatacaggtgtctgctctccaccacagtcctcctctagtgcaggctactgcacttcaccacagcccaccatcagcacaggcctcagccctctgctacagccctcctttagcacaggctgctgcaatcagccacagctctcctctgccacaggttattgccctccatcgtagtcaggcccaatcatcagtcagtttgcagcaaggttgggtgcaaggtgctgatgggctatgctctgttgatcagggagtgcaaggtagtgcaacatctcagttttacaccatgtctgaaagacttcatcccagtgatgattcaattaaagtcattcctttgacaaccttcactccacgccaacaggccagaccgtccagaggtgattcccccattatggaagaacatcccttgtaaagctaaaatagttacttcaaattttcagaaaagatgtatatagtcaaaatttaagatacaattccaatgagtattctgattatcagatttgtaaataactatgtaaatagaaacagataccagaataaatctacagctagacccttagtcaatagttaaccaaaaaattgcaatttgtttaattcagaatgtgtatttaaaaagaaaaggaatttaacaatttgcatccccttgtacagtaaggcttatcatgacagagcgcactatttctgatgtacagtattttttgttgtttttatcatcatgtgcaatattactgatttgtttccatgctgattgtgtggaaccagtatgtagcaaatggaaagcctagaaatatcttattttctaagtttacctttagtttacctaaacttttgttcagataacgttaaaaggtatacgtactctagcctttttttgggctttctttttgatttttgtttgttgttttcagtttttttgttgttgttagtgagtctcccttcaaaatacgcagtaggtagtgtaaatactgcttgtttgtgtctctctgctgtcatgttttctaccttattccaatactatattgttgataaaatttgtatatacattttcaataaagaatatgtataaactgtacagatctagatctacaacctatttctctactctttagtagagttcgagacacagaagtgcaataactgccctaattaagcaactatttgttaaaaagggcctctttttactttaatagtttagtgtaaagtacatcagaaataaagctgtatctgccattttaagcctgtagtccattattacttgggtctttacttctgggaatttgtatgtaacagcctagaaaattaaaaggaggtggatgcatccaaagcacgagtcacttaaaatatcgacggtaaactactattttgtagagaaactcaggaagatttaaatgttgatttgacagctcaataggctgttaccaaagggtgttcagtaaaaataacaaatacatgtaactgtagataaaaccatatactaaatctataagactaagggatttttgttattctagctcaacttactgaagaaaaccactaataacaacaagaatatcaggaaggaacttttcaagaaatgtaattataaatctacatcaaacagaattttaaggaaaaatgcagagggagaaataaggcacatgactgcttcttgcagtcaacaagaaataccaataacacacacagaacaaaaaccatcaaaatctcatatatgaaataaaatatattcttctaagcaaagaaacagtactattcatagaaaacattagttttcttctgttgtctgttatttccttcttgtatcctcttaactggccattatcttgtatgtgcacattttataaatgtacagaaacatcaccaacttaattttcttccatagcaaaactgagaaaataccttgtttcagtataacactaaaccaagagacaattgatgtttaatgggggcggttggggtgggggggggagtcaatatctcctattgattaacttagacatagattttgtaatgtataacttgatatttaatttatgattaaactgtgtgtaaattttgtaacataaactgtggtaattgcataatttcattggtgaggatttccactgaatattgagaaagtttcttttcatgtgcccagcaggttaagtagcgttttcagaatatacattattcccatccattgtaaagttccttaagtcatatttgactgggcgtgcagaataacttcttaacttttaactatcagagtttgattaataaaattaattaatgttttttctccttcgtgttgttaatgttccaagggatttggagcatactggttttccaggtgcatgtgaatcccgaaggactgatgatatttgaatgtttattaaattattatcatacaaatgtgttgatattgtggctattgttgatgttgaaaattttaaacttggggaagattaagaaaagaaccaatagtgacaaaaatcagtgcttccagtagattttagaacattctttgcctcaaaaaacctgcaaagatgatgtgagattttttcttgtgttttaattattttcacattttctctctgcaaaactttagttttctgatgatctacacacacacacacacacacacgtgcacacacacacacatttaaatgatataaaaagaagaggttgaaagattattaaataacttatcaggcatctcaatggttactatctatgttagtgaaaatcaaataggactcaaagttggatatttgggatttttcttctgacagtataatttattgagttactagggaggttcttaaatcctcatatctggaaacttgtgacgttttgacacctttcctatagatgatataggaatgaaccaatacgcttttattaccctttctaactctgattttataatcagacttagattgtgtttagaatattaaatgactgggcaccctcttcttggtttttaccagagaggctttgaatggaagcaggctgagagtagccaaagaggcaaggggtattagcccagttattctcccctatgccttccttctctttctaagcatccactaggtctggccttggaaacctgttacttctagggcttcagatctgatgatatctttttcatcacattacaagttatttctctgactgaatagacagtggtataggttgacacagcacacaagtggctattgtgatgtatgatgtatgtagtcctacaactgcaaaacgtcttactgaaccaacaatcaaaaaatggttctgttttaaaaaggattttgtttgatttgaaattaaaacttcaagctgaatgacttatatgagaataatacgttcaatcaaagtagttattctattttgtgtccatattccattagattgtgattattaattttctagctatggtattactatatcacacttgtgagtatgtattcaaatactaagtatcttatatgctacgtgcatacacattcttttcttaaactttacctgtgttttaactaatattgtgtcagtgtattaaaaattagcttttacatatgatatctacaatgtaataaatttagagagtaattttgtgtattcttatttacttaacattttacttttaattatgtaaatttggttagaaaataataataaatggttagtgctattgtgtaatggtagcagttacaaagagcctctgccttcccaaactaatatttatcacacatggtcattaaatgggaaaaaaatagactaaacaaatcacaaattgttcagttcttaaaatgtaattatgtcacacacacaaaaaatccttttcaatcctgagaaaattaaaggcgttttactcacatggctatttcaacattagttttttttgtttgtttctttttcatggtattactgaaggtgtgtatactccctaatacacatttatgaaaatctacttgtttaggcttttatttatactcttctgatttatattttttattataattattatttcttatctttcttcttttatattttttggaaaccaaatttatagttagtttaggtaaactttttattatgaccattagaaactattttgaatgcttccaactggctcaattggccgggaaaacatgggagcaagagaagctgaaatatatttctgcaagaacctttctatattatgtgccaattaccacaccagatcaattttatgcagaggccttaaaatattctttcacagtagctttcttacactaaccgtcatgtgcttttagtaaatatgatttttaaaagcagttcaagttgacaacagcagaaacagtaacaaaaaaatctgctcagaaaaatgtatgtgcacaaataaaaaaaattaatggcaattgtttagtgattgtaagtgatactttttaaagagtaaactgtgtgaaatttatactatccctgcttaaaatattaagatttttatgaaatatgtatttatgtttgtattgtgggaagattcctcctctgtgatatcatacagcatctgaaagtgaacagtatcccaaagcagttccaaccatgctttggaagtaagaaggttgactattgtatggccaaggatggcagtatgtaatccagaagcaaacttgtattaattgttctatttcaggttctgtattgcatgttttcttattaatatatattaataaaagttatgagaaat

SEQ ID NO: 2890 - DNA, 2387 bp, Homo sapiens
cctcgtgccgcggaccccagcctctgccaggttcggtccgccatcctcgtcccgtcctccgccggcccctgccccgcgcccagggatcctccagctcctttcgcccgcgccctccgttcgctccggacaccatggacaagttttggtggcacgcagcctggggactctgcctcgtgccgctgagcctggcgcagatcgatttgaatataacctgccgctttgcaggtgtattccacgtggagaaaaatggtcgctacagcatctctcggacggaggccgctgacctctgcaaggctttcaatagcaccttgcccacaatggcccagatggagaaagctctgagcatcggatttgagacctgcaggtatgggttcatagaagggcatgtggtgattccccggatccaccccaactccatctgtgcagcaaacaacacaggggtgtacatcctcacatccaacacctcccagtatgacacatattgcttcaatgcttcagctccacctgaagaagattgtacatcagtcacagacctgcccaatgcctttgatggaccaattaccataactattgttaaccgtgatggcacccgctatgtccagaaaggagaatacagaacgaatcctgaagacatctaccccagcaaccctactgatgatgacgtgagcagcggctcctccagtgaaaggagcagcacttcaggaggttacatcttttacaccttttctactgtacaccccatcccagacgaagacagtccctggatcaccgacagcacagacagaatccctgctaccagtacgtcttcaaataccatctcagcaggctgggagccaaatgaagaaaatgaagatgaaagagacagacacctcagtttttctggatcaggcattgatgatgatgaagattttatctccagcaccatttcaaccacaccacgggcttttgaccacacaaaacagaaccaggactggacccagtggaacccaagccattcaaatccggaagtgctacttcagacaaccacaaggatgactgatgtagacagaaatggcaccactgcttatgaaggaaactggaacccagaagcacaccctcccctcattcaccatgagcatcatgaggaagaagagaccccacattctacaagcacaatccaggcaactcctagtagtacaacggaagaaacagctacccagaaggaacagtggtttggcaacagatggcatgagggatatcgccaaacacccagagaagactcccattcgacaacagggacagctgcagcctcagctcataccagccatccaatgcaaggaaggacaacaccaagcccagaggacagttcctggactgatttcttcaacccaatctcacaccccatgggacgaggtcatcaagcaggaagaaggatggatatggactccagtcatagtacaacgcttcagcctactgcaaatccaaacacaggtttggtggaagatttggacaggacaggacctctttcaatgacaacgcagcagagtaattctcagagcttctctacatcacatgaaggcttggaagaagataaagaccatccaacaacttctactctgacatcaagcaataggaatgatgtcacaggtggaagaagagacccaaatcattctgaaggctcaactactttactggaaggttatacctctcattacccacacacgaaggaaagcaggaccttcatcccagtgacctcagctaagactgggtcctttggagttactgcagttactgttggagattccaactctaatgtcaatcgttccttatcaggagaccaagacacattccaccccagtggggggtcccataccactcatggatctgaatcagatggacactcacatgggagtcaagaaggtggagcaaacacaacctctggtcctataaggacaccccaaattccagaatggctgatcatcttggcatccctcttggccttggctttgattcttgcagtttgcattgcagtcaacagtcgaagaaggtgtgggcagaagaaaaagctagtgatcaacagtggcaatggagctgtggaggacagaaagccaagtggactcaacggagaggccagcaagtctcaggaaatggtgcatttggtgaacaaggagtcgtcagaaactccagaccagtttatgacagctgatgagacaaggaacctgcagaatgtggacatgaagattggggtgtaacacctacaccattatcttggaaagaaacaaccgttggaaacataaccattacagggagctgggacacttaacagatgcaatgtgctactgattgtttcattgcgaatcttttttagcataaaattttctactcttaaaaaaaaaaaaaaaaaaaaa

SEQ ID NO: 2891 - DNA, 3058 bp, Homo sapiens
cgcgcgcggcagccccgaggcagcagagcgcggagccgggagcgcggggagcgcgggccggcggcggcgagggaggacgggggcgcagacggccggcgcgcggcgcggctaccatgggcgtgcggtgagcagccgctcgggacgacttcctcggctgcgcggcgctcgcgcggagctccccggccggcggtgcgtccccacggtcaccatgaaagacgacttcgcagaggaggaggaggtgcaatccttcggttacaagcggtttggtattcaggaaggaacacaatgtaccaaatgtaaaaataactgggcactgaagttttctatcatattattatacattttgtgtgccttgctaacaatcacagtagccattttgggatataaagttgtagagaaaatggacaatgtcacaggtggcatggaaacatctcgccaaacctatgatgacaagctcacagcagtggaaagtgacctgaaaaaattaggtgaccaaactgggaagaaagctatcagcaccaactcagaactctccaccttcagatcagacattctagatctccgtcagcaacttcgtgagattacagaaaaaaccagcaagaacaaggatacgctggagaagttacaggcgagcggggatgctctggtggacaggcagagtcaattgaaagaaactttggagaataactctttcctcatcaccactgtaaacaaaaccctccaggcgtataatggctatgtcacgaatctgcagcaagataccagcgtgctccagggcaatctgcagaaccaaatgtattctcataatgtggtcatcatgaacctcaacaacctgaacctgacccaggtgcagcagaggaacctcatcacgaatctgcagcggtctgtggatgacacaagccaggctatccagcgaatcaagaacgactttcaaaatctgcagcaggtttttcttcaagccaagaaggacacggattggctgaaggagaaagtgcagagcttgcagacactggctgccaacaactctgcgttggccaaagccaacaacgacaccctggaggatatgaacagccagctcaactcattcacaggtcagatggagaacatcaccactatctctcaagccaacgagcagaacctgaaagacctgcaggacttacacaaagatgcagagaatagaacagccatcaagttcaaccaactggaggaacgcttccagctctttgagacggatattgtgaacatcattagcaatatcagttacacagcccaccacctgcggacgctgaccagcaatctaaatgaagtcaggaccacttgcacagatacccttaccaaacacacagatgatctgacctccttgaataataccctggccaacatccgtttggattctgtttctctcaggatgcaacaagatttgatgaggtcgaggttagacactgaagtagccaacttatcagtgattatggaagaaatgaagctagtagactccaagcatggtcagctcatcaagaattttacaatactacaaggtccaccgggccccaggggtccaagaggtgacagaggatcccagggaccccctggcccaactggcaacaagggacagaaaggagagaagggggagcctggaccacctggccctgcgggtgagagaggcccaattggaccagctggtccccccggagagcgtggcggcaaaggatctaaaggctcccagggccccaaaggctcccgtggttcccctgggaagcccggccctcagggccccagtggggacccaggccccccgggcccaccaggcaaagagggactccccggccctcagggccctcctggcttccagggacttcagggcaccgttggggagcctggggtgcctggacctcggggactgccaggcttgcctggggtaccaggcatgccaggccccaagggcccccccggccctcctggcccatcaggagcggtggtgcccctggccctgcagaatgagccaaccccggcaccggaggacaatagctgcccgcctcactggaagaacttcacagacaaatgctactatttttcagttgagaaagaaatttttgaggatgcaaagcttttctgtgaagacaagtcttcacatcttgttttcataaacactagagaggaacagcaatggataaaaaaacagatggtagggagagagagccactggatcggcctcacagactcagagcgtgaaaatgaatggaagtggctggatgggacatctccagactacaaaaattggaaagctggacagccggataactggggtcatggccatgggccaggagaagactgtgctgggttgatttatgctgggcagtggaacgatttccaatgtgaagacgtcaataacttcatttgcgaaaaagacagggagacagtactgtcatctgcattataacggactgtgatgggatcacatgagcaaattttcagctctcaaaggcaaaggacactcctttctaattgcatcaccttctcatcagattgaaaaaaaaaaagcactgaaaaccaattactgaaaaaaaattgacagctagtgttttttaccatccgtcattacccaaagacttgggaactaaaatgttccccagggtgatatgctgattttcattgtgcacatggactgaatcacatagattctcctccgtcagtaaccgtgcgattatacaaattatgtcttccaaagtatggaacactccaatcagaaaaaggttatcattggtcgttgagttatgggaagaacttaagcatatactgtgtaaacagtgccatacatttctaaaatcccaagtgtaggaaaaatatgcagacatacagatatataggccaactattagtaataatatgaaatatacttaaagagcttttaaaactttgtatttttgtacaaaatatttgtcttttacaatttttttcctttttttttttttgtcattttaccgacataatacatggagccaaagaaaacaataatggtactaataaaaactcctagggtttcctgtcagatttaaaaaaa

SEQ ID NO: 2892 - DNA, 2255 bp, Homo sapiens; identical to SEQ ID NO: 1052

SEQ ID NO: 2893 - DNA, 1814 bp, Homo sapiens; identical to SEQ ID NO: 648

SEQ ID NO: 2894 - DNA, 954 bp, Homo sapiens
tcgccccttctcggccgccgtagttttttttttttttaaagaaaaaacggttacccagcaactagaaaaacaaccggaaccggcggcaccagctcggagagaaaggaggttccataggcagttcttaccaagaagatgtcgattccattctccaacacccactaccgaattccacaaggatttgggaatcttcttgaagggctgacacgcgagattctgagagagcaaccggacaatataccagcttttgcagcagcctattttgagagccttctagagaaaagagagaaaaccaactttgatccagcagaatgggggagtaaggtagaagaccgcttctataacaatcatgcattcgaggagcaagaaccacctgagaaaagtgatcctaaacaagaagagtctcagatatctgggaaggaggaagagacatcagtcaccatcttagactcttctgaggaagataaggaaaaagaagaggttgctgctgtcaaaatccaagctgccttccggggacacatagccagagaggaggcaaagaaaatgaaaacaaatagtcttcaaaatgaggaaaaagaggaaaacaagtgaggacactggttttacctccaggaaacatgaaaaataatccaaatccatcaaccttcttattaatgtcatttcttcctgaggaaggaagatttgatgttgtgaaataacattcgttactgttgtgaaaatctgtcatgagcatttgtttaataagcataccattgaaacatgccacttgaagatttctctgagatcatgagtttgtttacacttgtctcaagcctatctatagagacccttggatttagaattatagaactaaagtatctgagattacagagatctcagaggttatgtgttctaactattatcaaatgaataaatcctctctatcacatcccccaaaaaaaaaaaaaaaaaaaa

SEQ ID NO: 2895 - DNA, 1479 bp, Homo sapiens
caagtcttcactccttcctgcgagccctgaggaagccttgtgagtgcattggctggggcttggagggaagttgggctggagctggacaggagcagtgggtgcatttcaggcaggctctcctgaggtcccaggcgccagctccagctccctggctagggaaacccaccctctcagtcagcatgggggcccaagctccaggcagggtgggctggatcactagcgtcctggatctctctcagactgggcagccccgggctcattgaaatgccccggatgacttggctagtgcagaggaattgatggaaaccaccggggtgagagggaggctccccatctcagccagccacatccacaaggtgtgtgtaagggtgcaggcgccggccggttaggccaaggctctactgtctgttgcccctccaggagaacttccaaggagctttccccagacatggccaacaagggtccttcctatggcatgagccgcgaagtgcagtccaaaatcgagaagaagtatgacgaggagctggaggagcggctggtggagtggatcatagtgcagtgtggccctgatgtgggccgcccagaccgtgggcgcttgggcttccaggtctggctgaagaatggcgtgattctgagcaagctggtgaacagcctgtaccctgatggctccaagccggtgaaggtgcccgagaacccaccctccatggtcttcaagcagatggagcaggtggctcagttcctgaaggcggctgaggactatggggtcatcaagactgacatgttccagactgttgacctctttgaaggcaaagacatggcagcagtgcagaggaccctgatggctttgggcagcttggcagtgaccaagaatgatgggcactaccgtggagatcccaactggtttatgaagaaagcgcaggagcataagagggaattcacagagagccagctgcaggagggaaagcatgtcattggccttcagatgggcagcaacagaggggcctcccaggccggcatgacaggctacggacgacctcggcagatcatcagttagagcggagagggctagccctgagcccggccctcccccagctccttggctgcagccatcccgcttagcctgcctcacccacacccgtgtggtaccttcagccctggccaagctttgaggctctgtcactgagcaatggtaactgcacctgggcagctcctccctgtgcccccagcctcagcccaacttcttacccgaaagcatcactgccttggcccctccctcccggctgcccccatcacctctactgtctcctccctgggctaagcaggggagaagcgggctgggggtagcctggatgtgggccaagtccactgtcctccttggcggcaaaagcccattgaagaagaaccagcccagcctgccccctatcttgtcctggaatatttttggggttggaactcaaaaaaaaaaaaaaaaaaaaaaaa

SEQ ID NO: 2896 - DNA, 1810 bp, Homo sapiens
ggcgcttccgcaggaagaaggaagcggcgccgccatcgcctcccggcgctccctccccgactcctaagtccttcggccgccaccatgtccgcctcggctgtcttcattctggacgttaagggcaagccattgatcagccgcaactacaagggcgatgtggccatgagcaagattgagcacttcatgcctttgctggtacagcgggaggaggaaggcgccctggccccgctgctgagccacggccaggtccacttcctatggatcaaacacagcaacctctacttggtggccaccacatcgaagaatgccaatgcctccctggtgtactccttcctgtataagacaatagaggtattctgcgaatacttcaaggagctggaggaggagagcatccgggacaactttgtcatcgtctacgagttgctggacgagctcatggactttggcttcccgcagaccaccgacagcaagatcctgcaggagtacatcactcagcagagcaacaagctggagacgggcaagtcacgggtgccacccactgtcaccaacgctgtgtcctggcgctccgagggtatcaagtataagaagaacgaggtcttcattgatgtcatagagtctgtcaacctgctggtcaatgccaacggcagcgtccttctgagcgaaatcgtcggtaccatcaagctcaaggtgtttctgtcgggaatgccagagctgcggctgggcctcaatgaccgcgtgctcttcgagctcactggcctttcaggcagcaagaacaaatcagtagagctggaggatgtaaaattccaccagtgcgtgcggctctctcgctttgacaacgaccgcaccatctccttcatcccgcctgatggtgactttgagctcatgtcataccgcctcagcacccaggtcaagccactgatctggattgagtctgtcattgagaagttctcccacagccgcgtggagatcatggtcaaggccaaggggcagtttaagaaacagtcagtggccaacggtgtggagatatctgtgcctgtacccagcgatgccgactcccccagattcaagaccagtgtgggcagcgccaagtatgtgccggagagaaacgtcgtgatttggagtattaagtctttcccggggggcaaggagtacttgatgcgagcccactttggcctcccccgtgtggaaaaggaagaggtggagggccggccccccatcggggtcaagtttgagatcccctacttcaccgtctctgggatccaggtccgatacatgaagatcattgagaaaagtggttaccaggccctgccctgggttcgctacatcacccagagtggcgattaccaacttcgtaccagctagaagggagaagagatgggggcttgaacacggggcttccttacagccccggatgcagattttagagggagggcaggtgcgggctgtgtgtgtctgtgtgagggcaggtcctggacttggcagtttcttgctcccagcacccgccccttcctcacctcttccttattccataggctgggagagaaactctctgcttccctcgcccttggagctttccccatccccctgattttatatgaagaaatagaagaggggcttgaagtccccctcgcgagtgccttcttgcaattacctgccttagcgggtgttgcgggtccctccttcacagccgctgagcccagaggtcccgctggcccctcctctgaattttaggatgtcattaaaaagatgaatctaaaaaaaaaaaaaaaaaaaaaaaaaaaaaaaaaaaaaaaaaaaaaaaaaaaaaaaa

SEQ ID NO: 2897 - DNA, 1619 bp, Homo sapiens
ctcccttcctcaggcatcagagcggagacttcagggagaccagagcccagcttgccaggcactgagctagaagccctgccatggcacccctgagaccccttctcatactggccctgctggcatgggttgctctggctgaccaagagtcatgcaagggccgctgcactgagggcttcaacgtggacaagaagtgccagtgtgacgagctctgctcttactaccagagctgctgcacagactatacggctgagtgcaagccccaagtgactcgcggggatgtgttcactatgccggaggatgagtacacggtctatgacgatggcgaggagaaaaacaatgccactgtccatgaacaggtggggggcccctccctgacctctgacctccaggcccagtccaaagggaatcctgagcagacacctgttctgaaacctgaggaagaggcccctgcgcctgaggtgggcgcctctaagcctgaggggatagactcaaggcctgagacccttcatccagggagacctcagcccccagcagaggaggagctgtgcagtgggaagcccttcgacgccttcaccgacctcaagaacggttccctctttgccttccgagggcagtactgctatgaactggacgaaaaggcagtgaggcctgggtaccccaagctcatccgagatgtctggggcatcgagggccccatcgatgccgccttcacccgcatcaactgtcaggggaagacctacctcttcaagggtagtcagtactggcgctttgaggatggtgtcctggaccctgattacccccgaaatatctctgacggcttcgatggcatcccggacaacgtggatgcagccttggccctccctgcccatagctacagtggccgggagcgggtctacttcttcaaggggaaacagtactgggagtaccagttccagcaccagcccagtcaggaggagtgtgaaggcagctccctgtcggctgtgtttgaacactttgccatgatgcagcgggacagctgggaggacatcttcgagcttctcttctggggcagaacctctgctggtaccagacagccccagttcattagccgggactggcacggtgtgccagggcaagtggacgcagccatggctggccgcatctacatctcaggcatggcaccccgcccctccttggccaagaaacaaaggtttaggcatcgcaaccgcaaaggctaccgttcacaacgaggccacagccgtggccgcaaccagaactcccgccggccatcccgcgccatgtggctgtccttgttctccagtgaggagagcaacttgggagccaacaactatgatgactacaggatggactggcttgtgcctgccacctgtgaacccatccagagtgtcttcttcttctctggagacaagtactaccgagtcaatcttcgcacacggcgagtggacactgtggaccctccctacccacgctccatcgctcagtactggctgggctgcccagctcctggccatctgtaggagtcagagcccacatggccgggccctctgtagctccctcctcccatctccttcccccagcccaataaaggtcccttagccccgaaaaaaaaaaaaaaaaaa

SEQ ID NO: 2898 - DNA, 2212 bp, Homo sapiens
gctgagtccaagagatagcaaatcgagtcttaaataatccggggagaaagacgcccgggtagatttgaggtgcagccttggagggagggattagaagccgctagactttttttcctcccctctcagtagcacggagtccgaattaattggatttcattcactggggaggaacaaaaactatctgggcagcttcattgagagagattcattgacactaagagccagcggctgcagctgggtgcagagagaacctccggctttacttctgtctcgtctgccccaaccgctagcctcggcttgggtaaggcgaggcggaattaaaccccgctccgagagcggcagcttcgcgcgcggtgcgctcggcctatgcctgccccgaggggcgtctggtaggcaccccgccctctcccgcagctcgacccccatgatagatacgctcagacccgtgcccttcgcgtcggaaatggcgatcagcaagacggtggcgtggctcaacgagcagctggagctgggcaacgagcggctgctgctgatggactgccggccgcaggagctatacgagtcgtcgcacatcgagtcggccatcaacgtggccatcccgggcatcatgctgcggcgcctgcagaagggtaacctgccggtgcgcgcgctcttcacgcgcggcgaggaccgggaccgcttcacccggcgctgtggcaccgacacagtggtgctctacgacgagagcagcagcgactggaacgagaatacgggcggcgagtcggtgctcgggctgctgctcaagaagctcaaggacgagggctgccgggcgttctacctggaaggtggcttcagtaagttccaagccgagttctccctgcattgcgagaccaatctagacggctcgtgtagcagcagctcgccgccgttgccagtgctggggctcgggggcctgcggatcagctctgactcttcctcggacatcgagtctgaccttgaccgagaccccaatagtgcaacagactcggatggtagtccgctgtccaacagccagccttccttcccagtggagatcttgcccttcctctacttgggctgtgccaaagactccaccaacttggacgtgttggaggaattcggcatcaagtacatcttgaacgtcacccccaatttgccgaatctctttgagaacgcaggagagtttaaatacaagcaaatccccatctcggatcactggagccaaaacctgtcccagtttttccctgaggccatttctttcatagatgaagcccggggcaagaactgtggtgtcttggtacattgcttggctggcattagccgctcagtcactgtgactgtggcttaccttatgcagaagctcaatctgtcgatgaacgatgcctatgacattgtcaaaatgaaaaaatccaacatatcccctaacttcaacttcatgggtcagctgctggacttcgagaggacgctgggactcagcagcccatgtgacaacagggttccagcacagcagctgtattttaccaccccttccaaccagaatgtataccaggtggactctctgcaatctacgtgaaagaccccacacccctccttgctggaatgtgtctggcccttcagcagtttctcttggcagcatcagctgggctgctttctttgtgtgtggccccaggtgtcaaaatgacaccagctgtctgtactagacaaggttaccaagtgcggaattggttaatactaacagagagatttgctccattctctttggaataacaggacatgctgtatagatacaggcagtaggtttgctctgtacccatgtgtacagcctacccatgcagggactgggattcgaggacttccaggcgcatagggtagaaccaaatgatagggtaggagcatgtgttctttagggccttgtaaggctgtttccttttgcatctggaactgactatataattgtcttcaatgaagactaattcaattttgcatatagaggagccaaagagagatttcagctctgtatttgtggtatcagtttggaaaaaaaatctgatactccatttgattattgtaaatatttgatcttgaatcacttgacagtgtttgtttgaattgtgtttgttttttcctttgatgggcttaaaagaaattatccaaagggagaaagagcagtatgccacttcttaaaacagaacaaaacaaaaaaaaaaaaaaaaaa

SEQ ID NO: 2899 - DNA, 1536 bp, Homo sapiens
gaatgacaccagggtttagagataaaacatttgttgttcagggatttggtaatgtgggcctacactctatgagatatttacatcgttttggtgctaaatgtattgctgttggtgagtctgatgggagtatatggaatccagatggtattgacccaaaggaactggaagacttcaaattgcaacatgggtccattctgggcttccccaaggcaaagccctatgaaggaagcatcttggaggtcgactgtgacatactgatcccagctgccactgagaagcagttgaccaaatccaacgcacccagagtcaaagccaagatcattgctgaaggtgccaatgggccaacaactccagaagctgataagatcttcctggagagaaacattttggttattccagatctctacttgaatgctggaggagtgacagtatcttactttgagtggctgaagaatctaaatcatgtcagctatggccgtttgaccttcaaatatgaaagggattctaactaccacttgctcctgtctgttcaagagagtttagaaagaaaatttggaaagcatggtggaactattcccattgtacccacggcagagttccaagacagtatatcgggtgcatctgagaaagacattgtgcactctgccttggcatacacaatggagcgttctgccaggcaaattatgcacacagccatgaagtataacctgggattggacctgagaacagctgcctatgtcaatgccattgaaaaagtcttcaaagtgtacagtgaagctggtgtgaccttcacatagatggatcatggctgacttcctcactaacctcttcacgtgtaacttctgcagacctaccacaagtttacatgtaaccacagaaatccctttctctcctgactcattactaatggataccattctcaacaagtcaatccaaatcagcccgttaaggagaaagaaattaatatacaagctgagtgtgaaagtagaaatcacctacaccagagagctattttggtattttgcctttaaataaaaagcctcctccatatggctgtgcagccttgctctgtggcttttcccagcacaatcagtgctagtgctggggaagggacagtcaagagcagtcagttgcttacttattttgctctggatgagtctgggacacgctgtaactttaacacatttaagaagaaggtgtgtggccttttcagaaggtggcatggtcctcaagtgagttcttagtattttatatcagcaaaataactcaattttgcagattgcaaacaaatataaaagctgtttctgtttatgaattttattcttttagaatagaataagtacatgctgctgtaataaaattgcctttaatcacttaacaagcctaaccttgactcagtgaatgcctataaaaataataaatgaaaaaaaacagtatttttatatcataaaagtttcatttgtagcttatcattcacgtattgttgtccagcaaacattaaaagccctgtggataaaaaaaaaaaaaaaaaaaaaa

SEQ ID NO: 2900 - DNA, 3534 bp, Homo sapiens
tcgaggtcgacatttataccgtctgagggtagcagctcgaaagtagaagaaagtgttgccagggacggcagtatctctttgtgtgaccctggcggcttatgggacgttggcttcagacctttgtgatacaccatgctgcgtgggacgatgacggcgtggagaggaatgaggcctgaggtcacactggcttgcctcctcctagccacagcaggctgctttgctgacttgaacgaggtccctcaggtcaccgtccagcctgcgtccaccgtccagaagcccggaggcactgtgatcttgggctgcgtggtggaacctccaaggatgaatgtaacctggcgcctgaatggaaaggagctgaatggctcggatgatgctctgggtgtcctcatcacccacgggaccctcgtcatcactgcccttaacaaccacactgtgggacggtaccagtgtgtggcccggatgcctgcgggggctgtggccagcgtgccagccactgtgacactagccaatctccaggacttcaagttagatgtgcagcacgtgattgaagtggatgagggaaacacagcagtcattgcctgccacctgcctgagagccaccccaaagcccaggtccggtacagcgtcaaacaagagtggctggaggcctccagaggtaactacctgatcatgccctcagggaacctccagattgtgaatgccagccaggaggacgagggcatgtacaagtgtgcagcctacaacccagtgacccaggaagtgaaaacctccggctccagcgacaggctacgtgtgcgccgctccaccgctgaggctgcccgcatcatctaccccccagaggcccaaaccatcatcgtcaccaaaggccagagtctcattctggagtgtgtggccagtggaatcccacccccacgggtcacctgggccaaggatgggtccagtgtcaccggctacaacaagacgcgcttcctgctgagcaacctcctcatcgacaccaccagcgaggaggactcaggcacctaccgctgcatggccgacaatggggttgggcagcccggggcagcggtcatcctctacaatgtccaggtgtttgaaccccctgaggtcaccatggagctatcccagctggtcatcccctggggccagagtgccaagcttacctgtgaggtgcgtgggaaccccccgccctccgtgctgtggctgaggaatgctgtgcccctcatctccagccagcgcctccggctctcccgcagggccctgcgcgtgctcagcatggggcctgaggacgaaggcgtctaccagtgcatggccgagaacgaggttgggagcgcccatgccgtagtccagctgcggacctccaggccaagcataaccccaaggctatggcaggatgctgagctggctactggcacacctcctgtatcaccctccaaactcggcaaccctgagcagatgctgagggggcaaccggcgctccccagacccccaacgtcagtggggcctgcttccccgcagtgtccaggagagaaggggcagggggctcccgccgaggctcccatcatcctcagctcgccccgcacctccaagacagactcatatgaactggtgtggcggcctcggcatgagggcagtggccgggcgccaatcctctactatgtggtgaaacaccgcaaggtcacaaattcctctgacgattggaccatctctggcattccagccaaccagcaccgcctgaccctcaccagacttgaccccgggagcttgtatgaagtggagatggcagcttacaactgtgcgggagagggccagacagccatggtcaccttccgaactggacggcggcccaaacccgagatcatggccagcaaagagcagcagatccagagagacgaccctggagccagtccccagagcagcagccagccagaccacggccgcctctcccccccagaagctcccgacaggcccaccatctccacggcctccgagacctcagtgtacgtgacctggattccccgtgggaatggtgggttcccaatccagtccttccgtgtggagtacaagaagctaaagaaagtgggagactggattctggccaccagcgccatccccccatcgcggctgtccgtggagatcacgggcctagagaaaggcacctcctacaagtttcgagtccgggctctgaacatgctgggggagagcgagcccagcgccccctctcggccctacgtggtgtcgggctacagcggtcgcgtgtacgagaggcccgtggcaggtccttatatcaccttcacggatgcggtcaatgagaccaccatcatgctcaagtggatgtacatcccagcaagtaacaacaacaccccaatccatggcttttatatctattatcgacccacagacagtgacaatgatagtgactacaagaaggatatggtggaaggggacaagtactggcactccatcagccacctgcagccagagacctcctacgacattaagatgcagtgcttcaatgaaggaggggagagcgagttcagcaacgtgatgatctgtgagaccaaagctcggaagtcttctggccagcctggtcgactgccacccccaactctggccccaccacagccgccccttcctgaaaccatagagcggccggtgggcactggggccatggtggctcgctccagcgacctgccctatctgattgtcggggtcgtcctgggctccatcgttctcatcatcgtcaccttcatccccttctgcttgtggagggcctggtctaagcaaaaacatacaacagacctgggttttcctcgaagtgcccttccaccctcctgcccgtatactatggtgccattgggaggactcccaggccaccaggccagtggacagccctacctcagtggcatcagtggacgggcctgtgctaatgggatccacatgaataggggctgcccctcggctgcagtgggctacccgggcatgaagccccagcagcactgcccaggcgagcttcagcagcagagtgacaccagcagcctgctgaggcagacccatcttggcaatggatatgacccccaaagtcaccagatcacgaggggtcccaagtctagcccggacgagggctctttcttatacacactgcccgacgactccactcaccagctgctgcagccccatcacgactgctgccaacgccaggagcagcctgctgctgtgggccagtcaggggtgaggagagcccccgacagtcctgtcctggaagcagtgtgggaccctccatttcactcagggcccccatgctgcttgggccttgtgccagttgaagaggtggacagtcctgactcctgccaagtgagtggaggagactggtgcccccagcaccccgtaggggcctacgtaggacaggaacctggaatgcagctctccccggggccactggtgcgtgtgtcttttgaaacaccacctctcacaatttaggcagaagctgatatcccagaaagactatatattgttttttttttaaaaaaaaagtcg

SEQ ID NO: 2901 - DNA, 503 bp, Homo sapiens
aggcacagacaccaaggacagagacgctggctaggccgccctccccactgttaccaacatgaagctgctcgcagcaactgtgctactcctcaccatctgcagccttgaaggagctttggttcggagacaggcaaaggagccatgtgtggagagcctggtttctcagtacttccagaccgtgactgactatggcaaggacctgatggagaaggtcaagagcccagagcttcaggccgaggccaagtcttactttgaaaagtcaaaggagcagctgacacccctgatcaagaaggctggaacggaactggttaacttcttgagctatttcgtggaacttggaacacagcctgccacccagtgaagtgtccagaccattgtcttccaaccccagctggcctctagaacacccactggccagtcctagagctcctgtccctacccactctttgctacaataaatgctgaatgaatgcaaaaaaaaaaaaaaaaaaaaaaaaaaaaaa

SEQ ID NO: 2902 - DNA, 1471 bp, Homo sapiens
attaaaaggttccctggttgtgaaaatacatgagataaatcatgaaggccactatcatcctccttctgcttgcacaagtttcctgggctggaccgtttcaacagagaggcttatttgactttatgctagaagatgaggcttctgggataggcccagaagttcctgatgaccgcgacttcgagccctccctaggcccagtgtgccccttccgctgtcaatgccatcttcgagtggtccagtgttctgatttgggtctggacaaagtgccaaaggatcttccccctgacacaactctgctagacctgcaaaacaacaaaataaccgaaatcaaagatggagactttaagaacctgaagaaccttcacgcattgattcttgtcaacaataaaattagcaaagttagtcctggagcatttacacctttggtgaagttggaacgactttatctgtccaagaatcagctgaaggaattgccagaaaaaatgcccaaaactcttcaggagctgcgtgcccatgagaatgagatcaccaaagtgcgaaaagttactttcaatggactgaaccagatgattgtcatagaactgggcaccaatccgctgaagagctcaggaattgaaaatggggctttccagggaatgaagaagctctcctacatccgcattgctgataccaatatcaccagcattcctcaaggtcttcctccttcccttacggaattacatcttgatggcaacaaaatcagcagagttgatgcagctagcctgaaaggactgaataatttggctaagttgggattgagtttcaacagcatctctgctgttgacaatggctctctggccaacacgcctcatctgagggagcttcacttggacaacaacaagcttaccagagtacctggtgggctggcagagcataagtacatccaggttgtctaccttcataacaacaatatctctgtagttggatcaagtgacttctgcccacctggacacaacaccaaaaaggcttcttattcgggtgtgagtcttttcagcaacccggtccagtactgggagatacagccatccaccttcagatgtgtctacgtgcgctctgccattcaactcggaaactataagtaattctcaagaaagccctcatttttataacctggcaaaatcttgttaatgtcattgctaaaaaataaataaaagctagatactggaaacctaactgcaatgtggatgttttacccacatgacttattatgcataaagccaaatttccagtttaagtaattgcctacaataaaaagaaattttgcctgccattttcagaatcatcttttgaagctttctgttgatgttaactgagctactagagatattcttatttcactaaatgtaaaatttggagtaaatatatatgtcaatatttagtaaagcttttcttttttaatttccaaaaaaaaaaaaaaaaaaaaaaaaaaaaa

SEQ ID NO: 2903 - DNA, 2382 bp, Homo sapiens
agagacgctgacaaaggagcggaggagcagtcgcagctgctttccgaggaagccggtgttgccgagattgccaaaatgctttggagtttttaactgaatctaagaaaagtccaaaatagatttgagactgtaaaaacagaaactgcagcaagggggattcagtgccaatgcatcaacaaaaaagacaaccagagttagtggaaggaaatcttcctgttttcgtgttccccacggagctcatattttatgcagatgatcagtcaacacataagcaagtgttgacactgtacaatccctatgagtttgccttaaagttcaaagttttgtgtactactccaaataagtatgttgtcgttgatgctgcaggtgcagtaaagcctcagtgttgtgtggatattgtgattcgtcatcgagatgttcgatcctgtcactatggtgtaatagacaaattccgtctccaagtttccgagcaaagccaaaggaaggctttgggaagaaaagaggttgttgctactcttctcccatcagcaaaagaacaacaaaaggaagaagaggaaaaaagattaaaggaacatttaactgaaagtttattttttgagcagtcgtttcaaccagaaaacagagctgtatcctcaggacctagtttactaactgtcttcctgggagtggtgtgcattgcagccctgatgctgcctacactgggggatgtggaatcgctggtgcctctctacctccacttaagtgtgaatcaaaaattagtggctgcttatatcttaggtcttatcacaatggccatacttagaacatgagcaaggatttcaattgacttctgaagtaaatctgtcttgaaaatatgaatgtggactgccttttatctctatttcactccattaacatgcaacaaactattgaatgatttcaaataattgcaaatgtataatatatattttaaattataatttaatttgaaggactgcagaacattattttacagacagcaaggatgcttctgagtgacacctaggaaattatttgaagaaattctttttatatctatacctgttgtgtaagaaactttaaaacatttgttattttctcacctttttttctaattcactttgattgctaggggtcatgtatgcttcgaagttacaggactaaaagagcaaactgaccggcctaaaactaaaatgacatttattccctagctacaaacatcagcgttattatgttaattataccttgccctctatcattataaatggttgccatggtgtttctaaaaataagtgttttaccattaatgtgtagagggcaaacaaagcataaagtactaagggatcatgcttatcctagggtctcacagaagagaggacatatttaattaatcttgtgaattacagaacaggttgtggtccagacaccaagaatcataggggtttttttttaaaaaacctaatagaagtagggtgacctctctctttggtctaagagttctaaaggaaggtaggcatctgtttaattagttggttcaccctggctttacctctggttaatgctttgtgttaataggaaggaaaaatcactttatcttttcttccaagcccctccctgcctgacttacccagactgggattaccagataccaggtgatttatgtggagatgatttttcacctttaaactctaagccaagtgtaagaaactcttgatagctatgtctattttatatcagtcactgagacttttttttaagtttttatttattattaagacaactttgccaaaaaagtcccctaagcacaactatttacatttctttatagcctcttctgatctctaacacatatgcagttttaactgttattttcatagtaactgatcttttgtctaaggatttttacctgaaagcacaatgtattgagtctcttgaaaatcatctttcagatctttttacagaatgaacttatgcactgctactgtagtattctcaaggaatatatgtaaacacaaatgtatgcctgaggttggtttttgcagaaaacagtctctgcttctaaaaacttctatgtctagtcttccataggaaatcctcactgtttaaccatgtgaggagcctaagtcattaaacggatcatgtctgtacattgtgtaatgaatgaaaagcacataaatgtaatctactttgaactttgtaaaaatgatgtgtggaggctattcttgtttctccatctcaagtcctgtgtgtgcacgtgtgtgcaagtgcacatgtgtgtgtgtaataacacattgtaaagaacagaaattactttaaaaaataaacagaaatggagacctgagcttcaaaaaaaaaaaaaaaaaaaaaaaaaaaaaaaaaaaaaaa

SEQ ID NO: 2904 - DNA, 2379 bp, Homo sapiens
ggcacgaggcaggagaagtgaagatgtaacatgttatctgtcgctcctcttagctggcggagagaatttacatttaaagattagcagagtgagaaagagaaatctgccttttgttgtgtggggtgaggaggaggcatctacccctggccttgacgctatctcccatcacctctgctatccagacaggactcaccgagatcgtactgagaagcactccacaatgccagactcacctgtggatgtgaagacgcaatctaggctgactcctccaacaatgccacctcccccaactactcaaggagctccaagaaccagttcatttacaccgacaacgttaactaatggcacgagccattctcctacagccttgaatggcgccccctcaccacccaatggcttcagcaatgggccttcctcttcttcctcctcctctctggctaatcaacagctgcccccagcctgtggtgccaggcaactcagcaagctgaaaaggttccttactaccctgcagcagtttggcaatgacatttcacccgagataggagaaagagttcgcaccctcgttctgggactagtgaactccactttgacaattgaagaatttcattccaaactgcaagaagctactaacttcccactgagaccttttgtcatcccatttttgaaggccaacttgcccctgctgcagcgtgagctcctccactgcgcaagactggccaaacagaaccctgcccagtacctcgcccagcatgaacagctgcttctggatgccagcaccacctcacctgttgactcctcagagctgcttctcgatgtgaacgaaaacgggaagaggcgaactccagacagaaccaaagaaaatggctttgacagagagcctttgcactcagaacatccaagcaagcgaccatgcactattagcccaggccagcggtacagtccaaataacggcttatcctaccagcccaatggcctgcctcaccctaccccacctccacctcagcattaccgtttggatgatatggccattgcccaccactacagggactcctatcgacaccccagccacagggacctcagggacagaaacagacctatggggttgcatggcacacgtcaagaagaaatgattgatcacagactaacagacagagaatgggcagaagagtggaaacatcttgaccatctgttaaactgcataatggacatggtagaaaaaacaaggcgatctctcaccgtactaaggcggtgtcaagaagcagaccgggaagaattgaattactggatccggcggtacagtgacgccgaggacttaaaaaaaggtggcggcagtagcagcagccactctaggcagcagagtcccgtcaacccagacccagttgcactagacgcgcatcgggaattccttcacaggcctgcgtctggatacgtgccagaggagatctggaagaaagctgaggaggccgtcaatgaggtgaagcgccaggcgatgacggagctgcagaaggccgtgtctgaggcggagcggaaagcccacgacatgatcacaacagagagggccaagatggagcgcacggtcgccgaggccaaacggcaggcggcggaggacgcactggcagttatcaatcagcaggaggattcaagcgagagttgctggaattgtggccgtaaagcgagtgaaacctgcagtggctgtaacacagcccgatactgtggctcattttgccagcacaaagactgggagaagcaccatcacatctgtggacagaccctgcaggcccagcagcagggagacacacctgcagtcagctcctctgtcacgcccaacagcggggctgggagcccgatggacacaccaccagcagccactccgaggtcaaccaccccgggaaccccttccaccatagagacaacccctcgctagacgtgaactcagaactgtcggaggaaagacaacacaaccaacgcgaaaccaattcctcatcctcagatgctcaaagttgttttttttgtttgtttgtttattagatgaattatcctatttcagtacttcagcaagagagaacctaactgtatcttgaggtggtagtaaaacacagagggccagtaacgggtcgtaatgacttattgtggataacaaagatatcttttctttagagaactgaaaagagagcagagaatataacatgaaatgatagatttgacctcctccctgttattttcaagtagctgggattttaaactagatgacctcattaaccgatgctttaccaaacagcaaaccaagagattgctaattgctgttgaaagcaaaaatgctaatattaaaagtcacaatgttctttatatacaataatggaaaaaaaaaaaaaaaaaaaa

SEQ ID NO: 2905 - DNA, 1300 bp, Homo sapiens
ctctccctccctcgcccagccttcgtcctcctggcccgctcctctcatccctcccattctccatttcccttccgttccctccctgtcagggcgtaattgagtcaaaggcaggatcaggttccccgccttccagtccaaaaatcccgccaagagagccccagagcagaggaaaatccaaagtggagagaggggaagaaagagaccagtgagtcatccgtccagaaggcggggagagcagcagcggcccaagcaggagctgcagcgagccgggtacctggactcagcggtagcaacctcgccccttgcaacaaaggcagactgagcgccagagaggacgtttccaactcaaaaatgcaggctcaacagtaccagcagcagcgtcgaaaatttgcagctgccttcttggcattcattttcatactggcagctgtggatactgctgaagcagggaagaaagagaaaccagaaaaaaaagtgaagaagtctgactgtggagaatggcagtggagtgtgtgtgtgcccaccagtggagactgtgggctgggcacacgggagggcactcggactggagctgagtgcaagcaaaccatgaagacccagagatgtaagatcccctgcaactggaagaagcaatttggcgcggagtgcaaataccagttccaggcctggggagaatgtgacctgaacacagccctgaagaccagaactggaagtctgaagcgagccctgcacaatgccgaatgccagaagactgtcaccatctccaagccctgtggcaaactgaccaagcccaaacctcaagcagaatctaagaagaagaaaaaggaaggcaagaaacaggagaagatgctggattaaaagatgtcacctgtggaacataaaaaggacatcagcaaacaggatcagttaactattgcatttatatgtaccgtaggctttgtattcaaaaattatctatagctaagtacacaataagcaaaaacaaaaagaaaagaaaatttttgtagtagcgttttttaaatgtatactatagtaccagtaggggcttataataaaggactgtaatcttatttaggaagttgacttatagtacatgataaatgatagacaattgaggtaagttttttgaaattatgtgacattttacattaaattttttttacattttttgggcagcaatttaaatgttatgactatgtaaactacttctcttgttaggtaatttttttcacctagatttttttcccaattgagaaaaatatatactaaacaaaaaaaaaaaaaaaaaaaaaaaaaaaaa

SEQ ID NO: 2906 - DNA, 997 bp, Homo sapiens
gaaggaaaaagagcaacagatccagggagcattcacctgccctgtctccaaacagccttgtgcctcacctacccccaacctcccagagggagcagctatttaaggggagcaggagtgcagaacaaacaagacggcctggggatacaactctggagtcctctgagagagccaccaaggaggagcaggggagcgacggccggggcagaagttgagaccacccagcagaggagctaggccagtccatctgcatttgtcacccaagaactcttaccatgaagaccctcctactgttggcagtgatcatgatctttggcctactgcaggcccatgggaatttggtgaatttccacagaatgatcaagttgacgacaggaaaggaagccgcactcagttatggcttctacggctgccactgtggcgtgggtggcagaggatcccccaaggatgcaacggatcgctgctgtgtcactcatgactgttgctacaaacgtctggagaaacgtggatgtggcaccaaatttctgagctacaagtttagcaactcggggagcagaatcacctgtgcaaaacaggactcctgcagaagtcaactgtgtgagtgtgataaggctgctgccacctgttttgctagaaacaagacgacctacaataaaaagtaccagtactattccaataaacactgcagagggagcacccctcgttgctgagtcccctcttccctggaaaccttccacccagtgctgaatttccctctctcataccctccctccctaccctaaccaagttccttggccatgcagaaagcatccctcacccatcctagaggccaggcaggagcccttctatacccacccagaatgagacatccagcagatttccagccttctactgctctcctccacctcaactccgtgcttaaccaaagaagctgtactccggggggtctcttctgaataaagcaattagcaaaaaaaaaaaaaaaaaaaaaaaaaaaaaa

SEQ ID NO: 2907 - DNA, 5557 bp, Homo sapiens
ataatctatcccagatcctttcccagagagaaacttggcgatcacgttttcacatgatcgtcacgctcagggcgcttcaattatccctccccacaaagataggtggcgcgtgtttcagggtctctcgtctctctcctacagaaaagaaaaagaaaaaaatgtcattagaagaggcgtaacacgtcagtccgtccccaggtttgtgtttcctggagtggccgaaagagatcagttctaacctgctctgcaggaataacggtcctgcctcccgacactcttggcgaggtttttgtacagtttgctccgggagctgtttcttcgcttccacctttttctcccccacacttcgcggcttcttcatgctttttcttctcaccatttctggccaaaactacaaacaagacttcgcaatcgagcctgcgtgctgccgaagcagggcgccgagtccatgcgaactgccatctgatccgctcttatcaatgaagcagccgatcatggcggatggcccccggtgcaagaggcgcaaacaagccaatcccaggaggaaaaacgtggtgaactatgacaatgtagtggacacaggttctgaaacagatgaggaagacaagcttcatattgctgaggatgacggtattgccaaccctctggaccaggagacgagtccagctagtgtgcccaaccatgagtcctccccacacgtgagccaagctctgttgccaagagaggaagaggaagatgaaataagggagggtggagtggaacacccctggcacaacaacgagattctacaagcctctgtagatggtccagaagaaatgaaggaagactatgacactatggggccagaagccacgatccagaccgcaattaacaatggtacagtgaagaatgcaaattgcacatcagattttgaggaatactttgccaaaagaaaactggaggaacgcgatggtcatgcagtcagcatcgaggagtaccttcagcgcagtgacacagccattatttacccagaagcccctgaggagctgtctcgccttggcacgccagaggccaatgggcaagaagaaaatgacctgccacctggaactccagatgcttttgcccaactgctgacctgcccctactgcgaccggggctacaagcgcttgacatcactgaaggagcacatcaagtaccgccacgagaagaatgaagagaacttttcctgccctctctgtagctacacgtttgcctaccgcacccagctcgagcggcatatggtgacacacaagccagggacagatcagcaccaaatgctaacccaaggagcaggtaatcgcaagttcaaatgcacagagtgtggcaaggccttcaaatataaacaccatctgaaagaacacctgcgaattcacagtggtgaaaaaccttacgagtgcccaaactgcaagaaacgtttctcccattctggttcctacagttcgcacatcagcagcaagaaatgtattggtttaatctctgtaaatggccgaatgagaaacaatatcaagacgggttcttcccctaattctgtttcttcttctcctactaattcagccattacccagttaagaaacaagttggagaatggaaaaccacttagtatgtctgaacagacaggcttacttaaaattaaaacagaaccactagacttcaatgactataaagttcttatggctacacacgggtttagtggcactagtccctttatgaatggtgggcttggagccaccagccctttaggagttcatccatctgctcagagtccaatgcagcacttaggtgtagggatggaagcccctttacttgggtttcccaccatgaatagtaatttaagtgaggtacaaaaggttctacagattgtggacaatactgtttccaggcaaaaaatggactgcaaggctgaagaaatttcaaagttgaaaggttatcacatgaaggatccatgctctcaacctgaggaacaaggagttacttctcctaatattccgcctgtcggtcttccggtagtgagtcataatggtgccactaaaagtattattgactatacgttggaaaaagtcaatgaagccaaagcttgcctccagagcttgactactgactcaaggagacagatcagtaatataaagaaagagaagctacgtactttaatagatttggtcactgatgacaaaatgattgagaaccacaacatatccactccattttcatgccagttctgtaaagaaagttttcctggccccatccctttgcatcagcatgaacgttacctttgtaagatgaatgaagagatcaaggcggtcctgcagcctcatgaaaacatagtccccaacaaagccggagtttttgttgataataaagccctcctcttgtcatctgtactttctgagaaaggaatgacaagccccatcaacccatacaaggaccacatgtctgtactcaaagcatactatgctatgaacatggagcccaactccgatgaactgctgaaaatttccattgctgtgggccttcctcaggaatttgtgaaggaatggtttgaacaacgaaaagtctaccagtactcaaattccaggtccccatccctggaaagaagctccaagccgttagctcccaacagtaaccctcccacaaaagactctttattacccaggtctcctgtaaaacctatggactccataacatcaccatctatagcagaactccacaacagtgttacgaattgtgatcctcctctcaggctaacaaaaccttcccattttaccaatattaaaccagttgaaaaattggaccactccaggagtaatactccttctcccttaaatctttcctccacatcttctaaaaactcccacagtagttcatacactccaaacagcttctcttctgaggagctccaggctgagcctttagacttgtcattaccaaaacaaatgaaagaacccaaaagtattatagccacaaagaacaaaacaaaagctagtagcatcagtttagatcataacagtgtttcttcctcatctgaaaactcagatgagcctctgaacttgacttttatcaagaaggaattttcaaattcaaataatctggacaacaaaagcactaacccagtgttcagcatgaacccatttagtgccaaacctttatacacagctcttccacctcaaagcgcatttccccctgctactttcatgccaccagtccagaccagtattcctgggctacgaccatacccaggactggatcagatgagcttcctaccacatatggcctacacctacccaactggagcagctacttttgctgatatgcagcaaaggagaaagtaccagcggaaacaaggatttcagggagaattgcttgatggagcacaagactacatgtcaggcctagatgatatgacagactccgactcctgtctgtctcgcaaaaagatcaagaagacagagagtggcatgtatgcatgtgacttatgtgacaagacattccagaaaagcagttcccttctgcgacataaatacgaacacacaggaaaaagaccacatcagtgtcagatttgtaagaaagcgtttaaacacaagcaccaccttatcgagcactcaaggcttcactcgggcgagaagccctatcagtgtgataaatgtggcaagcgcttctcacactcgggctcgtactcgcagcacatgaatcacaggtattcctactgcaagcgggaggcggaggagcgggaagcggcggagcgcgaggcgcgcgagaaagggcacttggaacccaccgagctgctgatgaaccgggcttacttgcagagcattacccctcaggggtactctgactcggaggagagggagagtatgccgagggatggcgagagcgagaaggagcacgagaaagaaggcgaggatggctacgggaagctgggcagacaggatggcgacgaggagttcgaggaggaagaggaagaaagtgaaaataaaagtatggatacggatcccgaaacgatacgagatgaagaagagactggagatcactccatggacgatagttcggaggatgggaaaatggaaaccaaatcagaccacgaggaagacaatatggaagatggcatgtaataaactactgcattttaagcttcctatttttttttccagtagtattgttacctgcttgaaaacactgctgtgttaagctgttcatgcacgtgcctgacgcttccaggaagctgtagagagggacagaaggggcggttcagccaagacagatgtagacggagttggagctgggtattgttaaaaactgcattatgcaaaaattttgtacagtgttaaggcctaaaaactgtgtggttcagagactaattcctgtgtttaatagcatttatactttaagcacaactagaaaattgtaagaattgcactctacttatgtatcactacaaactttaaaaaactatgtctaatttatattaatacattttaaaaaggtgcccgcactaccatacatcagtatttttattattattattgttattcctttttaatttaatgtgctcgcactacaatgcatcagtattatgattcctctgtactttcctttcgctattcatcaatttcccattttttttttcagcttaagtaaccacacaattttaggcctcaatttttttttttttctgtgaaggaacttgaagtgatgcatgtgtgaatttaagataccgaagtcttaaagtgacctggacgtgaaggaaaaagtaagatgagaaataaagaaagcctttgtaaggtggttttaaaagccttatatgcaaaccttttaatctgtgtttctgcaagtgccatccttgtacagtgttaagagggtaacatgggttacctttgcaccagcttcagtgttaagctcaccctgttctttgaagcacccatgtcagtattagaagaataggcagcagttccttagtttacatatgtttgtgcaattattttctgtacttttttgttcattaattttgtcagtattacaccaaactgtttttgcaacaaaaaaattttttttgcattcatttaattttaggtcaaataacattttatttatgtggctcattttatatttcctaattttatttatttcatactgtagtgtacagtattatagttcttcaatatatagatatattttagtaaaaaaggaacatgacgttgatcatttgggcaaattttacgtaaagagaagagcatttattgtgttttggaacattaattgtgagatgggatttttcaattttattattttatttttgtttttttccaattactggaaattccaaatttgggaacttttgatacgatcttgtgaaaacactgtattttcgactgaaaattccactttcttcatcttgttttttagctaaaaagagggactgttaaatacaatgtatgataccatgacaaaaatctttcctgaattgtctttgtaaaagtattattgaattttcaatttgtaatttcttttgaaaatgaccatgctcgaataaaaatgtagccaaact

SEQ ID NO: 2908 - DNA, 2620 bp, Homo sapiens
ataggctcagacacaaggagaggcttggagagagcagacgccttctggattcaagaagacgaggctcacctgttactcggcctcccagaaagatggataggagaaatgactacggatatagggtgcctctatttcagggccctctgcctcccccggggagcctggggcttcccttccctccagatatacagactgagaccacagaagaggacagtgtcctgctgatgcataccctgttggcggcaaccaaggactccctggccatggacccaccagttgtcaaccggcctaagaaaagcaagaccaagaaggcccctataaagactattactaaggctgcacctgctgcccctccagtcccagctgccaatgagattgccaccaacaagcccaaaataacttggcaggctttaaacctgccagtcattacccagatcagccaggctttacctaccactgaggtaaccaatactcaggcttcttcagtcactgctcagcctaagaaagccaacaagatgaagagagttactgccaaggcagcccaaggctcccaatccccaactggccatgagggtggcactatacagctgaagtcacccttgcaggtcctaaagctaccagtcatctcacagaatattcacgctccaattgccaatgagtcagccagttcccaagccttgataacctctatcaagcctaagaaagcttccaaggctaagaaggctgcaaataaggccatagctagtgccaccgaggtctcgctggctgcaactgccacccatacagctaccacccaaggccaaattaccaatgagacagccagtatccacaccacagcagcctccatccgaaccaagaaagcctccaaagccaggaagacaattgctaaggtcataaatactgacactgagcatatagaggctctaaatgtcactgacgcagctaccaggcagattgaggcctcagtagtggctatcaggcccaaaaaatccaagggcaagaaggctgccagcaggggcccaaattctgtctctgagatctctgaggccccacttgccactcagatagtcacaaaccaagccctggcagccaccctgcgggtcaagagagggtctagggctcggaaggctgccactaaggctcgggcaactgaaagccagactccaaatgctgaccaaggggcccaggccaagatagcctctgctcagaccaacgtaagtgcccttgagactcaggttgctgctgctgtccaggccctggcagatgactatctggctcagttgagcctggagcccacaaccaggacccggggcaaaagaaaccgaaagtccaagcatctgaatggggatgagagaagtggcagtaattacaggcggatcccatggggccggaggcctgcaccaccgcgagatgtggccattttacaagaaagggctaataagttggtgaaatacctgttggttaaggaccagacaaagatccccatcaaacgctcagacatgctgagggatgtcatccaagaatatgatgaatatttcccagaaatcattgaacgagcaagctgcactctggagaagatgtttcgagtcaatctgaaggaaattgataagcaaagtagcttgtatattctcatcagcactcaggaatcctctgcaggcatactgggaacgaccaaggacacacccaagctgggtctcctcatggtgattctgagtgtcatttttatgaatggcaacaaggccagtgaggctgtcatctgggaggtgctgcgcaagttggggctgcgccctggggtgaggcattcactctttggggaagtgaggaagctcatcacagacgagtttgtgaagcagaagtacctggagtacaagagggtccctaacagcagaccacctgaatatgagttcttctggggcttgcgctcctaccacgagactagcaagatgaaagtcctcaagtttgcatgcagggtgcagaagaaagaccccaaggactgggctgtgcagtaccgcgaggcagtggagatggaagtccaagctgcagctgtggctgtggctgaggctgaagccagggctgagtggttccaacaccagcactggctttactggcgaacccagcaccagcacgggcttcagtagtggacccagttctattgttggcttcagcggtggaccaagcactggtgttggcttctgcagtggaccaagcaccagtggcttcagcggtggaccgagcacaggagctggcttcggcggtggaccaaacactggtgctggctttggtggtggaccgagcaccagtgctggctttggcagtggagccgccagtcttggtgcctgtggcttctcgtatggctagtgaggtttcagatttattccccatgtttacagataccgctaataaattgcagtagtccttcccatggagccaaagtacatccttggaatctttgtccacacagcagtcaaggcagttatggccaatcagctgagggtgtcatgtgatggaaaaatctgtttgctgttcctgctttattgtttgctttctgtgtgctgtcatattttggtatcagagttacattaaatttgcaaaatgaaaaaaaaaaaaaaaaaaaaaaaaa

SEQ ID NO: 2909 - DNA, 2329 bp, Homo sapiens
ataggctcagacacaaggagaggcttggagagagcagacgccttctggattcaagaagacgaggctcacctgttactcggcctcccagaaagatggataggagaaatgactacggatatagggtgcctctatttcagggccctctgcctcccccggggagcctggggcttcccttccctccagatatacagactgagaccacagaagaggacagtgtcctgctgatgcataccctgttggcggcaaccaaggactccctggccatggacccaccagttgtcaaccggcctaagaaaagcaagaccaagaaggcccctataaagactattactaaggctgcacctgctgcccctccagtcccagctgccaatgagattgccaccaacaagcccaaaataacttggcaggctttaaacctgccagtcattacccagatcagccaggctttacctaccactgaggtaaccaatactcaggcttcttcagtcactgctcagcctaagaaagccaacaagatgaagagagttactgccaaggcagcccaaggctcccaatccccaactggccatgagggtggcactatacagctgaagtcacccttgcaggtcctaaagctaccagtcatctcacagaatattcacgctccaattgccaatgagtcagccagttcccaagccttgataacctctatcaagcctaagaaagcttccaaggctaagaaggctgcaaataaggccatagctagtgccaccgaggtctcgctggctgcaactgccacccatacagctaccacccaaggccaaattaccaatgagacagccagtatccacaccacagcagcctccatccgaaccaagaaagcctccaaagccaggaagacaattgctaaggtcataaatactgacactgagcatatagaggctctaaatgtcactgacgcagctaccaggcagattgaggcctcagtagtggctatcaggcccaaaaaatccaagggcaagaaggctgccagcaggggcccaaattctgtctctgagatctctgaggccccacttgccactcagatagtcacaaaccaagccctggcagccaccctgcgggtcaagagagggtctagggctcggaaggctgccactaaggctcgggcaactgaaagccagactccaaatgctgaccaaggggcccaggccaagatagcctctgctcagaccaacgtaagtgcccttgagactcaggttgctgctgctgtccaggccctggcagatgactatctggctcagttgagcctggagcccacaaccaggacccggggcaaaagaaaccgaaagtccaagcatctgaatggggatgagagaagtggcagtaattacaggcggatcccatggggccggaggcctgcaccaccgcgagatgtggccattttacaagaaagggctaataagttggtgaaatacctgttggttaaggaccagacaaagatccccatcaaacgctcagacatgctgagggatgtcatccaagaatatgatgaatatttcccagaaatcattgaacgagcaagctgcactctggagaagatgtttcgagtcaatctgaaggaaattgataagcaaagtagcttgtatattctcatcagcactcaggaatcctctgcaggcatactgggaacgaccaaggacacacccaagctgggtctcctcatggtgattctgagtgtcatttttatgaatggcaacaaggccagtgaggctgtcatctgggaggtgctgcgcaagttggggctgcgccctggggtgaggcattcactctttggggaagtgaggaagctcatcacagacgagtttgtgaagcagaagtacctggagtacaagagggtccctaacagcagaccacctgaatatgagttcttctggggcttgcgctcctaccacgagactagcaagatgaaagtcctcaagtttgcatgcagggtgcagaagaaagaccccaaggactgggctgtgcagtaccgcgaggcagtggagatggaagtccaagctgcagctgtggctgtggctgaggctgaagccagggctgagatttattccccatgtttacagataccgctaataaattgcagtagtccttcccatggagccaaagtacatccttggaatctttgtccacacagcagtcaaggcagttatggccaatcagctgagggtgtcatgtgatggaaaaatctgtttgctgttcctgctttattgtttgctttctgtgtgctgtcatattttggtatcagagttacattaaatttgcaaaatgaaaaaaaaaaaaaaaaaaaaaaaaa

SEQ ID NO: 2910 - DNA, 1428 bp, Homo sapiens
ataggctcagacacaaggagaggcttggagagagcagacgccttctggattcaagaagacgaggctcacctgttactcggcctcccagaaagatggataggagaaatgactacggatatagggtgcctctatttcagtccaagcatctgaatggggatgagagaagtggcagtaattacaggcggatcccatggggccggaggcctgcaccaccgcgagatgtggccattttacaagaaagggctaataagttggtgaaatacctgttggttaaggaccagacaaagatccccatcaaacgctcagacatgctgagggatgtcatccaagaatatgatgaatatttcccagaaatcattgaacgagcaagctacactctggagaagatgtttcgagtcaatctgaaagaaattgataagcaaagtagcttgtatattctcatcagcactcaggaatcctctgcaggcatactgggaacgaccaaggacacacccaagctgggtctcctcatggtgattctgagtgtcatttttatgaatggcaacaaggccagtgaggctgtcatctgggaggtgctgcgcaagttggggctgcgccctggggtgaggcattcactctttggggaagtgaggaagctcatcacagacgagtttgtgaagcagaagtacctggagtacaagagggtccctaacagcagaccacctgaatatgagttcttctggggcttgcgctcctaccacgagactagcaagatgaaagtcctccagtttgcatgcagggtgcagaagaaagaccccaaggactgggctgtgcagtaccgcgaggcagtggagatggaagtccagcggcagctgtggctgtggctgaggctgaagccagggctgagtggttccaacaccagcactggctttactggcgaacccagcaccagcacgggcttcagtagtggacccagttctattgttggcttcagcggtggaccaagcactggtgttggcttctgcagtggaccaagcaccagtggcttcagcggtggaccgagcacaggagctggcttcggcggtggaccaaacactggtgctggctttggtggtggaccgagcaccagtgctggctttggcagtggagccgccagtcttggtgcctgtggcttctcgtatggctagtgaggtttcagatttattccccatgtttacagataccgctaataaattgcagtagtccttcccatggagccaaagtacatccttggaatctttgtccacacagcagtcaaggcagttatggccaatcagctgagggtgtcatgtgatggaaaaatctgtttgctgttcctgctttattgtttgctttctgtgtgctgtcatattttggtatcagagttacattaaatttgcaaaatgaaaaaaaaaaaaaaaaaaaaaaaaa

SEQ ID NO: 2911 - DNA, 1138 bp, Homo sapiens
ataggctcagacacaaggagaggcttggagagagcagacgccttctggattcaagaagacgaggctcacctgttactcggcctcccagaaagatggataggagaaatgactacggatatagggtgcctctatttcagtccaagcatctgaatggggatgagagaagtggcagtaattacaggcggatcccatggggccggaggcctgcaccaccgcgagatgtggccattttacaagaaagggctaataagttggtgaaatacctgttggttaaggaccagacaaagatccccatcaaacgctcagacatgctgagggatgtcatccaagaatatgatgaatatttcccagaaatcattgaacgagcaagctgcactctggagaagatgtttcgagtcaatctgaaggaaattgataagcaaagtagcttgtatattctcatcagcactcaggaatcctctgcaggcatactgggaacgaccaaggacacacccaagctgggtctcctcatggtgattctgagtgtcatttttatgaatggcaacaaggccagtgaggctgtcatctgggaggtgctgcgcaagttggggctgcgccctggggtgaggcattcactctttggggaagtgaggaagctcatcacagacgagtttgtgaagcagaagtacctggagtacaagagggtccctaacagcagaccacctgaatatgagttcttctggggcttgcgctcctaccacgagactagcaagatgaaagtcctcaagtttgcatgcagggtgcagaagaaagaccccaaggactgggctgtgcagtaccgcgaggcagtggagatggaagtccaagctgcagctgtggctgtggctgaggctgaagccagggctgagatttattccccatgtttacagataccgctaataaattgcagtagtccttcccatggagccaaagtacatccttggaatctttgtccacacagcagtcaaggcagttatggccaatcagctgagggtgtcatgtgatggaaaaatctgtttgctgttcctgctttattgtttgctttctgtgtgctgtcatattttggtatcagagttacattaaatttgcaaaatgaaaaaaaaaaaaaaaaaaaaaaaaa

SEQ ID NO: 2912 - DNA, 3745 bp, Homo sapiens
gacttccatttttaatgaccaacatgtattaagatggacacctactctacgaaacacgaagttctatggtctcgaagaagcccgtgcctgtttaaaactgatcctaactaaaaacagacttgagtggatatgagaatgttggttagtggcagaagagtcaaaaaatggcagttaattattcagttatttgctacttgttttttagcgagcctcatgtttttttgggaaccaatcgataatcacattgtgagccatatgaagtcatattcttacagatacctcataaatagctatgactttgtgaatgataccctgtctcttaagcacacctcagcggggcctcgctaccaatacttgattaaccacaaggaaaagtgtcaagctcaagacgtcctccttttactgtttgtaaaaactgctcctgaaaactatgatcgacgttccggaattagaaggacgtggggcaatgaaaattatgttcggtctcagctgaatgccaacatcaaaactctgtttgccttaggaactcctaatccactggagggagaagaactacaaagaaaactggcttgggaagatcaaaggtacaatgatataattcagcaagactttgttgattctttctacaatcttactctgaaattacttatgcagttcagttgggcaaatacctattgtccacatgccaaatttcttatgactgctgatgatgacatatttattcacatgccaaatctgattgagtaccttcaaagtttagaacaaattggtgttcaagacttttggattggtcgtgttcatcgtggtgcccctcccattagagataaaagcagcaaatactacgtgtcctatgaaatgtaccagtggccagcttaccctgactacacagccggagctgcctatgtaatctccggtgatgtagctgccaaagtctatgaggcatcacagacactaaattcaagtctttacatagacgatgtgttcatgggcctctgtgccaataaaatagggatagtaccgcaggaccatgtgtttttttctggagagggtaaaactccttatcatccctgcatctatgaaaaaatgatgacatctcatggacacttagaagatctccaggacctttggaagaatgctacagatcctaaagtaaaaaccatttccaaaggtttttttggtcaaatatactgcagattaatgaagataattctcctttgtaaaattagctatgtggacacatacccttgtagggctgcgtttatctaatagtacttgaatgttgtatgttttcactgtcactgagtcaaacctggatgaaaaaaacctttaaatgttcgtctataccctaagtaaaatgaggacgaaagacaaatattttgaaagcctagtccatcagaatgtttctttgattctagaagctgtttaatatcacttatctacttcattgcctaagttcatttcaaagaatttgtatttagaaaaggtttatattattagtgaaaacaaaactaaagggaagttcaagttctcatgtaatgccacatatatacttgaggtgtagagatgttattaagaagttttgatgttagaataattgcttttggaaaataccaaatgaacgtacagtacaacatttcaaggaaatgaatatattgttagaccaggtaagcaagtttatttttgttaaagagcacttggtggaggtagtaggggcagggaaaggtcagcataggagagaaagttcatgaatctggtaaaacagtctcttgttcttaagaggagatgtagaaaaatgtgtacaatgttattataaacagacaaatcacgtcttaccacatccatgtagctactggtgttagagtcattaaaatacctttttttgcatcttttttcaaagtttaatgtgaacttttagaaaagtgattaatgttgccctaatactttatatgtttttaatggatttttttttaagtattagaaaatgacacataacacgggcagctggttgctcatagggtccttctctagggagaaaccattgttaattcaaataagctgattttaatgacgttttcaactggtttttaaatattcaatattggtctgtgtttaagtttgttatttgaatgtaatttacatagaggaatataataatggagagacttcaaatggaaagacagaacattacaagcctaatgtctccataattttataaaatgaaatcttagtgtctaaatccttgtactgattactaaaattaacccactcctccccaacaaggtcttataaaccacagcactttgttccaagttcagagttttaaattgagagcattaaacatcaaagttataatatctaaaacaatttatttttcatcaataactgtcagaggtgatctttattttctaaatatttcaaacttgaaaacagagtaaaaaagtgatagaaaagttgccagtttggggttaaagcatttttaaagctgcatgttccttgtaatcaaagagatgtgtctgagatctaatagagtaagttacatttattttacaaagcaggataaaaatgtggctataatacacactacctcccttcactacagaaagaactaggtggtgtctactgctagggagattatatgaaggccaaaataatgacttcagcaagagtgactgaactcactctaaggcctttgactgcagaggcacctgttagggaaaatcagatgtctcatataataaggtgatgtcggaaacacgcaaaacaaaacgaaaaaagatttctcagtatacacaactgaatgatgatacttacaatttttagcaggtagctttttaatgtttacagaaattttaatttttttctattttgaaatttgaggcttgtttacattgcttagataatttagaatttttaactaatgtcaaaactacagtgtcaaacattctaggttgtagttactttcagagtagatacagggttttagatcattacagtttaagttttctgaccaattaaaaaaacatagagaacaaaagcatatttgaccaagcaacaagcttataattaatttttattagttgattgattaatgatgtattgccttttgcccatatataccctgtgtatctatacttggaagtgtttaaggttgccattggttgaaaacataagtgtctctggccatcaaagtgatcttgtttacagcagtgcttttgtgaaacaattatttatttgctgaaagagctcttctgaactgtgtccttttaatttttgcttagaatagaatggaacaagtttaaatttcaaggaaatatgaaggcacttcctttttttctaagaaggaagttgctagatgattccttcatcacacttacttaaagtactgagaagagtatctgtaaataaaagggttccaaccttttaaaaaagaaggaaaaaactttttggtgctccagtgtagggctatctttttaaaaaatgtcaacaaagggaaaattaactatcagcttggatggtcacttgaatagaagatggttatacacagtgttattgttaaaatttttttaccttttggttggtttgcatcttttttccatattgttaattttataccaaaatgttaaatatttgtattacttgaattttgctcttgtatggcaaaataattagtgagtttaaaaaaaatctatagtttccaataaacaactgaaaaattaaaaaaaaaaaaaaaaaaaaaaaaaaaaaa

SEQ ID NO: 2913 - DNA, 2192 bp, Homo sapiens
ggcagagacggggcggccgtggctccgagggcgggagctgagccgggccccgggaccgaagtttggcggcggctccgggaggcagagcgggctccccgggcgacttccaggcccctctcgcgtcctcgccccggacccgtgggcagccgggggggacggaagccgcggccgggccaactccgaggcggggacgccgcgacgggaacttgaggtgggaactttgcgcgctgcagcctcgccgggcgccaccgaagcgcgaaccggaccccgagcctgcaaactcgggctcgggggcggctgcacgtggccgtggccctgaactccctgcgggggcctcgaaacccgcctgcggggaggccagggcgacagaggactcgggagtcaccgctggtgcgtggcggcgtggagcgcgcttgttacggccaagggagcaggctgcctaatgaaggagccaggcttgcacacagacaattctagaactggtggcccgagagggatgtgaaggcccaaaatgaccctcttaccgggagacaattctgactacgactacagcgcgctgagctgcacctcggacgcctccttccacccggccttcctcccgcagcgccaggccatcaagggcgcgttctaccgccgggcgcagcggctgcggccgcaggatgagccccgccagggctgtcagcccgaggaccgccgccgtcggatcatcatcaacgtaggcggcatcaagtactcgctgccctggaccacgctggacgagttcccgctgacgcgcctgggccagctcaaggcctgcaccaacttcgacgacatcctcaacgtgtgcgatgactacgacgtcacctgcaacgagttcttcttcgaccgcaacccgggggccttcggcactatcctgaccttcctgcgcgcgggcaagctgcggctgctgcgcgagatgtgcgcgctgtccttccaggaggagctgctgtactggggcatcgcggaggaccacctggacggctgctgcaagcgccgctacctgcagaagattgaggagttcgcggagatggtggagcgggaggaagaggacgacgcgctggacagcgagggccgcgacagcgagggcccggccgagggcgagggccgcctggggcgctgcatgcggcgactgcgcgacatggtggagaggccgcactcggggctgcctggcaaggtgttcgcctgcctgtcggtgctcttcgtgaccgtcaccgccgtcaacctctccgtcagcaccttgcccagcctgagggaggaggaggagcaggtaagagcccacgccccgcggggaaacgcgccaccacgagggaagggactctgagcattgtcacctcctccagaaagcctcctctgattgcacactggctgaatagcatccctggtccctcctgacatcaggaatgtttgtgtgcatggtctgcctccctgttaatatgtgagcatcatgggggtccacgcctgtgcctgtcctggcctccactgtgcccaccactgccctcccccttgccagtgtttagaacagtgtccagcacaaacaggcactcaaccactatttgttgaatgaacaaatgagtgaataaatgggtggtgtgatttttgacgtgcctggccctgagcgaagcacattacatatatcatcaaatttatctcaaccattcggtcctttctcaacgttcctaatcctttgcatcatagtagcccagacacattttctgggtcctgaagataatttttattgataggtacatgtgtgtctacaaatggtgagcatttctttttgttacataagagaatgaatggaaagtttatttactccagggcctgacacggggtgtgtgctacagtctaagggctcccactcatctgggagttcacgggagccggagctgggctgcatgtgccaactacgtcttatctccccagggaatgctccagcaaccctgtgggggaagtgttttcacacccactaggtatttgaggacactgcccaaccccaggtctaagtccagtctgtctttgtaagcatggaaatatggttcccacgtggcagcttggggacctaatatagccccacaggactatgtgattggcccacacaaggtttcccaaaaatttgacttggttgccaacaataaaagtgaagttttttcataaaaaaaaaaaaaaaaaaaaaa

SEQ ID NO: 2914 - DNA, 3935 bp, Homo sapiens
caggctcagaggctgaagcaggaggaaggaaggactggaaggaaaaagagacaggttagagggaaagaggcttgggaagaaaacagcagaaaagaaactgctcattacacttacagagaggcaagtaacggtggagatgaggacagagggaaccaagactctgaaagacaaaaaatacaaatagagcgaaagaggaaaaaaatgtcaagaagaacatccatccggagaaatgaagagaatgaaagttttaaactgcagagccgttctgtgcttttccggcacaaaattatatcgctgattttaagcccttttgcatttgccagccgttgacattaagaggcatgtttaacggtgccaacagcatctccttttccttctcctcttcctcttcttcttcttcctcctcctcctcctctttttcctcctcctcgttctcctcccatcagcaagaagacaaaccgaggacagtcttgaaatatcgaaatttcctctttgggatttgccagcgccaagactgtcggaataaaggacgctgactattgtattattgttattttattaattagtcagtggaaagattacagatgaggaaaggggacgcctgtcacccttcctgtgctaagatttaaaaaaaaatgaggctggattgcgggaagctctaaaatgaagcaaaaggagtaagatttttaaagacagaaagccacaggagcccccacgtagcgcacttttatttgtattttttcagatttttttttgtttcgtggtggtgggggaggtgattgggtggctgactggctgcgggaagctacttcctttccttttggagatgattgtgctattattgtttgccttgctctggatggtggaaggagtcttttcccagcttcactacacggtacaggaggagcaggaacatggcactttcgtggggaatatcgctgaagatctgggtctggacattacaaaactttcggctcgcgggtttcagacggtgcccaactcaaggaccccttacttagacctcaacctggagacaggggtgctgtacgtgaacgagaaaatagaccgcgaacaaatctgcaaacagagcccctcctgtgtcctgcacctggaggtctttctggagaaccccctggagctgttccaggtggagatcgaggtgctggacattaatgacaaccccccctctttcccggagccagacctgacggtggaaatctctgagagcgccacgccaggcactcgcttccccttggagagcgcattcgacccagacgtgggcaccaactccttgcgcgactacgagatcacccccaacagctacttctccctggacgtgcagacccagggggatggcaaccgattcgctgagctggtgctggagaagccactggaccgagagcagcaagcggtgcaccgctacgtgctgaccgcggtggacggaggaggtgggggaggagtaggagaaggagggggaggtggcgggggagcaggcctgcccccccagcagcagcgcaccggcacggccctactcaccatccgagtgctggactccaatgacaatgtgcccgctttcgaccaacccgtctacactgtgtccctaccagagaactctcccccaggcactctcgtgatccagctcaacgccaccgacccggacgagggccagaacggtgaggtcgtgtactccttcagcagccacatttcgccccgggcgcgggagcttttcggactctcgccgcgcactggcagactggaggtaagcggcgagttggactatgaagagagcccagtgtaccaagtgtacgtgcaagccaaggacctgggccccaacgccgtgcctgcgcactgcaaggtgctagtgcgagtactggatgctaatgacaacgcgccagagatcagcttcagcaccgtgaaggaagcggtgagtgagggcgcggcgcccggcactgtggtggcccttttcagcgtgactgaccgcgactcagaggagaatgggcaggtgcagtgcgagctactgggagacgtgcctttccgcctcaagtcttcctttaagaattactacaccatcgttaccgaagcccccctggaccgagaggcgggggactcctacaccctgactgtagtggctcgggaccggggcgagcctgcgctctccaccagtaagtcgatccaggtacaagtgtcggatgtgaacgacaacgcgccgcgtttcagccagccggtctacgacgtgtatgtgactgaaaacaacgtgcctggcgcctacatctacgcggtgagcgccaccgaccgggatgagggcgccaacgcccagcttgcctactctatcctcgagtgccagatccagggcatgagcgtcttcacctacgtttctatcaactctgagaacggctacttgtacgccctgcgctccttcgactatgagcagctgaaggacttcagttttcaggtggaagcccgggacgctggcagcccccaggcgctggctggtaacgccactgtcaacatcctcatagtggatcaaaatgacaacgcccctgccatcgtggcgcctctaccagggcgcaacgggactccagcgcgtgaggtgctgccccgctcggcggagccgggttacctgctcacccgcgtggccgccgtggacgcggacgacggcgagaacgcccggctcacttacagcatcgtgcgtggcaacgaaatgaacctctttcgcatggactggcgcaccggggagctgcgcacagcacgccgagtcccggccaagcgcgacccccagcggccttatgagctggtgatcgaggtgcgcgaccatgggcagccgcccctttcctccaccgccaccctggtggttcagctggtggatggcgccgtggagccccagggcgggggcgggagcggaggcggagggtcaggagagcaccagcgccccagtcgctctggcggcggggaaacctcgctagacctcaccctcatcctcatcatcgcgttgggctcggtgtccttcatcttcctgctggccatgatcgtgctggccgtgcgttgccaaaaagagaagaagctcaacatctatacttgtctggccagcgattgctgcctctgctgctgctgctgcggtggcggaggttcgacctgctgtggccgccaagcccgggcgcgcaagaagaaactcagcaagtcagacatcatgctggtgcagagctccaatgtacccagtaacccggcccaggtgccgatagaggagtccgggggctttggctcccaccaccacaaccagaattactgctatcaggtatgcctgacccctgagtccgccaagaccgacctgatgtttcttaagccctgcagcccttcgcggagtacggacactgagcacaacccctgcggggccatcgtcaccggttacaccgaccagcagcctgatatcatctccaacggaagcattttgtccaacgaggtaaggctgaagcgaaaggaccaccatctctcatctcctccatcagaaagcctcctctagcccggcccttgtatctctggtgcactgtatctatttttaggatattagcttatgtgtatcgttgtgggagcagagatgggcggtcaccttctcccactccttcgtgtgtaacctaactttcgcgttgttccaccctttcacatttattttcattccgtccccttggtactttgccaccttggagctccctcctttgctcttccatcctgtcagtcctttcccttctcagtaacctgggcatgaagggaaactgcgtgaagggagagggaaatgtggaggagggacttactttctagcactggcaaaggtcttttttctttgcgtctgtcccaggcattaataaagttggctctattttgctttgtttaacgatgcttttagtcgcgtgtacaagtaagctatagattgtttaacttta

SEQ ID NO: 2915 - DNA, 2416 bp, Homo sapiens
ggcgccgtcttgatactttcagaaagaatgcattccctgtaaaaaaaaaaaaaaaaaatactgagagagggagagagagagagaagaagagagagagacggagggagagcgagacagagcgagcaacgcaatctgaccgagcaggtcgtacgccgccgcctcctcctcctctctgctcttcgctacccaggtgacccgaggagggactccgcctccgagcggctgaggaccccggtgcagaggagcctggctcgcagaattgcagagtcgtcgcccctttttacaacctggtcccgttttattctgccatacccagtttttggatttttgtcttccccttcttctctttgctaaacgacccctccaagataatttttaaaaaaccttctcctttgctcacctttgcttcccagccttcccatccccccaccgaaagcaaatcattcaacgacccccgaccctccgacggcaggagccccccgacctcccaggcggaccgccctccctccccgcgcgcgggttccgggcccggcgagagggcgcgagcacagccgaggccatggaggtgacggcggaccagccgcgctgggtgagccaccaccaccccgccgtgctcaacgggcagcacccggacacgcaccacccgggcctcagccactcctacatggacgcggcgcagtacccgctgccggaggaggtggatgtgctttttaacatcgacggtcaaggcaaccacgtcccgccctactacggaaactcggtcagggccacggtgcagaggtaccctccgacccaccacgggagccaggtgtgccgcccgcctctgcttcatggatccctaccctggctggacggcggcaaagccctgggcagccaccacaccgcctccccctggaatctcagccccttctccaagacgtccatccaccacggctccccggggcccctctccgtctaccccccggcctcgtcctcctccttgtcggggggccacgccagcccgcacctcttcaccttcccgcccaccccgccgaaggacgtctccccggacccatcgctgtccaccccaggctcggccggctcggcccggcaggacgagaaagagtgcctcaagtaccaggtgcccctgcccgacagcatgaagctggagtcgtcccactcccgtggcagcatgaccgccctgggtggagcctcctcgtcgacccaccaccccatcaccacctacccgccctacgtgcccgagtacagctccggactcttcccccccagcagcctgctgggcggctcccccaccggcttcggatgcaagtccaggcccaaggcccggtccagcacagaaggcagggagtgtgtgaactgtggggcaacctcgaccccactgtggcggcgagatggcacgggacactacctgtgcaacgcctgcgggctctatcacaaaatgaacggacagaaccggcccctcattaagcccaagcgaaggctgtctgcagccaggagagcagggacgtcctgtgcgaactgtcagaccaccacaaccacactctggaggaggaatgccaatggggaccctgtctgcaatgcctgtgggctctactacaagcttcacaatattaacagacccctgactatgaagaaggaaggcatccagaccagaaaccgaaaaatgtctagcaaatccaaaaagtgcaaaaaagtgcatgactcactggaggacttccccaagaacagctcgtttaacccggccgccctctccagacacatgtcctccctgagccacatctcgcccttcagccactccagccacatgctgaccacgcccacgccgatgcacccgccatccagcctgtcctttggaccacaccacccctccagcatggtcaccgccatgggttagagccctgctcgatgctcacagggcccccagcgagagtccctgcagtccctttcgacttgcatttttgcaggagcagtatcatgaagcctaaacgcgatggatatatgtttttgaaggcagaaagcaaaattatgtttgccactttgcaaaggagctcactgtggtgtctgtgttccaaccactgaatctggaccccatctgtgaataagccattctgactcatatcccctatttaacagggtctctagtgctgtgaaaaaaaaaaatgctgaacattgcatataacttatattgtaagaaatactgtacaatgactttattgcatctgggtagctgtaaggcatgaaggatgccaagaagtttaaggaatatgggagaaatagtgtggaaattaagaagaaactaggtctgatattcaaatggacaaactgccagttttgtttcctttcactggccacagttgtttgatgcattaaaagaaaataaaaaaaagaaaaaagagaaaagaaaaaaaaaaaaaaa

SEQ ID NO: 2916 - DNA, 2482 bp, Homo sapiens
cgaggaggtggagaattgagagcacgatgcatacacaggtgtttctgagtagtaattagatcgctgtgaaggaaaaagcacacctttgagttttcacctgtgaacactatagcgctgagagagacagtctgaaagcagaggaagacatcgatcagtaacaccaagagacaccaaagttgaaagttttgttttctttccctctgttttatttttcccccgtgtgtccctactatggtcagaaagcctgttgtgtccaccatctccaaaggaggttacctgcagggaaatgttaacgggaggctgccttccctgggcaacaaggagccacctgggcaggagaaagtgcagctgaagaggaaagtcactttactgaggggagtctccattatcattggcaccatcattggagcaggaatcttcatctctcctaagggcgtgctccagaacacgggcagcgtgggcatgtctctgaccatctggacggtatgtggggtcctgtcactatttggagctttgtcttatgctgaattgggaacaactataaagaaatctggaggtcattacacatatattttggaagtctttggtccattaccagcttttgtacgagtctgggtggaactcctcataatacgccctgcagctactgctgtgatatccctggcatttggacgctacattctggaaccattttttattcaatgtgaaatccctgaacttgcgatcaagctcattacagctgtgggcataactgtagtgatggtcctaaatagcatgagtgtcagctggagcgcccggatccagattttcttaaccttttgcaagctcacagcaattctgataattatagtccctggagttatgcagctaattaaaggtcaaacgcagaactttaaagacgccttttcaggaagagattcaagtattacgcggttgccactggctttttattatggaatgtatgcatatgctggctggttttacctcaactttgttactgaagaagtagaaaaccctgaaaaaaccattccccttgcaatatgtatatccatggccattgtcaccattggctatgtgctgacaaatgtggcctactttacgaccattaatgctgaggagctgctgctttcaaatgcagtggcagtgaccttttctgagcggctactgggaaatttctcattagcagttccgatctttgttgccctctcctgctttggctccatgaacggtggtgtgtttgctgtctccaggttattctatgttgcgtctcgagagggtcaccttccagaaatcctctccatgattcatgtccgcaagcacactcctctaccagctgttattgttttgcaccctttgacaatgataatgctcttctctggagacctcgacagtcttttgaatttcctcagttttgccaggtggctttttattgggctggcagttgctgggctgatttatcttcgatacaaatgcccagatatgcatcgtcctttcaaggtgccactgttcatcccagctttgttttccttcacatgcctcttcatggttgccctttccctctattcggacccatttagtacagggattggcttcgtcatcactctgactggagtccctgcgtattatctctttattatatgggacaagaaacccaggtggtttagaataatgtcagagaaaataaccagaacattacaaataatactggaagttgtaccagaagaagataagttatgaactaatggacttgagatcttggcaatctgcccaaggggagacacaaaatagggatttttacttcattttctgaaagtctagagaattacaactttggtgataaacaaaaggagtcagttatttttattcatatattttagcatattcgaactaatttctaagaaatttagttataactctatgtagttatagaaagtgaatatgcagttattctatgagtcgcacaattcttgagtctctgatacctacctattggggttaggagaaaagactagacaattactatgtggtcattctctacaacatatgttagcacggcaaagaaccttcaaattgaagactgagatttttctgtatatatgggttttgtaagatggttttacacactacagatgtctatactgtgaaaagtgttttcaattctgaaaaaaagcatacatcatgattatggcaaagaggagagaaagaaatttattttacattgacattgcattgcttccccttagataccaatttagataacaaacactcatgctttaatggattatacccagagcactttgaacaaaggtcagtggggattgttgaatacattaaagaagagtttctaggggctactgtttatgagacacatccaggagttatgtttaagtaaaaatccttgagaatttaaaaaaaaaaaaaaaaaaaaaaaaaaaaaaaaaaaaaaaaaaaaaaaaaaaaaaaaaaaaaaaaaaaaaaaaaa

SEQ ID NO: 2917 - DNA, 933 bp, Homo sapiens; identical to SEQ ID NO: 2271

SEQ ID NO: 2918 - DNA, 879 bp, Homo sapiens
gccgtcggagcccttgcacgcctgctctcttgtagcttctctcagcctagcccagcatcactatggtggacgctttcctgggcacctggaagctagtggacagcaagaatttcgatgactacatgaagtcactcggtgtgggttttgctaccaggcaggtggccagcatgaccaagcctaccacaatcatcgaaaagaatggggacattctcaccctaaaaacacacagcaccttcaagaacacagagatcagctttaagttgggggtggagttcgatgagacaacagcagatgacaggaaggtcaagtccattgtgacactggatggagggaaacttgttcacctgcagaaatgggacgggcaagagaccacacttgtgcgggagctaattgatggaaaactcatcctgacactcacccacggcactgcagtttgcactcgcacttatgagaaagaggcatgacctgactgcactgttgctgactactactctgccaatcggctacccctcgactcagcaccacattgcctcatttcttcctctgcattttgtacaaatccacgaattcttctggggtcaggtgccactgaccgggatccagttccagttcccatggtgtatgtggttttttttttttttttttaactgcactcatagggtgctctgaggtcaataaagcagagccaaggccacccagttgcctttttgcctttggtaacataaaaaaaaaaaaaaaaaaaaaaaaaaaaaaaaaaaaaaaaaaaaaaaaaaaaaaaaaaaaaaaaaaaaaaaaaaaaaaaaaaaaaaaaaaaaaaaaaaaaaaaaaaaaaaaaaaaaaaaaaaaaaaaaaaaaaaaaaaaaaaaaaaaaaaaaaaaa

SEQ ID NO: 2919 - DNA, 451 bp, Homo sapiens
aggaccacgcctcctccaagtcccagcgaacccgcgtgcaacctgtcccgactctagccgcctcttcagctcgccatggatcccaactgctcctgcgccgccggtgactcctgcacctgcgccggctcctgcaaatgcaaagagtgcaaatgcacctcctgcaagaaaagctgctgctcctgctgccctgtgggctgtgccaagtgtgcccagggctgcatctgcaaaggggcgtcggacaagtgcagctgctgcgcctgatgctgggacagccccgctcccagatgtaaagaacgcgacttccacaaacctggattttttatgtacaaccctgaccgtgaccgtttgctatattcctttttctatgaaataatgtgaatgataataaaacagctttgacttgaaaaaaaaaaaaaaaaaaaaaaaaaaaaaaaaaaaaaaaaaaaaaaaa

SEQ ID NO: 2920 - DNA, 1804 bp, Homo sapiens
gtatcactcagaatctggcagccagttccgtcctgacagagttcacagcatatattggtggattcttgtccatagtgcatctgctttaagaattaacgaaagcagtgtcaagacagtaaggattcaaaccatttgccaaaaatgagtctaagtgcatttactctcttcctggcattgattggtggtaccagtggccagtactatgattatgattttcccctatcaatttatgggcaatcatcaccaaactgtgcaccagaatgtaactgccctgaaagctacccaagtgccatgtactgtgatgagctgaaattgaaaagtgtaccaatggtgcctcctggaatcaagtatctttaccttaggaataaccagattgaccatattgatgaaaaggcctttgagaatgtaactgatctgcagtggctcattctagatcacaaccttctagaaaactccaagataaaagggagagttttctctaaattgaaacaactgaagaagctgcatataaaccacaacaacctgacagagtctgtgggcccacttcccaaatctctggaggatctgcagcttactcataacaagatcacaaagctgggctcttttgaaggattggtaaacctgaccttcatccatctccagcacaatcggctgaaagaggatgctgtttcagctgcttttaaaggtcttaaatcactcgaataccttgacttgagcttcaatcagatagccagactgccttctggtctccctgtctctcttctaactctctacttagacaacaataagatcagcaacatccctgatgagtatttcaagcgttttaatgcattgcagtatctgcgtttatctcacaacgaactggctgatagtggaatacctggaaattctttcaatgtgtcatccctggttgagctggatctgtcctataacaagcttaaaaacataccaactgtcaatgaaaaccttgaaaactattacctggaggtcaatcaacttgagaagtttgacataaagagcttctgcaagatcctggggccattatcctactccaagatcaagcatttgcgtttggatggcaatcgcatctcagaaaccagtcttccaccggatatgtatgaatgtctacgtgttgctaacgaagtcactcttaattaatatctgtatcctggaacaatattttatggttatgtttttctgtgtgtcagttttcatagtatccatattttattactgtttattacttccatgaattttaaaatctgagggaaatgttttgtaaacatttattttttttaaagaaaagatgaaaggcaggcctatttcatcacaagaacacacacatatacacgaatagacatcaaactcaatgctttatttgtaaatttagtgtttttttatttctactgtcaaatgatgtgcaaaaccttttactggttgcatggaaatcagccaagttttataatccttaaatcttaatgttcctcaaagcttggattaaatacatatggatgttactctcttgcaccaaattatcttgatacattcaaatttgtctggttaaaaaataggtggtagatattgaggccaagaatattgcaaaatacatgaagcttcatgcacttaaagaagtatttttagaataagaatttgcatacttacctagtgaaacttttctagaattatttttcactctaagtcatgtatgtttctctttgattatttgcatgttatgtttaataagctactagcaaaataaaacatagcaaatgaaaaaaaaaaaaaaaaaaaaaaaaaaaaaaaa

SEQ ID NO: 2921 - DNA, 1660 bp, Homo sapiens; identical to SEQ ID NO: 2523

SEQ ID NO: 2922 - DNA, 1646 bp, Homo sapiens
gctcggctcactgagacccggtggtccagacgctgctcctggctggggtggcgctgcagggagaaccgcgagctctcaggggtcggcgggtgacttctttccggaagaaagcgaggaacgcgctctgcggggtgagccggactccccaactccggacgatcagcccaggactgagagccccgaagtccccaaccacaagtaagcggccccagaaggacaagtctaggtcgccgtccagagcgccatggccgcgcccgcccttcgtttgtgccacatcgccttccacgtgcccgccgggcagcccctagcccggaacctgcagcgcctcttcggcttccagcccctggcttcgcgggaggtggacggctggcggcagctagccctgcgcagcggcgacgcggtctttttggtgaacgagggcgcagggtctggagagccgctgtacggcctggatccgcgtcacgccgtgcccagcgccacaaacctgtgcttcgacgtggcggacgccggcgctgcaacccgggagctggcagcgctgggctgcagcgtgcctgtccctcccgttcgcgtgcgggacgcgcagggtgccgccacttacgccgtggtcagctcgcctgccggcatcctcagcctgaccttgctggagcgcgctggctaccgcggacccttcctacccggcttcaggcccgtgtcctctgcgcctggccccgggtgggtcagccgcgtggaccacctgaccttggcctgcacccccggcagctcccccacacttttgcgctggttccacgactgcctgggcttttgccacttgccgctgagcccaggtgaggatcccgagctgggcctcgaaatgacagcagggtttgggcttgggggactgaggcttacagccctgcaggcccagccgggcagcattgtccccactcttgttctggctgagtcccttccgggggcgacgacacgacaggaccaggtggagcagttcctggcccggcacaaggggccaggcctgcagcacgtggggctgtatacgcctaacattgtggaggccactgagggggtggcaactgctggaggccagttcctggctccccctggggcatactaccagcagccaggaaaggagaggcagatccgagctgcagggcacgagcctcatctgcttgctcgacaggggatcctgctagatggtgataaaggcaagtttctgcttcaggtcttcaccaagtccctttttactgaggacactttcttcctggagctgattcagaggcagggggccactggctttggtcagggcaacatcagagctctgtggcagtccgtacaggagcaatctgccaggagccaggaagcctaaggatgcccagggctgggtgcagccagctgtcctgcagctctggggagaccagcacagaactgaggaacatctgcaggaggcccaactagtgaaaggctttgcctccggggggcaggtgtgacttccatttcatcagtgcctgccagaagctgtgtctctcattgggctccaaagaggtgggattttttaaaactaaaacatttcttatatacagtctataataaatatgtaagatacaaagaacaataaaagaattacacactaggaaaaaaaaaaaaaaaaaaaa

SEQ ID NO: 2923 - DNA, 699 bp, Homo sapiens; identical to SEQ ID NO: 1478

SEQ ID NO: 2924 - DNA, 3173 bp, Homo sapiens; identical to SEQ ID NO: 2452

SEQ ID NO: 2925 - DNA, 5164 bp, Homo sapiens
cctgcctgcccccaaaatgtgaagcttgctgaaatcaacttgaaaggagatagcacatgccttttgtttctccgctctccccctatttctcttccttcctgctccctgcataatctgaattctctgaaggcaggggtcctgtcttactcatcttgatgttcatcgtgactcgtacagcagcggcggcagcggcagcccagccgagcgttaggtgctgctctctgcgcggcgttttgcaaaggacttcaccgatctacttttgcagtcgcctcggactgtccatgtgtttacttcccccagcccgaggattcgatatctaggttcctgtgaaatgcaactgagcagccaaagtactttgagaacacggggcggcataaacaccaaaacttttttgtggaaggaaaatgcaataagcaagcttgccgttttccgatgcggtgtggagtgagtgtgtgtcgcgcgtgtccgcactggaggcatatgcttgtgtgtgtacatggggtgtgtttttcggtatgtagggagaaaatgcttgccaaccaccggaaatctcctggaatttattagaaaataatggattataaaaagaaggcaagcaaggagcggatctccccttgagttgcaacccgatttgctgctggctcagtttgttgtgattctttttgttgataggtgtctgatggtattccgataacgttccccccttttcttccccttgagcttttacagtttaaaaaaaggaaacaaaaaccaccccaaaatctccccccccgtttttttcgccccgtcgggatcgccgtttccatccatgtgcttgcgtctcccccgcgttccacttaaactattttaatccttggacccaaggaggaggctgataggggggtggataaaaaaagttcttccaaaatagtgtgcccggggagcaggatgggggatttcgcagcccccgctgctgccgcgaatggcagtagtatttgcatcaacagtagcctgaacagcagcctcggcggggccgggatcggtgtgaataatactcccaatagtactcccgctgctccgagtagcaatcacccggcagccggtggatgcggcggctccgggggccccggcggcggttcggcggccgttcccaagcacagcaccgtggtggagcggctccgccagcgcatcgagggctgccgtcggcaccacgtcaactgcgagaacaggtaccagcaggctcaggtggagcagctggagctggagcgccgggacaccgtgagcctctaccagcggaccctggagcagagggccaagaaatcgggcgccggcaccggcaaacagcagcacccgagcaaaccccagcaagatgcggaggctgcctcggcggagcagaggaaccacacgctgatcatgctacaagagactgtgaaaaggaagttggaaggagctcgatcaccacttaatggagaccagcagaatggtgcttgtgatgggaatttttctccgactagcaaacgaattcgaaaggacatttctgcggggatggaagccatcaacaatttgcccagtaacatgccactgccttcagcttctcctcttcaccaacttgacctgaaaccttctttgcccttgcagaacagtggaactcacactcctgggcttctagaagatctaagtaagaatggtaggctccctgagattaaacttcctgtcaacggttgcagtgacctggaggatagcttcaccatcttgcagagcaaagacctcaaacaagaacctctcgatgaccctacttgcatagacacatcagaaacatctctttcaaatcagaacaagctgttctcagacattaatctgaatgatcaggagtggcaagaattaatagatgaattggccaacacggttcctgaggatgacatacaggacctgttcaacgaagactttgaagagaagaaggagccagaattctcgcagccagcaactgagacccctctctcccaggagagtgcgagcgtgaagagcgacccctctcactctcccttcgcacatgtctccatgggatctccccaggcgaggccttcttcttctggtcctcccttttctactgtctccacggccactagtttaccttctgttgccagcactcccgcagctccaaaccctgcaagctcaccagcaaactgtgctgtccagtcccctcaaactccaaaccaagcccacactccaggccaagctccacctcggcctggaaatggttatctcctgaatccggcagcagtgacagtggccggttcagcgtcagggcctgtggctgtgcccagctctgacatgtctccagcagaacagctcaaacagatggctgcacagcagcaacaaagggccaaactcatgcagcagaaacagcaacagcaacagcagcagcagcagcagcagcagcaacagcagcagcagcagcagcaacagcactcaaatcagacttcaaattggtctcccttaggacctccctctagtccatatggagcagcttttactgcagaaaaaccaaatagcccaatgatgtacccccaagcctttaacaaccaaaaccctatagtgcctccaatggcaaacaacctgcagaagacaacaatgaataactacctccctcagaatcacatgaatatgatcaatcagcagccaaataacttgggtacaaactccttaaacaaacagcacaatattctgacttatggcaacactaaacccctgacccacttcaatgcagacctgagtcagaggatgacaccaccagtggccaaccccaacaaaaaccccttgatgccgtatatccagcagcagcaacagcagcagcaacagcaacagcagcagcagcagcagcagcagccgccacctccacagctccaggcccccagggcacacctgagcgaagaccagaaacgcctgcttctcatgaagcagaaaggagtgatgaatcagcccatggcttacgctgcacttccatcccacggtcaggagcagcatccagttggacttccccgaaccacaggccccatgcagtcctccgtgcccccaggctcaggtggcatggtctcaggagccagtcccgcaggccccggcttcctgggcagccagccccaagcagccatcatgaagcagatgctcattgatcagcgggcccagttgatagagcagcagaagcaacagttcctgcgggagcaaaggcagcagcagcagcagcagcagcagattttggcggaacagcagttgcagcaatcacatctaccccggcagcacctccagccacagcggaatccatacccagtgcagcaggtcaatcagtttcaaggttctccccaggatatagcagccgtaagaagccaagcagccctccagagcatgcgaacgtcacggctgatggcacagaacgcaggcatgatgggaataggaccctcccagaaccctgggacgatggccaccgcagctgcgcagtcggagatgggactggccccttatagcaccacgcctaccagccaaccaggaatgtacaatatgagcacaggcatgacccaaatgttgcagcatccaaaccaaagtggcatgagcatcacacataaccaagcccagggaccgaggcaacctgcctctgggcagggggttggaatggtgagtggctttggtcagagcatgctggtgaactcagccattacccagcaacatccacagatgaaagggccagtaggccaggccttgcctaggccccaagcccctccaaggctgcagagccttatgggaacagtccagcaaggagcacaaagctggcaacagaggagcttgcagggcatgcctgggaggactagtggagaattgggaccattcaacaatggcgccagctaccctcttcaagctgggcagccgagactgaccaagcagcacttcccacagggactgagccagtcagtcgtggatgctaacacgggcacagtgaggaccctcaacccagctgccatgggtcggcagatgatgccatcgctcccggggcagcaaggcaccagccaggcgaggccaatggtcatgtctggcctgagccagggagtcccaggcatgccagcgttcagccagcacccagcacagcagcagatacccagtggcagctttgctccaagcagccagagccaagcctatgagcggaatgcccctcaggacgtgtcatacaattacagtggcgacggagctgggggttccttccctggcctcccggacggtgcagaccttgtggactccatcatcaaaggcgggccaggggacgagtggatgcaggagcttgatgaattgtttggtaacccctaatcaagagaggccccaagatccacaactcgagtggttaaagcttaaaaagtgaaaaagaaacaggatgttgacccatccttgttttttgtttttttgacccacgtaaactgagcaaaactgcagctggctgacaatggaagatccaggtgccaatccacagccccaccaggcctcatttcacctgattttcacaaagcaatcgagatgagacgccatgcagatcccggctgcgagagagggagacacccggaggagcaggtgggaagatgaagccggccagagcccctctgcccagcatgccctgtgatcgcctggcccagcaggagctgcttcagccgagagggactattacccaagagaggtatcctcagcccctcctgccccaggtcgggagacagcagctttggagacacaaaagagacagagcctcagccagggagagtgagtcccccagaagaggctgggtggttgcacaggccaggtgcacaggttggaaatgcactgaactctgggtgccgagagatgtaaggctttgagacatgctactgaatttggagggcaggcacgaagaacagtgagattgtcaaaaggagacaaccacagatcctacaggactgtctgtctcctgccccatgatgaccctcaggaattgcaaaggctctgctgtcacaaggagagcaggctgagtttggagcagggtccatccggcagtcctgggacggcttccctctgctggtgcccctggtggcagtccctccaggtggggctggagcctgctggcgcccaatacaaaacccatacatccaggtgggtcacatctacttctggcggccgc

SEQ ID NO: 2926 - DNA, 1694 bp, Homo sapiens
aaaaataacagccgtatgcctctgctaagtactaactacctcatcaccttttgtgcagacaggcaggttacatttggtttaaggaattaggaatatgttctttccagcaccttagtaacccacgcgattgtgattcttttctcttcttgactgtgataggtggcatggaatattcacatgggagagccgcatgaggccgcccaccacgcttcctgaaggatgcccgtgtggaagaattttgacgtgccagtgtcctcgttctacagggtgttccattcttccgcaatctcagaaaaatgggactaaaagaaactattttgtaaaataagaagacttccatttttaatgaccaacatgtattaagatggacacctactctacgaaacacaaagttctatggtctcgaagaagcccgtgcctgtttaaaactgatcctaactaaaaacagacttgagtggatatgagaatgttggttagtggcagaagagtcaaaaaatggcagttaattattcagttatttgctacttgttttttagcgagcctcatgtttttttgggaaccaatcgataatcacattgtgagccatatgaagtcatattcttacagatacctcataaatagctatgactttgtgaatgataccctgtctcttaagcacacctcagcggggcctcgctaccaatacttgattaaccacaaggaaaagtgtcaagctcaagacgtcctccttttactgtttgtaaaaactgctcctgaaaactatgatcgacgttccggaattagaaggacgtggggcaatgaaaattatgttcggtctcagctgaatgccaacatcaaaactctgtttgccttaggaactcctaatccactggagggagaagaactacaaagaaaactggcttgggaagatcaaaggtacaatgatataattcagcaagactttgttgattctttctacaatcttactctgaaattacttatgcagttcagttgggcaaatacctattgtccacatgccaaatttcttatgactgctgatgatgacatatttattcacatgccaaatctgattgagtaccttcaaagtttagaacaaattggtgttcaagacttttggattggtcgtgttcatcgtggtgcccctcccattagagataaaagcagcaaatactacgtgtcctatgaaatgtaccagtggccagcttaccctgactacacagccggagctgcctatgtaatctccggtgatgtagctgccaaagtctatgaggcatcacagacactaaattcaagtctttacatagacgatgtgttcatgggcctctgtgccaataaaatagggatagtaccgcaggaccatgtgtttttttctggagagggtaaaactccttatcatccctgcatctatgaaaaaatgatgacatctcatggacacttagaagatctccaggacctttggaagaatgctacagatcctaaagtaaaaaccatttccaaagggttttttggtcaaatatactgcagattaatgaagataattctcctttgtaaaattagctatgtggacacatacccttgtagggctgcgtttatctaatagtacttgaatgttgtatgttttcactgtcactgagtcaaacctggatgaaaaaaacctttaaatgttcgtctataccctaagtaaaatgaggacg

SEQ ID NO: 2927 - DNA, 3677 bp, Homo sapiens
attacaggcggatcccatggggccggaggcctgcaccaccgcgagatgtggccattttacaagaaagggctaataagttggtgaaatacctgttggttaaggaccagacaaagatccccatcaaacgctcagacatgctgagggatgtcatccgagaatatgatgaatatttcccagaaatcattgaacgagcaagctacactctggagaagatgtttcgagtcaatctgaaagaaattgataagctaagtagcttgtatattctcatcagcactcaggaatcctctgcaggcatactgggaacgaccaaggacacacccaagctgggtctcctcatggtgattctgagtgtcatttttatgaatggcaacaaggccggtgaggctgtcatctgggaggtgctgcgcaagttggggctgcgccctgggtatgactgggctctctcagcgcttgctgtccgtgttgtcctttggcaagagaggatggtcctaggattgcatcagtctggtggtctggtggagcgggtggggtgctggactgggtagagggcccagggttctgacctgggtggatgacgggcaaatggtcctgaactctctgctgtctctctccttaatgtcctctgtctgttctaagctgagatgttagatagaccttcagggatccctgacaaagaggcatctggtcttaactgcttgcttctagtggccatgtgctcattactttcttcacttcattgagactgccccatgtgctagagaggtttcttccatgttgggaaatgcctctgccctcatctgggcagttctgatctgtgttcatgggttatttttcccattgtcagggtgaggcattcactctttggggaagtgaggaagctcatcacagacgagtttgtgaagcagaagtacctggagtacaagagggtccctaacagcagaccacctgaatatgagttcctctggggcttgcgctcctaccacgagactagcaagatgaaagtcctcaagtttgcatgcagggtgcagaagaaagaccccaaggactgggctgtgcagtaccgcgaggcagtggagatggaagtccaagctgcagctgtggctgtggctgaggctgaagccagggctgaggcaagagcccaaatggggattggagaggaagctgtggctgggccctggaattgggatgacatggatatcgactgcctaacaagggaagagttaggcgatgatgctcaggcctggagcagattttcatttgaaattgaggccagagcccaagaaaatgcagatgccagcaccaacgtcaacttcagcagaggagctagtaccagggctggcttcagcgatggtgctagtattagcttcaatggtgcacccagctccagtggtggcttcagtggtggacctggcattacctttggtgttgcacccagcaccagtgccagcttcagcaatacagccagcattagctttggtggtacactgagcactagctccagcttcagcagcgcagccagcattagctttggttgtgcacacagcaccagcactagtttcagcagtgaagccagcattagctttggtggcatgccttgtaccagtgccagctttagtggtggagtcagctctagttttagtggcccactcagcaccagtgccactttcagtggtggagccagctctggctttggaggcacactcagcaccacggctggctttagtggtgtactcagcactagcaccagctttggcagtgcacccacaacgagcacagtcttcagtagtgcgcttagcaccagcactggctttggaggcatactcagcaccagtgtctgttttggtggctctcccagctccagtggtagctttggtggtacactcagtaccagtatctgcttcggtggctctccctgcaccagcactggctttggaggcacacttagcaccagtgtctcctttggtggctcttccagcaccagtgccaattttggtggtacactaagtaccagcatctgctttgatggctctcccagcactggtgctggctttggtggtgctctcaacaccagtgccagctttggcagtgtgctcaacaccagtactggttttggtggtgctatgagcaccagtgctgactttggcggtacactaagcaccagtgtctgctttggtggctctcctggcaccagtgtcagctttggcagtgcactcaacaccaatgctggttatggtagtgctgtcagcaccaacactgactttggtggtacactaagcaccagcgtctgttttggtggctctcccagcaccagtgctggctttggtggtgcactcaacaccaatgccagctttggctgtgccgtcagcaccagtgccagcttcagtggtgctgtcagcaccagtgcttgcttcagtggtgcaccaatcaccaaccctggctttggcggtgcatttagcaccagtgctggcttcggtggggcacttagtaccgttgctgacttcggtggtactcccagcaacagcattggctttggtgctgctcccagcaccagtgtcggctttggtggtgctcatggcaccagcctctgttttggtggagctcccagcaccagcctctgctttggcagtgcatctaatactaacctatgctttggtggccctcctagcaccagtgcctgctttagtggtgctaccagccctagtttttgtgatggacccagcaccagtaccggtttcagctttggcaatgggttaagcaccaatgctggatttggtggtggactgaacaccagtgctggctttggtggtggcctaggcaccagtgctggcttcagtggtggcctaagcacaagttctggctttgatggtgggctaggtaccagcgctggcttcggtggaggaccaggcaccagcactggttttggtggtggactgggcaccagtgctggcttcagtggcggactgggcaccagtgctggctttggtggtggactggtcactagtgatggctttggtggtggactgggcaccaatgctagtttcggcagcacacttggcaccagtgctggctttagtggtggcctcagcaccagcgatggctttggcagtaggcctaatgccagcttcgacagaggactgagtaccatcattggctttggcagtggttccaacaccagcactggctttactggcgaacccagcaccagcacgggcttcagtagtggacccagttctattgttggcttcagcggtggaccaagcactggtgttggcttctgcagtggaccaagcaccagtggcttcagcggtggaccgagcacaggagctggcttcggcggtggaccaaacactggtgctggctttggtggtggaccgagcaccagtgctggctttggcagtggagccgccagtcttggtgcctgtggcttctcgtatggctagtgaggtttcagatttattccccatgtttacagataccgctaataaattgcagtagtccttcccatggagccaaagtacatccttggaatctttgtccacacagcagtcaaggcagttatggccaatcagctgagggtgtcatgtgatggaaaaatctgtttgctgttcctgctttattgtttgctttctgtgtgctgtcatattttggtatcagagttacattaaatttgcaaaatg

SEQ ID NO: 2928 - DNA, 3645 bp, Homo sapiens
ggggttcctggtcatacaccagtactaccaaggacagcttttttcctgcaagatctgttacctaaagcaataaaaaatggccagaggatcagtgtccgatgaggaaatgatggagctcagagaagcttttgccaaagttgatactgatggcaatggatacatcagcttcaatgagttgaatgacttgttcaaggctgcttgcttgcctttgcctgggtatagagtacgagaaattacagaaaacctgatggctacaggtgatctggaccaagatggaaggatcagctttgatgagtttatcaagattttccatggcctaaaaagcacagatgttgccaagacctttagaaaagcaatcaataagaaggaagggatttgtgcaatcggtggtacttcagagcagtctagcgttggcacccaacactcctattcagaggaagaaaagtatgcctttgtcaactggataaacaaagccctggaaaatgatcctgattgtcggcatgtcatcccaatgaacccaaacacgaatgatctctttaatgctgttggagatggcattgtcctttgtaaaatgatcaacctgtcagtgccagacacaattgatgaaagaacaatcaacaaaaagaagctaacccctttcaccattcaggaaaatctgaacttggctctgaactctgcctcagccatcgggtgccatgtggtcaacataggggctgaggacctgaaggaggggaagccttatctggtcctgggacttctgtggcaagtcatcaagattgggttgtttgctgacattgaactcagcagaaatgaagctctgattgctcttttgagagaaggtgagagcctggaggatttgatgaaactctcccctgaagagctcttgctgaggtgggctaattaccacctggaaaatgcaggctgcaacaaaattggcaacttcagtactgacatcaaggactcaaaagcttattaccacctgcttgagcaggtggctccaaaaggagatgaagaaggtgttcctgctgttgttattgacatgtcaggactgcgggagaaggatgacatccagagggcagaatgcatgctgcagcaggcggagaggctgggctgccggcagtttgtcacagccacagatgttgtccgagggaaccccaagttgaacttggcttttattgccaacctctttaacagataccctgccctgcacaaaccagagaaccaggacattgactggggggctcttgaaggtgagacgagagaagagcggacatttaggaactggatgaactccctgggtgttaaccctcgagtcaatcatttgtacagtgacttatcagatgccctggtcatcttccagctctatgaaaagatcaaagttcctgttgactggaacagagtaaacaaaccgccataccccaaactgggaggcaatatgaagaagcttgagaattgtaactacgcggtagaattggggaagaatcaagcgaagttctccctggttggcatcggtggacaagatctcaatgaaggaaaccgcactctcacactggccttgatttggcagctaatgagaaggtatacactgaatatcctcgaagaaattggtggtggccagaaggtcaatgatgacattattgtcaactgggtgaatgaaacattgagggaagcagagaaaagttcatccatctctagtttcaaggacccgaagattagtacaagtctgcctgttctggacctcatcgatgccatccaaccaggttccattaactatgaccttctgaagacagaaaatctgaatgatgatgagaaactcaacaatgcaaaatatgccatctctatggcccgaaaaattggagcaagagtgtatgccctgccagaagacctggttgaagtgaaccccaaaatggtcatgaccgtgtttgcctgcctcatggggaaaggaatgaagagggtgtgaggcccaatggggctgggtgggaggcggtgcactcactcctgactgcccggcacagatgctccagggatgattcaagccattccaaagttcaacttggtgacactctataagattccaaaaagcacatattagtgcagccaagtagcctctcctgtatttaacaaaaagtgcttcattctttgcaggaggcccaacctcctatatataggtttctattcttgatttatttgcttcttcgaaaatctagaggaaaagaaagaagttattttccaggtacccttctcgcttttgccattagccaaggatagaagctgcagtggtattaattttgatataatctttcaaaccagcttcatgtggcttcccttttctttgttcaagatgagggccaggaggggaaacatcacacctgccctaaaccctgttcctggaggtcagcatttgatctgttgcaagcccctctttctgtcccctcttcctaccctgcctcccatgactttgctcctcacacttttggaaccatgccttccgggggggcccatctcttctggccgtccttgtctctgggccacttggagtgtgtgataaatcagtcaagctgttgaagtctcaggagtctctggtagcctgcagaagtaagcctcatcatcagagcctttcctcaaaactggagtcccaaatgtcatcaggttttgttttttttcagccactaagaacccctctgcttttaactctagaatttgggcttggaccagatctaacatcttgaatactctgccctctagagccttcagccttaatggaaggttggatccaaggagggtgtaatggagcatcaagccactcggcggcagcatggagctataactaagcatcctttagggttctgcctctccaggcatttagccctcacattagatctagttactgtggtatggctaatacctgtcaacatttggaggcaatcctaccttgcttttgcttctagagcttagcatatctgattgttgtcaggccatattatcaatgtttacttttttggtactataaaagctttctgccacccctaaactccaggggggaaaatatgtgccaatcaatagcacccctactcacatacacacacacctagccagctgtcaagggcagaatgaatctatgctggataagaaatggtggaactgcgttatgaagagctaatttactggacaaagaattccaaagcaaaaccagaacagtatgaatttgagcaggtctcataggttgagcaatttccccctaaaccaactgaaggctaaaaagcaacaggccattgtgaaccaatgcaagacgccctctatcatggtgaaaagctccatcaatgaggtatcttctttagtggtggtatgtaatggaacttagccatttttcaaagcaattgaaatgcattgctctggatctgttccttggcagtggactcagaaagccaacatgtggctcctcccagcccataaccagtatttttgctgcttctgaatacaaattggttggttttgacttcagattgaacttactgtagcctcagatgatttcccccctccgcctccaggaagaaagaatgttactgccttaataaaaaatgaaaagagaatgatgctcaaaatctttccaaataaaatgttccctataaaaaaaaaaaaaaaaaa

SEQ ID NO: 2929 - DNA, 2661 bp, Homo sapiens; identical to SEQ ID NO: 2440

SEQ ID NO: 2930 - DNA, 3173 bp, Homo sapiens; identical to SEQ ID NO: 2452

SEQ ID NO: 2931 - DNA, 2925 bp, Homo sapiens; identical to SEQ ID NO: 205

SEQ ID NO: 2932 - DNA, 2463 bp, Homo sapiens; identical to SEQ ID NO: 770

SEQ ID NO: 2933 - DNA, 1394 bp, Homo sapiens
ccgggtcggagccccccggagctgcgcgcgggcttgcagcgcctcgcccgcgctgtcctcccggtgtcccgcttctccgcgccccagccgccggctgccagcttttcggggccccgagtcgcacccagcgaagagagcgggcccgggacaagctcgaactccggccgcctcgcccttccccggctccgctccctctgccccctcggggtcgcgcgcccacgatgctgcagggccctggctcgctgctgctgctcttcctcgcctcgcactgctgcctgggctcggcgcgcgggctcttcctctttggccagcccgacttctcctacaagcgcagcaattgcaagcccatcccggtcaacctgcagctgtgccacggcatcgaataccagaacatgcggctgcccaacctgctgggccacgagaccatgaaggaggtgctggagcaggccggcgcttggatcccgctggtcatgaagcagtgccacccggacaccaagaagttcctgtgctcgctcttcgcccccgtctgcctcgatgacctagacgagaccatccagccatgccactcgctctgcgtgcaggtgaaggaccgctgcgccccggtcatgtccgccttcggcttcccctggcccgacatgcttgagtgcgaccgtttcccccaggacaacgacctttgcatccccctcgctagcagcgaccacctcctgccagccaccgaggaagctccaaaggtatgtgaagcctgcaaaaataaaaatgatgatgacaacgacataatggaaacgctttgtaaaaatgattttgcactgaaaataaaagtgaaggagataacctacatcaaccgagataccaaaatcatcctggagaccaagagcaagaccatttacaagctgaacggtgtgtccgaaagggacctgaagaaatcggtgctgtggctcaaagacagcttgcagtgcacctgtgaggagatgaacgacatcaacgcgccctatctggtcatgggacagaaacagggtggggagctggtgatcacctcggtgaagcggtggcagaaggggcagagagagttcaagcgcatctcccgcagcatccgcaagctgcagtgctagtcccggcatcctgatggctccgacaggcctgctccagagcacggctgaccatttctgctccgggatctcagctcccgttccccaagcacactcctagctgctccagtctcagcctgggcagcttccccctgccttttgcacgtttgcatccccagcatttcctgagttataaggccacaggagtggatagctgttttcacctaaaggaaaagcccacccgaatcttgtagaaatattcaaactaataaaatcatgaatatttttatgaagtttaaaaaaaaaaaa

SEQ ID NO: 2934 - DNA, 3134 bp, Homo sapiens
tacccagcctgtcgctaaactttccgggcgccagcccggctctgagtcgcgcttctcagcggagtgacccagggacggaggacccaggctggctggggactgtctgctcttctcggcgggatccgtggagagtcctttccctggaatccgagccctaaccgtctctccccagccctatccggcgaggagcggagcgctgccagcggaggcagcgccttcccgaagcagtttatctttggacggttttctttaaaggaaaaagcaaccaacaggttgccagccccggcgccacacacgagacgccggagggagaagccccggcccggattcctctgcctgtgtgcgtccctcgcgggctgctggaggcgaggggagggagggggcgatggctcggcctgacccatccgcgccgccctcgctgttgctgctgctcctggcgcagctggtgggccgggcggccgccgcgtccaaggccccggtgtgccaggaaatcacggtgcccatgtgccgcggcatcggctacaacctgacgcacatgcccaaccagttcaaccacgacacgcaggacgaggcgggcctggaggtgcaccagttctggccgctggtggagatccaatgctcgccggacctgcgcttcttcctatgctctatgtacacgcccatctgtctgcccgactaccacaagccgctgccgccctgccgctcggtgtgcgagcgcgccaaggccggctgttcgccgctgatgcgccagtacggcttcgcctggcccgagcgcatgagctgcgaccgcctcccggtgctgggccgcgacgccgaggtcctctgcatggattacaaccgcagcgaggccaccacggcgccccccaggcctttcccagccaagcccacccttccaggcccgccaggggcgccggcctcggggggcgaatgccccgctgggggcccgttcgtgtgcaagtgtcgcgagcccttcgtgcccattctgaaggagtcacacccgctctacaacaaggtgcggacgggccaggtgcccaactgcgcggtaccctgctaccagccgtccttcagtgccgacgagcgcacgttcgccaccttctggataggcctgtggtcggtgctgtgcttcatctccacgtccaccacagtggccaccttcctcatcgacatggaacgcttccgctatcctgagcgccccatcatcttcctgtcagcctgctacctgtgcgtgtcgctgggcttcctggtgcgtctggtcgtgggccatgccagcgtggcctgcagccgcgagcacaaccacatccactacgagaccacgggccctgcactgtgcaccatcgtcttcctcctggtctacttcttcggcatggccagctccatctggtgggtcatcctgtcgctcacctggttcctggccgccggcatgaagtggggcaacgaggccatcgcgggctacgcgcagtacttccacctggctgcgtggctcatccccagcgtcaagtccatcacggcactggcgctgagctccgtggacggggacccagtggccggcatctgctacgtgggcaaccagaacctgaactcgctgcgcggcttcgtgctgggcccgctggtgctctacctgctggtgggcacgctcttcctgctggcgggcttcgtgtcgctcttccgcatccgcagcgtcatcaagcagggcggcaccaagacggacaagctggagaagctcatgatccgcatcggcatcttcacgctgctctacacggtccccgccagcattgtggtggcctgctacctgtacgagcagcactaccgcgagagctgggaggcggcgctcacctgcgcctgcccgggccacgacaccggccagccgcgcgccaagcccgagtactgggtgctcatgctcaagtacttcatgtgcctggtggtgggcatcacgtcgggcgtctggatctggtcgggcaagacggtggagtcgtggcggcgtttcaccagccgctgctgctgccgcccgcggcgcggccacaagagcgggggcgccatggccgcaggggactaccccgaggcgagcgccgcgctcacaggcaggaccgggccgccgggccccgccgccacctaccacaagcaggtgtccctgtcgcacgtgtaggaggctgccgccgagggactcggccggagagctgaggggaggggggcgttttgtttggtagttttgccaaggtcacttccgtttaccttcatggtgctgttgccccctcccgcggcgacttggagagagggaagaggggcgttttcgaggaagaacctgtcccaggtcttctccaaggggcccagctcacgtgtattctattttgcgtttcttactgccttctttatgggaaccctctttttaatttatatgtatttttcttaatttgtaactttgttgcattttggcaacaatttacctttgctttgggggctttacaatcctaaggttggcgttgtaatgaagttccacttggttcaggtttctttgaactgtgtggtctcaattgggaaaatatatttcctatacgtgtgtctttaaaaaaaaaatgtgaacagtgaacgtttcggttgctgtgactgggaagttgttgggtgtgctttttcagccagcttctccttccactgcttaaagtgtccatgattctttaaggtgagctgcagtttatagccccaggtcatacctaggaggggagcataatgagctcagggcctccccaaagtgacaaggttagggagtgcttagcggttttgtgttcagccttagctttgtttatagagggaggttcagtttcttttctgtagtgcttgtaataattctcactcctaactgcaccatcgttgtgtcttgaataagttagaggtagcattatagaggatctggcataaatatttgcagtagtgagagcctaagcgatggtgattggtggagcttgaattttaggctggtgagatggcagcttttgtgcctgagaggtagtgggtggttcttaagcttcagtgatcccttttttttttttttttttttttttttaaggaacttgtgttataatttggtaaaagtgtaaacccactccctctggacaatacttagcgacagttgctaaaggggc

SEQ ID NO: 2935 - DNA, 3935 bp, Homo sapiens; identical to SEQ ID NO: 2914

SEQ ID NO: 2936 - DNA, 5384 bp, Homo sapiens; identical to SEQ ID NO: 1604

SEQ ID NO: 2937 - DNA, 4646 bp, Homo sapiens
gaatgcaggtgagaaaaggcacggactctgcggctgcgaacccaaacttgggcaccgcacggtgcgcactgctcagccttcgcccccgtgggcgaaaggctgctgcggtttcaggcggctgcttcgtgactaatgaccttgcgcagagttgttaagaaaaaagagaaacccgcgctctccggggtgagaagggactgactctgggcgtctctgaagatggctcgggcttctctttggcgcgccggggggaccctgacactgaccgctctgtgacgcgagtagtctcccctgcaccgtgcccgaagcgacgtgccgggggatttttcattctcgatctgttgactggctcccccgctgcatgagcagagtcggagttgagactggcttgttgctggccccagcgcctggtgcaggaagcgactcacgtttgtctgggtggccggagccggagcagagcctgggtttggagtgagtgcctggaacgtgaattggactcaactcgagtagcagcaaagaccagcgggctggcaggcgggggaggctgcaggctcattccccacctcttcccagccccactgcccgtctgccggagcggttctggccccttccgacagagcggggactagagccggggattctccgcccgctgaggggatgactctgggttgggggagcgccgaacccgcggcgcgcagtgtcccgtgaactgtgagtactgcgactgaacggcggcaggcgagcgggcgattagcacccattgcatgaattatgaaacaataactttcggaagaagcaggaggaaaaaaagaagcatctatcgctgccctcccacccccattcccggccaactctccacgccgcttttgccccctccctcccctccctctcgctccttcctttccgggagaggggagaggactcgggggagggcaggcggccggccccggaggaggggggcgccgagggggctgtggttagaaggagcagtagcagcagcagcaggagaagatgctgaggatgcggaccgcgggatgggcgcgcggctggtgcttgggctgctgcctcctcctgccgctctcgctcagcctggcggccgccaagcagctcctccggtaccggctggccgaggagggccccgccgacgtccgcatcggcaacgtggcttcagacctgggcatcgtgaccggatcgggtgaggtgactttcagcctggagtccggttccgagtacctgaagatcgacaacctcactggcgagctgagcacgagcgagcggcgcatcgaccgcgagaagctgccccagtgtcagatgatcttcgacgagaacgagtgcttcctggacttcgaggtgtcggtgatcgggccctcgcagagctgggtggacctgtttgagggtcaggtcatcgtgcttgacatcaacgacaacacgcccaccttcccgtcgcccgtgctcacgctcacggtggaggagaatcggccggtgggcacactttacctgctgcccacagccaccgaccgcgacttcggccgcaacggcatcgagcgctacgagctgctccaggagcccggaggcggcggcagcggcggcgagagccggcgcgccggggcggccgacagcgccccctaccccgggggcggcgggaacggcgcgagcggcggcggctcgggaggctccaagcggcggctggacgcatcagagggcggcggcggcaccaaccccggcggccgcagcagcgtgttcgagctgcaggtggcggacaccccggacggcgagaagcagccgcagctgatcgtgaagggggcgctggaccgcgagcagcgcgactcctacgagctgaccctgcgagtgcgcgacggcggcgacccgcctcgctcctcgcaggccatcctacgggtcctcatcaccgacgtgaacgacaacagcccccgcttcgagaagagcgtgtacgaggccgacttggctgagaacagcgccccggggacccccatcctgcaactgcgcgcagccgacttggacgtgggggtcaacgggcagatcgaatacgtgttcggggcggccaccgagtcggtgaggcggctgctgcgccttgacgagacgtccggctggctcagcgtcctgcaccggatcgaccgcgaggaggtgaaccagctgcgcttcacggtcatggcccgcgaccgcgggcagccccccaagaccgacaaggccaccgtggtccttaacatcaaagacgagaacgacaacgtgccgtccattgaaatccgcaagattgggcgcatccccctcaaggacggggtggccaacgtggccgaggacgttctggtcgacacccccatcgctctggtgcaggtgtccgaccgagaccaaggcgagaacggggtggtcacctgcaccgtggtgggcgacgtgcccttccagctcaagccagccagcgacaccgagggcgaccagaacaagaaaaagtacttcttgcacacctcgacccctctggactatgaggccacccgggagttcaacgtggtcatcgtggcggtggactcaggcagccccagcctctcgagcaacaactccctgattgtcaaggtgggagacaccaacgacaacccgcccatgttcggccagtcggtggtggaggtttacttccctgagaacaacatcccgggcgagagggtggccacggtgctggcgacagacgcagacagcggtaagaacgccgagatcgcctactcgctggactcctctgtgatggggatctttgccatcgatcccgattctggggacatcctggtcaataccgtgctggaccgcgagcagactgacaggtatgagtttaaagttaacgccaaagacaaaggcatccccgtgctgcagggcagcactacggtgattgtgcaggtggctgataaaaatgacaatgaccctaagtttatgcaggacgtcttcaccttttatgtgaaagaaaacttgcagcccaacagccctgtggggatggtcaccgtgatggatgctgacaaggggcggaatgcagagatgagcctgtacatagaggagaacaataacattttttctattgaaaatgacacggggaccatttactccacaatgtcttttgaccgggaacatcagaccacatacactttcagagtcaaggctgtggatgggggagatcctcccagatctgccacagctacagtctcgctttttgtgatggatgaaaatgacaatgctcccacagttacccttcccaaaaacatttcctacactttactgccaccttcgagtaatgtcaggacagtagtagctacagtgttggcaacagacagtgatgatggcatcaatgcagacctgaactacagcattgtgggaggaaatcccttcaagctgtttgaaattgatcccactagtggtgtggtttccttagtgggaaaactcacccaaaagcattatggcttgcacaggttggtggtgcaagtgaatgacagtgggcagccttcccagtccaccacgactctggtgcacgtgtttgtcaatgaaagtgtttctaatgcaactgcgattgactcccagatagctagaagtttgcacatcccactcacccaggatatagctggtgacccaagctatgaaattagcaaacagagactcagtattgtcattggcgtggttgctggcattatgacggtgattctaatcatcttaattgtagtgatggcaaggtactgcaggtccaaaaataaaaatggctatgaagccggcaaaaaagatcacgaagacttttttacaccccaacagcatgacaaatctaaaaagcctaaaaaggacaagaaaaacaaaaaatctaagcagcctctctacagcagcattgtcactgtggaggcttctaagccaaatggacagaggtatgatagtgtcaatgagaagctgtcagacagcccaagcatggggcgatacaggtccgttaatggtgggcccggcagtcctgacctggcaaggcattacaaatctagttccccattgcctactgttcagcttcatccccagtcaccaactgcaggaaaaaaacaccaggccgtacaagatctaccaccagccaacacatttgtgggagcaggagacaacatttcaattggatcagatcactgctctgagtacagctgtcaaaccaataacaagtacagcaaacagatgcgtctacatccatacattactgtgtttggctgaattccactctaatatgatgctccattatgcaccatactgtgatgacctttctactccgaaacctgctggagcctgcccttggccgtggggtgtcagccaatcactgcttgttccacttgttgtacattttatttttgagtctttttctttctcatatacagaaaaatagtatgaaaataaaataaatgtatgaaacagtattaatgcagaaatgtgctactaatggatgtctgagtcaccagaaattccattcttaaagaggcggttagcacctattagacgtaacagtgatgtcttttaaaaaatccaaaagcatattgcaacaataagtttgagactttgtgtgaacaaagggaaattcagcctcttatgtctttgtctttaatacattaaatactgattttgaataaaaatctaaattgatcaat

SEQ ID NO: 2938 - DNA, 4710 bp, Homo sapiens
cccctttctccccctctgttaagtccctccccctcgccattcaaaagggctggctcggcactggctccttgcagtcggcgaactgtctgggcgggaggagccgtgagcagtagctgcactcagctgcccgcgcggcaaagaggaaggcaagccaaacagagtgcgcagagtggcagtgccagcggcgacacaggcagcacaggcagcccgggctgcctgaatagcctcagaaacaacctcagcgactccggctgctctgcggactgcgagctgtggcggtagagcccgctacagcagtcgcagtctccgtggagcgggcggaagccttttttctccctttcgtttacctcttcattctactctaaaggcatcgttattaggaaaatcctgttgtgaataagaaggattccacagatcacataccagagcggttttgcctcagctgctctcaactttgtaatcttgtgaagaagctgacaagcttggctgattgcagtgcactatgaggactgaatgacagtgggttttaattcagatatttcaagtgttgtgcgggttaatacaacaaactgtcacaagtgtttgttgtccgggacgtacattttcgcggtcctgctagtatgcgtggtgttccactctggcgcccaggagaaaaactacaccatccgagaagaaattccagaaaacgtcctgataggcaacttgttgaaagaccttaacttgtcgctgattccaaacaagtccttgacaactactatgcagttcaagctagtgtacaagaccggagatgtgccactgattcgaattgaagaggatactggtgagatcttcactaccggcgctcgcattgatcgtgagaaattatgtgctggtatcccaagggatgagcattgcttttatgaagtggaggttgccattttgccggatgaaatatttagactggttaagatacgttttctgatagaagatataaatgataatgcaccattgttcccagcaacagttatcaacatatcaattccagagaactcggctataaactctaaatatactctcccagcggctgttgatcctgacgtaggcataaacggagttcaaaactacgaactaattaagagtcaaaacatttttggcctcgatgtcattgaaacaccagaaggagacaagatgccacaactgattgttcaaaaggagttagatagggaagagaaggatacctatgtgatgaaagtaaaggttgaagatggtggctttcctcaaagatccagtactgctattttgcaagtaagtgttactgatacaaatgacaaccacccagtctttaaggagacagagattgaagtcagtataccagaaaatgctcctgtaggcacttcagtgacacagctccatgccacagatgctgacataggtgaaaatgccaagatccacttctctttcagcaatctagtctccaacattgccaggagattatttcacctcaatgccaccactggacttatcacaatcaaagaaccactggatagggaagaaacaccaaaccacaagttactggttttggcaagtgatggtggattgatgccagcaagagcaatggtgctggtaaatgttacagatgtcaatgataatgtcccatccattgacataagatacatcgtcaatcctgtcaatgacacagttgttctttcagaaaatattccactcaacaccaaaattgctctcataactgtgacggataaggatgcggaccataatggcagggtgacatgcttcacagatcatgaaattcctttcagattaaggccagtattcagtaatcagttcctcctggagaatgcagcatatcttgactatgagtccacaaaagaatatgccattaaattactggctgcagatgctggcaaacctcctttgaatcagtcagcaatgctcttcatcaaagtgaaagatgaaaatgacaatgctccagttttcacccagtctttcgtaactgtttctattcctgagaataactctcctggcatccagttgatgaaagtaagtgcaacggatgcagacagtgggcctaatgctgagatcaattacctgctaggccctgatgctccacctgaattcagcctggatcgtcgtacaggcatgctgactgtagtgaagaaactagatagagaaaaagaggataaatatttattcacaattctggcaaaagataatggggtaccacccttaaccagcaatgtcacagtctttgtaagcattattgatcagaatgacaatagcccagttttcactcacaatgaatacaaattctatgtcccagaaaaccttccaaggcatggtacagtaggactaatcactgtaactgatcctgattatggagacaattctgcagttacgctctccattttagatgagaatgatgacttcaccattgattcacaaactggtgtcatccgaccaaatatttcatttgatagagaaaaacaagaatcttacactttctatgtaaaggctgaggatggtggtagagtatcacgttcttcaagtgccaaagtaaccataaatgtggttgatgtcaatgacaacaaaccagttttcattgtccctccttacaactattcttatgaattggttctaccgtccactaatccaggcacagtggtctttcaggtaattgctgttgacaatgacactggcatgaatgcagaggttcgttacagcattgtaggaggaaacacaagagatctgtttgcaatcgaccaagaaacaggcaacataacattgatggagaaatgtgatgttacagaccttggtttacacagagtgttggtcaaagctaatgacttaggacagcctgattctctcttcagtgttgtaattgtcaatctgttcgtgaatgagtcagtgaccaatgctacactgattaatgaactggtgcgcaaaagcattgaagcaccagtgaccccaaatactgagatagctgatgtatcctcaccaactagtgactatgtcaagatcctggttgcagctgttgctggcaccataactgtcgttgtagttattttcatcactgctgtagtaagatgtcgccaggcaccacaccttaaggctgctcagaaaaacatgcagaattctgaatgggctaccccaaacccagaaaacaggcagatgataatgatgaagaaaaagaaaaagaagaagaagcattcccctaagaacctgctgcttaatgttgtcactattgaagaaactaaggcagatgatgttgacagtgatggaaacagagtcacactagaccttcctattgatctagaagagcaaacaatgggaaagtacaattgggtaactacacctactactttcaagcctgacagccctgatttggcccgacactacaaatctgcctctccacagcctgccttccaaattcagcctgaaactcccctgaatttgaagcaccacatcatccaagaactgcctctcgataacacctttgtggcctgtgactctatctccaattgttcctcaagcagttcagatccctacagcgtttctgactgtggctatccagtgacaaccttcgaggtacctgtgtccgtacacaccagaccgactgattccaggacatgaactattgaaatctgcagtgagatgtaactttctaggaacaacaaaattccattccccttccaaaaaatttcaatgattgtgatttcaaaattaggctaagatcattaattttgtaatctagatttcccattataaaagcaagcaaaaatcatcttaaaaatgatgtcctagtgaaccttgtgctttctttagctgtaatctggcaatggaaatttaaaatttatggaagagacagtgcagcgcaataacagagtactctcatgctgtttctctgtttgctctgaatcaacagccatgatgtaatataaggctgtcttggtgtatacacttatggttaatatatcagtcatgaaacatgcaattacttgccctgtctgattgttgaataattaaaacattatctccaggagtttggaagtgagctgaactagccaaactactctctgaaaggtatccagggcaagagacatttttaagaccccaaacaaacaaaaaacaaaaccaaaacactctggttcagtgttttgaaaatattgactaacataatattgctgagaaaatcatttttattacccaccactctgcttaaaagttgagtgggccgggcgcggtggctcacgcctgtaattccagcactttgggaggccgaggcgggtggatcacgaggtcaggatattgagaccatcctggctaacatggtgaaaccccatctccactaaaaatacaaaaaattagctgggcgtggtggcgggcgcctgtagtcccagctactcgggaggctgaggcaggagaatggcgtgaacccgggaggcggagcttgcagtgagccgagatggcgccactgcactccagcctgggtgacagagcaagactctgtctcaaaaagaaaaaaatgttcagtgatagaaaataattttactaggtttttatgttgattgtactcatgctgttccactccttttaattattaaaaagttatttttggctgggtgtggtggctcatacctgtaatcccagcactttgggaggccgaggcgggtggatcacctgaggtcaggagttcaagaccagtctggccaacat

SEQ ID NO: 2939 - DNA, 4964 bp, Homo sapiens
ggtggtccagtacctccaaagatatggaatacactcctgaaatatcctgaaaccttttttttttcagaatcctttaataagcagttatgtcaatctgaaagttgcttacttgtactttatattaatagctattcttgtttttcttatccaaagaaaaatcctctaatccccttttcacatgatagttgttaccatgtttaggcgttagtcacatcaacccctctcctctcccaaacttctcttcttcaaatcaaactttattagtccctcctttataatgattccttgcctccttttatccagatcaattttttttcactttgatgcccagagctgaagaaatggactattgtataaattattcattgccaagagaataattgcattttaaacccatgttataacaaagaataatgattatattttgtgatttgtaacaaataccctttattttcccttaactattgaattaaatattttaattatttgtattctctttaactatcttggtatattaaagtattatcttttatatatttatcaatggtggacacttttataggtactctgtgtcatttttgatactgtaggtatcttatttcatttatctttattcttaatgtacgaattcataatatttgattcagaacagatttatcactaattaacagagtgtcaattatgctaacatctcatttactgattttaatttaaaacagtttttgttaacatgcatgtttagggttggcttcttaataatttcttcttcctcttctctctctcctcttcttttggtcagtgttgtgcgggttaatacaacaaactgtcacaagtgtttgttgtccgggacgtacattttcgcggtcctgctagtatgcgtggtgttccactctggcgcccaggagaaaaactacaccatccgagaagaaattccagaaaacgtcctgataggcaacttgttgaaagaccttaacttgtcgctgattccaaacaagtccttgacaactactatgcagttcaagctagtgtacaagaccggagatgtgccactgattcgaattgaagaggatactggtgagatcttcactaccggcgctcgcattgatcgtgagaaattatgtgctggtatcccaagggatgagcattgcttttatgaagtggaggttgccattttgccggatgaaatatttagactggttaagatacgttttctgatagaagatataaatgataatgcaccattgttcccagcaacagttatcaacatatcaattccagagaactcggctataaactctaaatatactctcccagcggctgttgatcctgacgtaggcataaacggagttcaaaactacgaactaattaagagtcaaaacatttttggcctcgatgtcattgaaacaccagaaggagacaagatgccacaactgattgttcaaaaggagttagatagggaagagaaggatacctatgtgatgaaagtaaaggttgaagatggtggctttcctcaaagatccagtactgctattttgcaagtaagtgttactgatacaaatgacaaccacccagtctttaaggagacagagattgaagtcagtataccagaaaatgctcctgtaggcacttcagtgacacagctccatgccacagatgctgacataggtgaaaatgccaagatccacttctctttcagcaatctagtctccaacattgccaggagattatttcacctcaatgccaccactggacttatcacaatcaaagaaccactggatagggaagaaacaccaaaccacaagttactggttttggcaagtgatggtggattgatgccagcaagagcaatggtgctggtaaatgttacagatgtcaatgataatgtcccatccattgacataagatacatcgtcaatcctgtcaatgacacagttgttctttcagaaaatattccactcaacaccaaaattgctctcataactgtgacggataaggatgcggaccataatggcagggtgacatgcttcacagatcatgaaattcctttcagattaaggccagtattcagtaatcagttcctcctggagaatgcagcatatcttgactatgagtccacaaaagaatatgccattaaattactggctgcagatgctggcaaacctcctttgaatcagtcagcaatgctcttcatcaaagtgaaagatgaaaatgacaatgctccagttttcacccagtctttcgtaactgtttctattcctgagaataactctcctggcatccagttgatgaaagtaagtgcaacggatgcagacagtgggcctaatgctgagatcaattacctgctaggccctgatgctccacctgaattcagcctggatcgtcgtacaggcatgctgactgtagtgaagaaactagatagagaaaaagaggataaatatttattcacaattctggcaaaagataatggggtaccacccttaaccagcaatgtcacagtctttgtaagcattattgatcagaatgacaatagcccagttttcactcacaatgaatacaaattctatgtcccagaaaaccttccaaggcatggtacagtaggactaatcactgtaactgatcctgattatggagacaattctgcagttacgctctccattttagatgagaatgatgacttcaccattgattcacaaactggtgtcatccgaccaaatatttcatttgatagagaaaaacaagaatcttacactttctatgtaaaggctgaggatggtggtagagtatcacgttcttcaagtgccaaagtaaccataaatgtggttgatgtcaatgacaacaaaccagttttcattgtccctccttacaactattcttatgaattggttctaccgtccactaatccaggcacagtggtctttcaggtaattgctgttgacaatgacactggcatgaatgcagaggttcgttacagcattgtaggaggaaacacaagagatctgtttgcaatcgaccaagaaacaggcaacataacattgatggagaaatgtgatgttacagaccttggtttacacagagtgttggtcaaagctaatgacttaggacagcctgattctctcttcagtgttgtaattgtcaatctgttcgtgaatgagtcagtgaccaatgctacactgattaatgaactggtgcgcaaaagcattgaagcaccagtgaccccaaatactgagatagctgatgtatcctcaccaactagtgactatgtcaagatcctggttgcagctgttgctggcaccataactgtcgttgtagttattttcatcactgctgtagtaagatgtcgccaggcaccacaccttaaggctgctcagaaaaacatgcagaattctgaatgggctaccccaaacccagaaaacaggcagatgataatgatgaagaaaaagaaaaagaagaagaagcattcccctaagaacctgctgcttaatgttgtcactattgaagaaactaaggcagatgatgttgacagtgatggaaacagagtcacactagaccttcctattgatctagaagagcaaacaatgggaaagtacaattgggtaactacacctactactttcaagcctgacagccctgatttggcccgacactacaaatctgcctctccacagcctgccttccaaattcagcctgaaactcccctgaatttgaagcaccacatcatccaagaactgcctctcgataacacctttgtggcctgtgactctatctccaattgttcctcaagcagttcagatccctacagcgtttctgactgtggctatccagtgacaaccttcgaggtacctgtgtccgtacacaccagaccgactgattccaggacatgaactattgaaatctgcagtgagatgtaactttctaggaacaacaaaattccattccccttccaaaaaatttcaatgattgtgatttcaaaattaggctaagatcattaattttgtaatctagatttcccattataaaagcaagcaaaaatcatcttaaaaatgatgtcctagtgaaccttgtgctttctttagctgtaatctggcaatggaaatttaaaatttatggaagagacagtgcagcgcaataacagagtactctcatgctgtttctctgtttgctctgaatcaacagccatgatgtaatataaggctgtcttggtgtatacacttatggttaatatatcagtcatgaaacatgcaattacttgccctgtctgattgttgaataattaaaacattatctccaggagtttggaagtgagctgaactagccaaactactctctgaaaggtatccagggcaagagacatttttaagaccccaaacaaacaaaaaacaaaaccaaaacactctggttcagtgttttgaaaatattgactaacataatattgctgagaaaatcatttttattacccaccactctgcttaaaagttgagtgggccgggcgcggtggctcacgcctgtaattccagcactttgggaggccgaggcgggtggatcacgaggtcaggatattgagaccatcctggctaacatggtgaaaccccatctccactaaaaatacaaaaaattagctgggcgtggtggcgggcgcctgtagtcccagctactcgggaggctgaggcaggagaatggcgtgaacccgggaggcggagcttgcagtgagccgagatggcgccactgcactccagcctgggtgacagagcaagactctgtctcaaaaagaaaaaaatgttcagtgatagaaaataattttactaggtttttatgttgattgtactcatgctgttccactccttttaattattaaaaagttatttttggctgggtgtggtggctcatacctgtaatcccagcactttgggaggccgaggcgggtggatcacctgaggtcaggagttcaagaccagtctggccaacat

SEQ ID NO: 2940 - DNA, 9056 bp, Homo sapiens
ggtggtccagtacctccaaagatatggaatacactcctgaaatatcctgaaaccttttttttttcagaatcctttaataagcagttatgtcaatctgaaagttgcttacttgtactttatattaatagctattcttgtttttcttatccaaagaaaaatcctctaatccccttttcacatgatagttgttaccatgtttaggcgttagtcacatcaacccctctcctctcccaaacttctcttcttcaaatcaaactttattagtccctcctttataatgattccttgcctccttttatccagatcaattttttttcactttgatgcccagagctgaagaaatggactattgtataaattattcattgccaagagaataattgcattttaaacccatgttataacaaagaataatgattatattttgtgatttgtaacaaataccctttattttcccttaactattgaattaaatattttaattatttgtattctctttaactatcttggtatattaaagtattatcttttatatatttatcaatggtggacacttttataggtactctgtgtcatttttgatactgtaggtatcttatttcatttatctttattcttaatgtacgaattcataatatttgattcagaacagatttatcactaattaacagagtgtcaattatgctaacatctcatttactgattttaatttaaaacagtttttgttaacatgcatgtttagggttggcttcttaataatttcttcttcctcttctctctctcctcttcttttggtcagtgttgtgcgggttaatacaacaaactgtcacaagtgtttgttgtccgggacgtacattttcgcggtcctgctagtatgcgtggtgttccactctggcgcccaggagaaaaactacaccatccgagaagaaattccagaaaacgtcctgataggcaacttgttgaaagaccttaacttgtcgctgattccaaacaagtccttgacaactactatgcagttcaagctagtgtacaagaccggagatgtgccactgattcgaattgaagaggatactggtgagatcttcactaccggcgctcgcattgatcgtgagaaattatgtgctggtatcccaagggatgagcattgcttttatgaagtggaggttgccattttgccggatgaaatatttagactggttaagatacgttttctgatagaagatataaatgataatgcaccattgttcccagcaacagttatcaacatatcaattccagagaactcggctataaactctaaatatactctcccagcggctgttgatcctgacgtaggcataaacggagttcaaaactacgaactaattaagagtcaaaacatttttggcctcgatgtcattgaaacaccagaaggagacaagatgccacaactgattgttcaaaaggagttagatagggaagagaaggatacctatgtgatgaaagtaaaggttgaagatggtggctttcctcaaagatccagtactgctattttgcaagtaagtgttactgatacaaatgacaaccacccagtctttaaggagacagagattgaagtcagtataccagaaaatgctcctgtaggcacttcagtgacacagctccatgccacagatgctgacataggtgaaaatgccaagatccacttctctttcagcaatctagtctccaacattgccaggagattatttcacctcaatgccaccactggacttatcacaatcaaagaaccactggatagggaagaaacaccaaaccacaagttactggttttggcaagtgatggtggattgatgccagcaagagcaatggtgctggtaaatgttacagatgtcaatgataatgtcccatccattgacataagatacatcgtcaatcctgtcaatgacacagttgttctttcagaaaatattccactcaacaccaaaattgctctcataactgtgacggataaggatgcggaccataatggcagggtgacatgcttcacagatcatgaaattcctttcagattaaggccagtattcagtaatcagttcctcctggagaatgcagcatatcttgactatgagtccacaaaagaatatgccattaaattactggctgcagatgctggcaaacctcctttgaatcagtcagcaatgctcttcatcaaagtgaaagatgaaaatgacaatgctccagttttcacccagtctttcgtaactgtttctattcctgagaataactctcctggcatccagttgatgaaagtaagtgcaacggatgcagacagtgggcctaatgctgagatcaattacctgctaggccctgatgctccacctgaattcagcctggatcgtcgtacaggcatgctgactgtagtgaagaaactagatagagaaaaagaggataaatatttattcacaattctggcaaaagataatggggtaccacccttaaccagcaatgtcacagtctttgtaagcattattgatcagaatgacaatagcccagttttcactcacaatgaatacaaattctatgtcccagaaaaccttccaaggcatggtacagtaggactaatcactgtaactgatcctgattatggagacaattctgcagttacgctctccattttagatgagaatgatgacttcaccattgattcacaaactggtgtcatccgaccaaatatttcatttgatagagaaaaacaagaatcttacactttctatgtaaaggctgaggatggtggtagagtatcacgttcttcaagtgccaaagtaaccataaatgtggttgatgtcaatgacaacaaaccagttttcattgtccctccttacaactattcttatgaattggttctaccgtccactaatccaggcacagtggtctttcaggtaattgctgttgacaatgacactggcatgaatgcagaggttcgttacagcattgtaggaggaaacacaagagatctgtttgcaatcgaccaagaaacaggcaacataacattgatggagaaatgtgatgttacagaccttggtttacacagagtgttggtcaaagctaatgacttaggacagcctgattctctcttcagtgttgtaattgtcaatctgttcgtgaatgagtcagtgaccaatgctacactgattaatgaactggtgcgcaaaagcattgaagcaccagtgaccccaaatactgagatagctgatgtatcctcaccaactagtgactatgtcaagatcctggttgcagctgttgctggcaccataactgtcgttgtagttattttcatcactgctgtagtaagatgtcgccaggcaccacaccttaaggctgctcagaaaaacatgcagaattctgaatgggctaccccaaacccagaaaacaggcagatgataatgatgaagaaaaagaaaaagaagaagaagcattcccctaagaacctgctgcttaatgttgtcactattgaagaaactaaggcagatgatgttgacagtgatggaaacagagtcacactagaccttcctattgatctagaagagcaaacaatgggaaagtacaattgggtaactacacctactactttcaagcctgacagccctgatttggcccgacactacaaatctgcctctccacagcctgccttccaaattcagcctgaaactcccctgaatttgaagcaccacatcatccaagaactgcctctcgataacacctttgtggcctgtgactctatctccaattgttcctcaagcagttcagatccctacagcgtttctgactgtggctatccagtgacaaccttcgaggtacctgtgtccgtacacaccagaccgtcccagcggcgtgtcacatttcacctgccagaaggctctcaggaaagcagcagtgatggtggactgggagaccatgatgcaggcagccttaccagcacatcccatggcctgccccttggctatcctcaggaggagtactttgatcgtgctacacccagcaatcgcactgaaggggatggcaactccgatcctgaatctactttcatacctggactaaagaaagaaataactgttcaaccaactgtggaagaggcctctgacaactgcactcaagaatgtctcatctatggccattctgatgcctgctggatgccggcatctctggatcattccagctcttcacaagcacaggcctctgctctatgccacagcccaccactgtcacaggcctctactcagcaccacagcccaccagtgacacagaccattgttctctgccacagccctccagtgacacagaccatcgcattgtgccacagcccaccaccgatacaggtgtctgctctccaccacagtcctcctctagtgcagggtactgcacttcaccacagcccaccatcagcacaggcctcagccctctgctacagccctcctttagcacaggctgctgcaatcagccacagctcttctctgccacaggttattgccctccatcgtagtcaggcccaatcatcagtcagtttgcagcaaggttgggtgcaaggtgctaatggactatgctctgttgatcagggagtgcaaggtagtgcaacatctcagttttacaccatgtctgaaagacttcatcccagtgatgattcaattaaagtcattcctttgacaaccttcgctccacgccaacaggccagaccgtccagaggtgattcccccattatggaaacacatcccttgtaaagctaaaatagttacttcaaattttcagaaaagatgtatatagtcaaaatttaagatacaattccaatgagtattctgattatcagatttgtaaataactatgtaaatagaaacagataccagaataaatctacagctagacccttagtcaatagttaaccaaaaaattgcaatttgtttaattcagaatgtgtatttaaaaagaaaaggaatttaacaatttgcatccccttgtacagtaaggcttatcatgacagagcgtactatttctgatgtacagtattttttgttgtttttatcatcatgtgcaatattactgatttgtttccatgctgattgtgtggaaccagtatgtagcaaatggaaagcctagaaatatcttattttctaagtttacctttagtttacctaaacttttgttcagataatgttaaaaggtatacgtactctagccttttttggggctttctttttgatttttgtttgtggttttcagtttttttgttgttgttagtgagtctcccttcaaaatacacagtaggtagtgtaaatactgcttgtttgtgtctctctgctgtcatgttttctaccttattccaatactatattgttgataaaatttgtatatacattttcaataaagaatatgtataaactgtacagatctagatctacaacctatttctctactctttagtagagttcgagacacagaagtgcaataactgccctaattaagcaactatttgttaaaaagggcccctttttactttaatagtttagtgtaaagtacatcagaaataaaactgtatctgacattttaagcctgtagtccattattacttgggtctttacttctgggaatttgtatgtaacagcctagaaaattaaaaggaggtggatgcatccaaagcacgagtcacttaaaatatcgacggtaaactactattttgtagagaaactcaggaagatttaaatgttgatttgacagctcaataggctgttaccaaagggtgttcagtaaaaataacaaatacatgtaactgtagataaaaccacatactaaatctataagactaagggatttttgttattctagctcaacttactgaagaaaaccactaataacaacaagaatatcaggaaggaacttttcaagaaatgtaattataaatctacatcaaacagaattttaaggaaaaatgcagagggagaaataaggcacatgactgcttcttgcagtcaagaagaaataccaataacacacacagaacaaaaaccatcaaaatctcatatatgaaataaaatatattcttctaagcaaagaaacagtactattcatagaaaacattagttttctcctgttgtctgttatttccttcttttatcctcttaactggccattatcttgtatgtgcacattttataaatgtacagaaacatcaccaacttgattttcttccatagcaaaactgagaaaataccttgtttcagtataacactaaaccaagagacaattgatgtttaatgggggcggttggggttgggggggagtcaatatctcctattgattaacttagacatagattttgtaatgtataacttgatatttaatttatgattaaactgtaattttgtaacataaactgtggtaattgcataatttcattggtgaggatttcctttgaatattgagaaagtttcttttcatgtgcccagcaggttaagtagcgttttcagaatatacattattcccatccattgtaaagttccttaagtcatatttgactgggcgtgcagaataacttcttaactattaactatcagagtttgattaataaaattaattaattttttttctccttcgtgttgttaatgttccaagggatttggagcatactggttttccaggtgcatgtgaatcccgaaggactgatgatatttgaatgtttattaaattattatcacacaaatgtgttgatattgtggctattgttgatgttgaaaattgtaaacttggggaagattaagaaaagaaccaatagtgacaaaaatcagtgcttccagtagattttagaacattctttgcctcaaaaaacctgcaaagatgatgtgagattttttcttgtgttttaattattttcacattttctctctgcaaacctttagttttctgatgatctacacacacacatacacacacacacacacacacgtgcacacacacacatttaaaggatataaaaagaagaggttgaaagattattaaataacttatcaggcatctcaatggttactatctatgttagtgaaaatcaaataggactcaaagttggatatttgggatttttcttctgacagtataatttattgagttactagggaggttcttaaatcctcatatctggaaacttgtgaagttttgacacctttcctatagatataggaatgaaccaatacgcttttattaccctttctaactctgattttataatcagacttagattgtgtttagaatattaaatgactgggcaccctcttcttggtttttaccagagaggctttgaatggaagcaggctgagagtagccaaagaggcaaggggtattagcccagttattctcccctatgccttctcttcctaagcgtccactaggtctggccttggaaatctgttacttctacggcttcagatctgatgatatctttttcatcacattacaagttatttctttgactgaatagacagtggtataggttgacacagcacacaagtggctattgtgatgtatgatgtatgtagtcccacaactgcaaaacgtcttactgaagcaacaatcgaaaaatggttctgttttaaaaaggattttgtttgatttgaaattaaaacttcaaactgaatgacttatatgagaataatatgttcaatcaaagtagttattctattttgtgtccatattccattagattgtgattattaattttctagctatggtattactatatcacacttgtgagtatgtattcaaatactaagtatcttatatgctacgtgcatacacattcttttcttaaactttacctgtgttttaactaatattgtgtcagtgtattaaaaattagcttttacatatgatatctacaatgtaataaatttagagagtaattttgtgtattcttatttacttaacattttacttttaattatgtaaatttggttagaaaataataataaatggttagtgctattgtgtaatggtagcagttacaaagagcctctgccttcccaaactaatatttatcacacatggtcattaaatgggaaaaaaatagactaaacaaatcacaaattgttcagttcttaaaatgtaattatgtcacacacacaaaaaaatccttttcaatcctgagaaaattaaaggtgttttactcacatggatatttcaacattagttttttttgtttgtttctttttcatggtattactgaaggtgtgtatactccctaatacacatttatgaaaatctacttgtttagacttttatttatactcttctgatttatattttttattataattattatttcttatcttcttttatattttttggaaaccaaatttatagttagtttaggtaaactttttattatgaccattagaaactattttgaatgtttccaactggctcaattggctgggaaaacatgggaacaagagaagctgaaatatatttctgcaagaacctttctatattatgtgccaattaccacaccagatcaattttatgcagaggccttaaaatattctttcacagtagctttcttacactaaccgtcatgtgcttttagtaaatatgatttttaaaagcagttcaagttgacaacagcagaaacagtaacaaaaaaatctgctcagaaaaatgtatgtgcacaaataaaaaaaattaatggcaattgtttagtgactgtaagtgatactttttaaagagtaaactgtgtgaaatttatactatccctgcttaaaatattaagatttttatgaaatatgtatttatgtttgtattgtgggaagattcctcctctgtgatatcatacagcatctgaaagtgaacagtatcccaaagcagttccaagcatgctttggaagtaagaaggttgactattgtatggccaaggatggcagtatgtaatccagaagcaaacttgtattaattgttctatttcaggttctgtattgcatgttttcttattaatatatattaataaaagttatgagaaataaaaaaaaaaaaaaaaaaaa

SEQ ID NO: 2941 - DNA, 1274 bp, Homo sapiens
ggggagacgttcgcacacctgggtgccagcgccccagaggtcccgggacagcccgaggcgccgcgcccgccgccccgagctccccaagccttcgagagcggcgcacactcccggtctccactcgctcttccaacacccgctcgttttggcggcagctcgtgtcccagagaccgagttgccccagagaccgagacgccgccgctgcgaaggaccaatgagagccccgctgctaccgccggcgccggtggtgctgtcgctcttgatactcggctcaggccattatgctgctggattggacctcaatgacacctactctgggaagcgtgaaccattttctggggaccacagtgctgatggatttgaggttacctcaagaagtgagatgtcttcagggagtgagatttcccctgtgagtgaaatgccttctagtagtgaaccgtcctcgggagccgactatgactactcagaagagtatgataacgaaccacaaatacctggctatattgtcgatgattcagtcagagttgaacaggtagttaagcccccccaaaacaagacggaaagtgaaaatacttcagataaacccaaaagaaagaaaaagggaggcaaaaatggaaaaaatagaagaaacagaaagaagaaaaatccatgtaatgcagaatttcaaaatttctgcattcacggagaatgcaaatatatagagcacctggaagcagtaacatgcaaatgtcagcaagaatatttcggtgaacggtgtggggaaaagtccatgaaaactcacagcatgattgacagtagtttatcaaaaattgcattagcagccatagctgcctttatgtctgctgtgatcctcacagctgttgctgttattacagtccagcttagaagacaatacgtcaggaaatatgaaggagaagctgaggaacgaaagaaacttcgacaagagaatggaaatgtacatgctatagcataactgaagataaaattacaggatatcacattggagtcactgccaagtcatagccataaatgatgagtcggtcctctttccagtggatcataagacaatggaccctttttgttatgatggttttaaactttcaattgtcactttttatgctatttctgtatataaaggtgcacgaaggtaaaaagtattttttcaagttgtaaataatttatttaatatttaatggaagtgtatttattttacagctcattaaacttttttaaccaaacagatcaaaaaaaaaaaaaaaaaaaaaaaaaaaaaa

SEQ ID NO: 2942 - DNA, 909 bp, Homo sapiens
gggctcttcctcgcggaagtggggaggaggcggttgcggttagtggaccgggaccggtaggggtgctgttgccatcatggctgaccccgacccccggtaccctcgctcctcgatcgaggacgacttcaactatggcagcagcgtggcctccgccaccgtgcacatccgaatgggttctcttaactacagtgacttcaacagtttttttatactttgagtctgtacggacatttgtacatgagagtcctgccttaattttgctgtttgccctcggatctctgggtttgatttttgcgttgattttaaacagacataagtatccccttaacctgtacctactttttggatttacgctgttggaagctctgactgtggcagttgttgttactttctatgatgtatatattattctgcaagctttcatactgactactacagtattttttggtttgactgtgtatactctacaatctaagaaggatttcagcaaatttggagcagggctgtttgctcttttgtggatattgtgcctgtcaggattcttgaagttttttttttatagtgagataatggagttggtcttagccgctgcaggagcccttcttttctgtggattcatcatctatgacacacactcactgatgcataaactgtcacctgaagagtacgtattagctgccatcagcctctacttggatatcatcaatctattcctgcacctgttacggtttctggaagcagttaataaaaagtaattaaaagtatctcagctcaactgaagaacaacaaaaaaaatttaacgagaaaaaaggattaaagtaattggaagcagtatatagaaactgtttcattaagtaataaagtttgaaacaatgaaaaaaaaaaaaaaaaaaaaaaaaaaaaaaaaaa

SEQ ID NO: 2943 - DNA, 351 bp, Homo sapiens
gggagacttgaatatgcctctgggcaaagaagcagagctaacgaggaaagggatttaaagagtttttcttgggtgtttgtcaaacttttattccctgtctgtgtgcagaggggattcaacttcaatttttctgcagtggctctgggtccagccccttacttaaagatctggaaagcatgaagactgggctttttttcctatgtctcttgggaactgcagctgcaatcccgacaaatgcaagattattatctgatcattccaaaccaactgctgaaacggtagcacctgacaacactgcaatccccagtttaagggctgaagcaaaaaaaaaaaaaaaaaaaaaaaaaaaaa

SEQ ID NO: 2944 - DNA, 2445 bp, Homo sapiens
gggagctgaaagggtcttcgctggcggccggtaactggcggcggttgggaacggccgagtgtggctcttctggtgtttcagcttggggagagaggggtggccttcctcttgcagttgaggccggcgccgagccggacttcagccggatctcgtggcggagcccatcttgctccctctcccaggcctttacccgctccctaggattcccgggccctgtaggtgggagttgggagacgtgagttctctttcattctgcgcctctcattggctctctgaccttgtgcggaacgcgtcctttagctgacctcagctgcattttttagaagatggagattgtattcacagtgactgtcagctttttaacggcgggaactgacgtagtgttaaacactgtcgtgtatcgctggcacagcacaaggacattataggtattctgtactcaattaagttattttgagtcacagaccttttgaaaatctcgtgtaagctatggcccctccacctctctaatacttcccccggcccccaccccaagcacacacaaaagcttatgcataggaaatttgttttactatttcggattacttccaagatctctctcctgatgcccatctatggatcccagagtctggacaatactgcttttaaagagacagtgttagggatcttggaagcacagccaacatgtgtgacattgaagaagccactaaccaactcctagatgtgaaccttcatgagaaccagaagtctgtacaagtgacagaaagtgacctcggaagtgaatctgagcttctagtcactattggagccactgtacctactggctttgagcaaacagctgcagatgaagtcagagagaaacttgggtcatcatgcaaaatcagcagagaccgtggcaagatatattttgtcatttcagtggaaagtctggcacaggttcattgtctgagatcagttgataacttatttgtggtggttcaggagtttcaagattaccagttcaaacaaacaaaggaagaagttctaaaggattttgaagacttggctggaaaactcccatggtcaaaccccttaaaagtgtggaaaattaatgccagttttaaaaagaaaaaagcaaagcgcaaaaagataaatcagaattcaagtaaagagaagattaataatggacaagaagtcaaaatcgatcagagaaatgttaaaaaagagttcactagccatgctttagattctcatatcttagattattatgaaaatccagccatcaaagaggatgtatcaacattaataggtgatgatttggcatcttgcaaagatgagactgatgaaagctcaaaagaagaaactgagcctcaagtgctgaagtttagagtcacatgcaacagggcaggagagaaacattgctttacctcaaatgaggctgcaagagattttgggggtgctgttcaagattattttaagtggaaggccgacatgaccaactttgatgtggaggttcttttgaacatccatgataatgaagtcattgtgggcattgcattgactgaagagagtctccaccgaagaaatataacacattttggacctacaactcttagatcaactcttgcctatgggatgctcaggctctgtgatcctctaccttatgatataatagtcgatccaatgtgtggaactggggcaataccaatagagggggccactgaatggtctgactgtttccatattgctggtgataataatccactggctgtgaatagagcagcaaataacattgcatctttattgaccaagagccaaattaaagaaggcaaaccctcctggggcttgcccatagatgctgttcagtgggatatctgcaatctgccattgagaactggctctgtggatattattgtaacagatttgccatttggaaaaaggatgggatccaagaagagaaactggaacctttatccagcttgcctacgggagatgagccgtgtctgcacacctaccacaggccgagctgtactacttactcaagacacaaaatgctttaccaaggcgttatctggaatgcgacacgtatggcgaaaggtggatacagtctgggtgaacgttggtggtcttcgtgctgcagtttacgttctgatacgtacacctcaagcttttgttcatccttcagaacaagacggagaaagaggaactctttggcaatgcaaagaatgaagatgactaatagtacttgtacttcccaccactggaaatgttagcataaaagaacttggagagaaaaaaagtattaacaaaactgcagtctgcactctttaaacctgtttaaggctcttcatcctggttagcaaaaggtgtgaatgtaatgtgatggaatttaaaagttttatgagaccaggaaaaaaaaaaaaaaaaaaaaaaaaaaaaaaaaaaaaaaaaaaaaaaaaaaaaaac

SEQ ID NO: 2945 - DNA, 1667 bp, Homo sapiens; identical to SEQ ID NO: 729

SEQ ID NO: 2946 - DNA, 2047 bp, Homo sapiens
gcaacgaggacgggggagtgcgactgcgtctcgggcagcatggccgagaagcggcacacacgggactccgaagcccagcggctccccgactccttcaaggacagccccagtaagggccttggaccttgcggatggattttggtggcgttctcattcttattcaccgttataactttcccaatctcaatatggatgtgcataaagattataaaagagtatgaaagagccatcatctttagattgggtcgcattttacaaggaggagccaaaggacctggtttgttttttattctgccatgcactgacagcttcatcaaagtggacatgagaactatttcatttgatattcctcctcaggagatcctcacaaaggattcagtgacaattagcgtggatggtgtggtctattaccgcgttcagaatgcaaccctggctgtggcaaatatcaccaacgctgactcagcaacccgtcttttggcacaaactactctgaggaatgttctgggcaccaagaatctttctcagatcctctctgacagagaagaaattgcacacaacatgcagtctactctggatgatgccactgatgcctggggaataaaggtggagcgtgtggaaattaaggatgtgaaactacctgtgcagctccagagagctatggctgcagaagcagaagcgtcccgcgaggcccgcgccaaggttattgcagccgaaggagaaatgaatgcatccagggctctgaaagaagcctccatggtcatcactgaatatcctgcagcccttcagctccgatacctgcagacactgaccaccattgctgctgagaaaaactcaacaattgtcttccctctgcccatagatatgctgcaaggaatcataggggcaaaacacagccatctaggctagtgtagagatgagcgctagccttccaagcatgaagtcggggaccaaattagcctttaactcataaagagagggtagggcttttctttttccatatgtcaattgtggtgttcccagaatgtatagcagttataaaaataggtgaaagaattgttagcttgtaaatactgagagattggtgatttatataaggtaatctgttagtcttaaaatagttaaaagtttgtatttttagattattatgtagtaggttagatccctcttgttttgacttccactgactcattctgaaccccctaagcacccaggccagaggcaagaacctgggctgtaactgccacctgacaccgctgactggctaaatgctttgcagaaagtgatgaccttacaccacaaccagcttctccaggtcatatgtgccttacctccagagagtcttttttttttttttctgagatggagtttcactcttgttgcccaggctggagtgcaatagcatgatctcggctcactgcaacctccgcctcctgggttcaagagattctcctgcctcagcctccccagtagctgggattacaggctcatgccaccatgcccagctaatttttgtattattattattgttttttagtagagacggggtttcaccatgttggccaggctagtcacgaactcctaacctcaggtgatccacccacctctgcctcccaaagtgctgggattacaggcatgagctaccacacctggtttggagagtcttaattaaggaaatttccctaatgttcatttattttctaaatccagaccgtgtttcagaataatccttacttgagagtagccattttcttgcctgtacttgtcagaactagaggaaatagccaagactaatgaaaaagattactctaacccttaaaagacttttaaattcactactagagtggtcattttaaaaatacatccatgttttaacttatttgagccttctttatgagtaaatgattcctccttgttctgtctttcaaaccagctaaatatttgtcacaaaagtgcttttttctcactgttgcctattttcatatatcaggttttaaatagttttaattttttaataaaattttctctacgttctaaaaaaaaaaaaaaa

SEQ ID NO: 2947 - DNA, 2207 bp, Homo sapiens
ggccaagagcgctgtcaagaagacccacacgcccccctccagcagctgaattcctgcagctcagcagccgccgccagagcaggacgaaccgccaatcgcaaggcacctctgagaacttcaggatgcagatgtctccagccctcacctgcctagtcctgggcctggcccttgtctttggtgaagggtctgctgtgcaccatcccccatcctacgtggcccacctggcctcagacttcggggtgagggtgtttcagcaggtggcgcaggcctccaaggaccgcaacgtggttttctcaccctatggggtggcctcggtgttggccatgctccagctgacaacaggaggagaaacccagcagcagattcaagcagctatgggattcaagattgatgacaagggcatggcccccgccctccggcatctgtacaaggagctcatggggccatggaacaaggatgagatcagcaccacagacgcgatcttcgtccagcgggatctgaagctggtccagggcttcatgccccacttcttcaggctgttccggagcacggtcaagcaagtggacttttcagaggtggagagagccagattcatcatcaatgactgggtgaagacacacacaaaaggtatgatcagcaacttgcttgggaaaggagccgtggaccagctgacacggctggtgctggtgaatgccctctacttcaacggccagtggaagactcccttccccgactccagcacccaccgccgcctcttccacaaatcagacggcagcactgtctctgtgcccatgatggctcagaccaacaagttcaactatactgagttcaccacgcccgatggccattactacgacatcctggaactgccctaccacggggacaccctcagcatgttcattgctgccccttatgaaaaagaggtgcctctctctgccctcaccaacattctgagtgcccagctcatcagccactggaaaggcaacatgaccaggctgccccgcctcctggttctgcccaagttctccctggagactgaagtcgacctcaggaagcccctagagaacctgggaatgaccgacatgttcagacagtttcaggctgacttcacgagtctttcagaccaagagcctctccacgtcgcgcaggcgctgcagaaagtgaagatcgaggtgaacgagagtggcacggtggcctcctcatccacagctgtcatagtctcagcccgcatggcccccgaggagatcatcatggacagacccttcctctttgtggtccggcacaaccccacaggaacagtccttttcatgggccaagtgatggaaccctgaccctggggaaagacgccttcatctgggacaaaactggagatgcatcgggaaagaagaaactccgaagaaaagaattttagtgttaatgactctttctgaaggaagagaagacatttgccttttgttaaaagatggtaaaccagatctgtctccaagaccttggcctctccttggaggacctttaggtcaaactccctagtctccacctgagaccctgggagagaagtttgaagcacaactcccttaaggtctccaaaccagacggtgacgcctgcgggaccatctggggcacctgcttccacccgtctctctgcccactcgggtctgcagacctggttcccactgaggccctttgcaggacggaactacggggcttacaggagcttttgtgtgcctggtagaaactatttctgttccagtcacattgccatcactcttgtactgcctgccaccgcggaggaggctggtgacaggccaaaggccagtggaagaaacaccctttcatctcagagtccactgtggcactggccacccctccccagtacaggggtgctgcaggtggcagagtgaatgtcccccatcatgtggcccaactctcctggcctggccatctccctccccagaaacagtgtgcatgggttattttggagtgtaggtgacttgtttactcattgaagcagatttctgcttccttttatttttataggaatagaggaagaaaggtcagatgcgtgcccagctcttcaccccccaatctcttggtggggaggggtgtacctaaatatttatcatatccttgcccttgagtgcttgttagagagaaagagaactactaaggaaaataatattatttaaactcgcaaaaaaaaaaaaaaa

SEQ ID NO: 2948 - DNA, 1264 bp, Homo sapiens
ggggagttcactcactttcaaagccagctgaaggaaagaggaagtgctagagagagcccccttcagtgtgcttctgacttttacggacttggcttgttagaaggctgaaagatgatggcaggaatgaaaatccagcttgtatgcatgctactcctggctttcagctcctggagtctgtgctcagattcagaagaggaaatgaaagcattagaagcagatttcttgaccaatatgcatacatcaaagattagtaaagcacatgttccctcttggaagatgactctgctaaatgtttgcagtcttgtaaataatttgaacagcccagctgaggaaacaggagaagttcatgaagaggagcttgttgcaagaaggaaacttcctactgctttagatggctttagcttggaagcaatgttgacaatataccagctccacaaaatctgtcacagcagggcttttcaacactgggagttaatccaggaagatattcttgatactggaaatgacaaaaatggaaaggaagaagtcataaagagaaaaattccttatattctgaaacggcagctgtatgagaataaacccagaagaccctacatactcaaaagagattcttactattactgagagaataaatcatttatttacatgtgattgtgattcatcatcccttaattaaatatcaaattatatttgtgtgaaaatgtgacaaacacacttatctgtctcttctacaattgtggtttattgaatgtgatttttctgcactaatataaattagactaagtgttttcaaataaatctaaatcttcagcatgatgtgttgtgtataattggagtagatattaattaagtcacctgtataatgttttgtaattttgcaaaacatatcttgagttgtttaaacagtcaaaatgtttgatattttataccagcttatgagctcaaagtactacagcaaagcctagcctgcatatcattcacccaaaacaaagtaatagcgcctcttttattattttgactgaatgttttatggaattgaaagaaacatacgttcttttcaagacttcctcatgaatctctcaattataggaaaagttattgtgataaaataggaacagctgaaagattgattaatgaactattgttaattcttcctattttaatgaatgacattgaactgaattttttgtctgttaaatgaacttgatagctaataaaaagacaactagccaccaaaaaaaaaaaaaaaaaaaaaaaaaaaaaa

SEQ ID NO: 2949 - DNA, 741 bp, Homo sapiens
gggggcagttactgagaactcataagacgaagctaaaatccctcttcggatccacagtcaaccgccctgaacacatcctgcaaaaagcccagagaaaggagcgccatggattactacagaaaatatgcagctatctttctggtcacattgtcggtgtttctgcatgttctccattccgctcctgatgtgcaggattgcccagaatgcacgctacaggaaaacccactcttctcccagccgggtgccccaatacttcagtgcatgggctgctgcttctctagagcatatcccactccactaaggtccaagaagacgatgttggtccaaaagaacgtcacctcagagtccacttgctgtgtagctaaatcatataacagggtcacagtaatggggggtttcaaagtggagaaccacacggcgtgccactgcagtacttgttattatcacaaatcttaaatgttttaccaagtgctgtcttgatgactgctgattttctggaatggaaaattaagttgtttagtgtttatggctttgtgagataaaactctccttttccttaccataccactttgacacgcttcaaggatatactgcagctttactgccttcctccttatcctacagtacaatcagcagtctagttcttttcatttggaatgaatacagcatttagcttgttccactgcaaataaagccttttaaatcatcatgcaaaaaaaaaaaaaaaaaaaaaaaaaaaaa

SEQ ID NO: 2950 - DNA, 1476 bp, Homo sapiens
ctggaagaattcgcgtggcaggagaggcggggccaattttgctgagctttctcgcgggcttgcagctgcggcaagtgctggcggcggctgctcgcgcaagtcagctggcgtgggaactaccctttgtagctgagaacggcttgtttattgctacaaagactctattgacattggtagcttcagcggcagcagcttcttacggtataaagctgttgcttcctgaagaggctacaagcatccttccctaggactgctgtaagctttgagcctctagcaggagacatgcctcggggacgaaagagtcggcgccgccgtaatgcgagagccgcagaagagaaccgcaacaatcgcaaaatccaggcctcagaggcctccgagacccctatggccgcctctgtggtagcgagcacccccgaagacgacctgagcggccccgaggaagacccgagcactccagaggaggcctctaccacccctgaagaagcctcgagcactgcccaagcacaaaagccttcagtgccccggagcaattttcagggcaccaagaaaagtctcctgatgtctatattagcgctcatcttcatcatgggcaacagcgccaaggaagctctggtctggaaagtgctggggaagttaggaatgcagcctggacgtcagcacagcatctttggagatccgaagaagatcgtcacagaagagtttgtgcgcagagggtacctgatttataaaccggtgccccgtagcagtccggtggagtatgagttcttctgggggccccgagcacacgtggaatcgagcaaactgaaagtcatgcattttgtggcaagggttcgtaaccgatgctctaaagactggccttgtaattatgactgggattcggacgatgatgcagaggttgaggctatcctcaattcaggtgctaggggttattccgccccttaagtagatctgaggcagacccttgggggtgtaaaagagagtcacaggtaccccaaggagtagatgccagggtcctaagttgaaaatgatgtcgattgggggcgggggacactgtatttgatatttgtgatcagtgatcattgttcaactgcgaaatagagtgtttgcttttgataatggaaaattgtattcgttttaaaattccgtttgttgagaataacaatatgtttaaaaatataattgaacaaatttttttctttgtttcctgtcattgacatttagtataacagttttgctaacgttctaaaatgaagtcgttccatcataatctatgatcttgtacagcacttatagaaataagctgttcttttgaagttgaaatacccagtaaaatgttgaagaaggatggaggatttcttcatatctgacgtttctgaaaccctttgtgtctgctgttgtgtgaagattgacatttaccatgattttccttagttacttgacgtcttgtatctctttttattttcggattgcttatca

SEQ ID NO: 2951 - DNA, 4279 bp, Homo sapiens
gcccagcctgcctggagaaaagcgtctgctcctagccaagatctcctcatcacaaaagtaatgtgggccatggagtcaggccacctcctctgggctctgctgttcatgcagtccttgtggcctcaactgactgatggagccactcgagtctactacctgggcatccgggatgtgcagtggaactatgctcccaagggaagaaatgtcatcacgaaccagcctctggacagtgacatagtggcttccagcttcttaaagtctgacaagaaccggatagggggaacctacaagaagaccatctataaagaatacaaggatgactcatacacagatgaagtggcccagcctgcctggttgggcttcctggggccagtgttgcaggctgaagtgggggatgtcattcttattcacctgaagaattttgccactcgtccctataccatccaccctcatggtgtcttctacgagaaggactctgaaggttccctatacccagatggctcctctgggccactgaaagctgatgactctgttcccccggggggcagccatatctacaactggaccattccagaaggccatgcacccaccgatgctgacccagcgtgcctcacctggatctaccattctcatgtagatgctccacgagacattgcaactggcctaattgggcctctcatcacctgtaaaagaggagccctggatgggaactcccctcctcaacgccaggatgtagaccatgatttcttcctcctcttcagtgtggtagatgagaacctcagctggcatctcaatgagaacattgccacttactgctcagatcctgcttcagtggacaaagaagatgagacatttcaggagagcaataggatgcatgcaatcaatggctttgtttttgggaatttacctgagctgaacatgtgtgcacagaaacgtgtggcctggcacttgtttggcatgggcaatgaaattgatgtccacacagcatttttccatggacagatgctgactacccgtggacaccacactgatgtggctaacatctttccagccacctttgtgactgctgagatggtgccctgggaacctggtacctggttaattagctgccaagtgaacagtcactttcgagatggcatgcaggcactctacaaggtcaagtcttgctccatggcccctcctgtggacctgctcacaggcaaagttcgacagtacttcattgaggcccatgagattcaatgggactatggcccgatggggcatgatgggagtactgggaagaatttgagagagccaggcagtatctcagataagtttttccagaagagctccagccgaattgggggcacttactggaaagtgcgatatgaagcctttcaagatgagacattccaagagaagatgcatttggaggaagataggcatcttggaatcctggggccagtgatccgggctgaggtgggtgacaccattcaggtggtcttctacaaccgtgcctcccagccattcagcatgcagccccatggggtcttttatgagaaagactatgaaggcactgtgtacaatgatggctcatcttaccctggcttggttgccaagccctttgagaaagtaacataccgctggacagtcccccctcatgccggtcccactgctcaggatcctgcttgtctcacttggatgtacttctctgctgcagatcccataagagacacaaattctggcctggtgggcccgctgctggtgtgcagggctggtgccttgggtgcagatggcaagcagaaaggggtggataaagaattctttcttctcttcactgtgttggatgagaacaagagctggtacagcaatgccaatcaagcagctgctatgttggatttccgactgctttcagaggatattgagggcttccaagactccaatcggatgcatgccattaatgggtttctgttctctaacctgcccaggctggacatgtgcaagggtgacacagtggcctggcacctgctcggcctgggcacagagactgatgtgcatggagtcatgttccagggcaacactgtgcagcttcagggcatgaggaagggtgcagctatgctctttcctcatacctttgtcatggccatcatgcagcctgacaaccttgggacatttgagatttattgccaggcaggcagccatcgagaagcagggatgagggcaatctataatgtctcccagtgtcctggccaccaagccacccctcgccaacgctaccaagctgcaagaatctactatatcatggcagaagaagtagagtgggactattgccctgaccggagctgggaacgggaatggcacaaccagtctgagaaggacagttatggttacattttcctgagcaacaaggatgggctcctgggttccagatacaagaaagctgtattcagggaatacactgatggtacattcaggatccctcggccaaggactggaccagaagaacacttgggaatcttgggtccacttatcaaaggtgaagttggtgatatcctgactgtggtattcaagaataatgccagccgcccctactctgtgcatgctcatggagtgctagaatctactactgtctggccactggctgctgagcctggtgaggtggtcacttatcagtggaacatcccagagaggtctggccctgggcccaatgactctgcttgtgtttcctggatctattattctgcagtggatcccatcaaggacatgtatagtggcctggtggggcccttggctatctgccaaaagggcatcctggagccccatggaggacggagtgacatggatcgggaatttgcattgttgttcttgatttttgatgaaaataagtcttggtatttggaggaaaatgtggcaacccatgggtcccaggatccaggcagtattaacctacaggatgaaactttcttggagagcaataaaatgcatgcaatcaatgggaaactctatgccaaccttaggggtcttaccatgtaccaaggagaacgagtggcctggtacatgctggccatgggccaagatgtggatctacacaccatccactttcatgcagagagcttcctctatcggaatggcgagaactaccgggcagatgtggtggatctgttcccagggacttttgaggttgtggagatggtggccagcaaccctgggacatggctgatgcactgccatgtgactgaccatgtccatgctggcatggagaccctcttcactgttttttctcgaacagaacacttaagccctctcaccgtcatcaccaaagagactgaaaaagcagtgccccccagagacattgaagaaggcaatgtgaagatgctgggcatgcagatccccataaagaatgttgagatgctggcctctgttttggttgccattagtgtcacccttctgctcgttgttctggctcttggtggagtggtttggtaccaacatcgacagagaaagctacgacgcaataggaggtccatcctggatgacagcttcaagcttctgtctttcaaacagtaacatctggagcctggagatatcctcaggaagcacatctgtagtgcactcccagcaggccatggactagtcactaaccccacactcaaaggggcatgggtggtggagaagcagaaggagcaatcaagcttatctggatatttctttctttatttattttacatggaaataatatgatttcactttttctttagtttctttgctctacgtgggcacctggcactaagggagtaccttattatcctacatcgcaaatttcaacagctacattatatttccttctgacacttggaaggtattgaaatttctagaaatgtatccttctcacaaagtagagaccaagagaaaaactcattgattgggtttctacttctttcaaggactcaggaaatttcactttgaactgaggccaagtgagctgttaagataacccacacttaaactaaaggctaagaatataggcttgatgggaaattgaaggtaggctgagtattgggaatccaaattgaattttgattctccttggcagtgaactactttgaagaagtggtcaatgggttgttgctgccatgagcatgtacaacctctggagctagaagctcctcaggaaagccagttctccaagttcttaacctgtggcactgaaaggaatgttgagttacctcttcatgttttagacagcaaaccctatccattaaagtacttgttagaacactgaaaaaaaaaaaaaaaaaaa

SEQ ID NO: 2952 - DNA, 3104 bp, Homo sapiens
ctcgcggacaggaagcaggagagtttgccaatagggatgtgacagcggttcccattaagcggtgatggtggttttgggacctgataatcgagctgggagtcagaggcgggatgtgtgcggtgaaggatgttttgatacccccatataaaataatctgtctgtcatgggagcccccacgtcctctgaaatagttcagctctgtctgcatgacttgtcctgggactgaggaaaatttaccagtcatctggccttttggaagagcaaaaaatgatgaagtcccaggggttagtatcattcaaggatgtggctgtggatttcacccaggaggagtggcagcaacttgacccttctcagaggaccctgtacagggatgtgatgctggagaactacagccacctggtctcaatggggtatccagtttccaaaccagatgtcatctccaagttggaacaaggagaagagccatggatcataaagggagacatatcaaattggatctatccagatgaatatcaggcagatgggagacaagacaggaagagtaaccttcacaactcccagtcatgtattttggggacagtttccttccatcataagatactgaaaggagtcacaagggatggttcattgtgctccattttaaaagtctgtcaaggtgatggtcagctgcagagatttctagagaatcaagacaaactcttcaggcaggtcacatttgttaacagcaaaacagtgactgaggcatcagggcataaatataatccactggggaaaatatttcaagagtgcatagaaacagatatatcaatacagagattccataaatatgatgcttttaaaaagaacttaaaaccaaatattgacctaccgagttgttataagagcaattcaagaaaaaaacctgatcagagttttggaggtggaaaatcatctagccagagtgagcccaattctaatcttgagaagattcacaatggagtaataccttttgatgataatcagtgtggaaacgtttttagaaatacacaatcccttattcaatatcagaatgtggaaactaaagagaaaagctgtgtatgtgttacatgtggaaaagcctttgctaagaagtcacaactcattgtacatcaaagaattcatactggaaagaaaccatatgattgtggtgcatgcggaaaagccttcagtgagaagtttcatcttgttgtacatcagagaactcatactggggagaaaccttatgattgttctgaatgtggaaaagccttctctcagaaatcgtcccttattatacatcagagagttcacactggggaaaaaccctatgaatgtagtgaatgcgggaaagccttctcccagaaatcacccctcattatacatcagagaatacatactggggaaaaaccctatgaatgtagagagtgtgggaaggccttttcccagaagtcacagctgattatacaccacagagctcatactggagagaagccgtatgagtgtaccgaatgtgggaaagccttctgtgagaagtcccacctcattatacataaaagaattcacactggtgagaaaccctacaaatgtgctcaatgtgaggaagccttcagcaggaagacagaactcattacacatcagttagttcatactggggaaaaaccttatgaatgtactgaatgtggaaagacattctcccgcaagtcacagctcatcatacatcagagaacacatactggagaaaaaccctataaatgtagtgaatgtggcaaagccttctgccagaagtcacatctcattggacatcagagaattcacacaggagaaaaaccttatatatgtactgaatgtgggaaagccttctctcagaagtcccaccttccgggacaccagcgaattcatacaggagagaaaccttacatatgtgctgaatgtggaaaggccttttctcagaagtcagaccttgttttacatcagaggattcatactggggaaagaccctatcaatgtgctatatgtgggaaggccttcatccagaagtcacaactaactgtacaccagagaattcacacagtggtaaaatcataatgaactggccacagaaaagccttagtattagctcaagccttaataattactagaaacccaattaatttgataagcttggggacaacatcccaatagataaaaatttttaagggaatttgtttctagtttggtgatgcctaacttttccagcaaagatgatggaaaatagttatataaatgaagaacatttttaatatggcatgtaaagcttttaaagttatgaactcagtgatcagcacagcaagttaagcatacagaatattgtcaagttgcatattccttatactacaaaatgataatcagccattgtgaaactgctaatattagcttgtcataattatggccataaactaatttttctataaaagacgtggaagaaagcttaagtaaacaataaaataaaacctatacactattttaagaaggggcttgagcatgacccctaaagctacatgtaaagttcttgtacaaaaaatggaatgataggttgatcagattcagtaaagttgatctgtatgcattttcccatctcaagcatataagttgacctgcatctctggaaggaccttgagattgatgcattttgagcaggtctcccttttactcttcccaactgggaacttggagctgaaaaacattggcactgaggccagatggccttgggtttaatcctggctcagtgcctcacagattgtgtgactttaggcaaacatacttctcctagctgagtattttttatcagtaagtacaaatacaatgcagagctcattttcagttaatattagtactttttaaatctttactctctatcttgaagcattagatgttaagactaatgtgtaaaaaccacgtctgagcttgcttttccctctggacactctgcttttgattgcctatccctataagtggctcattttactgtcttctgatcctggtggccttatttttgctatgttaaggttgtgttttttaatacttggatttattttcatatacttacataaaccgtggtgattgcacat

SEQ ID NO: 2953 - DNA, 907 bp, Homo sapiens
cacactctcagaaactgcggcggctctggactgcagcctcccaaggctccatgccagacaaagcatgcgtgtcacacttgctacaatagcctggatggtttcttttgtctccaattattcacacacagcaaatattttgccagatatcgaaaatgaagatttcatcaaagactgcgttcgaatccataacaagttccgatcagaggtgaaaccaacagccagtgatatgctatacatgacttgggacccagcactagcccaaattgcaaaagcatgggccagcaattgccagttttcacataatacacggctgaagccaccccacaagctgcacccaaacttcacttcactgggagagaacatctggactgggtctgtgcccattttttctgtgtcttccgccatcacaaactggtatgacgaaatccaggactatgacttcaagactcggatatgcaaaaaagtctgtggccactacactcaggttgtttgggcagatagttacaaagttggctgcgcagttcaattttgccctaaagtttctggctttgacgctctttccaatggagcacattttatatgcaactacggaccaggagggaattacccaacttggccatataagagaggagccacctgcagtgcctgccccaataatgacaagtgtttggacaatctctgtgttaaccgacagcgagaccaagtcaaacgttactactctgttgtatatccaggctggcccatatatccacgtaacagatacacttctctctttctcattgttaattcagtaattctaatactgtctgttataattaccattttggtacagcacaagtaccctaatttagttcttttggactaatacaattcaggaaagaaaaaacccaaaacccaaaaaaaaaaa

SEQ ID NO: 2954 - DNA, 2685 bp, Homo sapiens
ggacttgggaggcgcggtgaggagtcaggcttaaaacttgttggaggggagtaaccagcctgctcctctcgctctcctcctcgtctgcgccgcgtttcagagagaaaattcctgttccaagagaaaataaggcaacatcaatgaaggagagaagagccagccagaaattatccagcaaatctatcatggatcctaatcagaacgtgaaatgcaagatagttgtggtgggagacagtcagtgtggaaaaactgcgctgctccatgtcttcgccaaggactgcttccccgagaattacgttcctacagtgtttgagaattacacggccagttttgaaatcgacacacaaagaatagagttgagcctgtgggacacttcgggttctccttactatgacaatgtccgccccctctcttaccctgattcggatgctgtgctgatttgctttgacatcagtagaccagagaccctggacagtgtcctcaaaaagtggaaaggtgaaatccaggaattttgtccaaataccaaaatgctcttggtcggctgcaagtctgatctgcggacagatgttagtacattagtagagctctccaatcacaggcagacgccagtgtcctatgaccagggggcaaatatggccaaacagattggagcagctacttatatcgaatgctcagctttacagtcggaaaatagcgtcagagacatttttcacgttgccaccttggcatgtgtaaataagacaaataaaaacgttaagcggaacaaatcacagagagccacaaagcggatttcacacatgcctagcagaccagaactctcggcagttgctacggacttacgaaaggacaaagcgaagagctgcactgtgatgtgaatctttcattatctttaatgaagacaaaggaatctagtgtaaaaaacaacagcaaacaaaaaggtgaagtctaaatgaagtgcacagccaaagtcatgtataccagaggcttaggaggcgtttgagaggatactcatctttttggaatcctgaccttaggttcggcatgtagaccaagtgatgagaagtgaatacatggaagagtttttaagtgtgacttgaaaaatatgccaaaaaatgagagatacaaatgagctagaggaagatgaggggggatgcgagtacctccaagaagaaaaatcacactctgaatggtgcttgcatttttgggttttttttttttttgttataatctattcatggatctccactttgatttaatttttaaatgttttaatctcctttacaaaaagtatacgttaatataccgtcctcaagggggaactggcactgtgaccttagcatttagttttctagaggatgtgatctaatttctttctagctcatcattaaaaaggaaattgtatcaggacccatgggatatatccagaggcaaactttatgaggctttgaaatcttgccttcctgaagatagctgagtaggatggttctaaggaaagcctttgcaatcttgcaagatttgtagaccagcactacaaagatcgcatagatcaaataggaaaaaaaatgtcgatttttattcagtctgatggttctgttcttcattgtgattgtcattaaaaagtggtaaattgctcaatgtaatatttttgtgcgctgtttagaagttgtgtgattttttgccatcgttgataaaaatgcaaagtcaaataaaaggtgtcttggtttgatgtcatagaatgatccaaggagagaaaaaaggtagttactgttttcaccagaaaaggtaatgagtgaaggaaagaatagtagcagaaagcacagtttgtgagtaaagctgtctggaattaagttaccaaaaatacaaagcaaaaggactattattttgggttgaagctccaaaactgacagcatctgataatctgttggtttatttcacttttcattaaatgaacattgatgagagaagatgccacttacccaagctttagagaatccctagtggaagattatatgataaactttcagtcctgacataacactagggcatttctagagtgtcattgctaaaacctcactgaacagacgcagccaaggtctgtgttcagcacttggtctctgttgttacgtaaaataataagcatttaaaatagtttacagatatttttgaccagttccttttagagattctttcagagaagaaaccagatctgacctgtttattgttggcgcttgttgaaaacgagctttctttcccatgatagtgcttcgtttttgaagtgttgaagctgtgctccccttaaatcgtggcaggagagattaaggtaattacaacactcagttctatgtcttacaagcactttgtcttgtctctgcaagaaaattcgattccagtcatttcccataaaatacagacattttaccaacataatatgctttgattgatgcagcattatgctttgggcagtattacaaaatagctggcgagtgctttctgtatttaaatattgtaaaaagaaaataagttataactgttataaagcagaacttttgttgcattttttaaactgttgaagtcactgtgtatgtttgtttggtcaatgtttccgcagtatttattaaaacatacttttttttttcttcaaataaaaaagtaaccatgtctttgtctaaaaaaaaaaaaaaaaaa

SEQ ID NO: 2955 - DNA, 1694 bp, Homo sapiens
ggggaccgcagcggacagcgccaagtgaagcctcgcttccctcccgcggcgaccagggcccgagccgagagtagcagttgtagctacccgcccagaaactagacacaatgtgcgacgaagacgagaccaccgccctcgtgtgcgacaatggctccggcctggtgaaagccggcttcgccggggatgacgcccctagggccgtgttcccgtccatcgtgggccgcccccgacaccagggcgtcatggtcggtatgggtcagaaagattcctacgtgggcgacgaggctcagagcaagagaggtatcctgaccctgaagtaccctatcgagcacggcatcatcaccaactgggatgacatggagaagatctggcaccacaccttctacaacgagcttcgcgtggctcccgaggagcaccccaccctgctcaccgaggcccccctcaatcccaaggccaaccgcgagaagatgacccagatcatgtttgagaccttcaacgtgcccgccatgtacgtggccatccaggccgtgctgtccctctacgcctccggcaggaccaccggcatcgtgctggactccggcgacggcgtcacccacaacgtgcccatttatgagggctacgcgctgccgcacgccatcatgcgcctggacctggcgggccgcgatctcaccgactacctgatgaagatcctcactgagcgtggctactccttcgtgaccacagctgagcgcgagatcgtgcgcgacatcaaggagaagctgtgctacgtggccctggacttcgagaacgagatggcgacggccgcctcctcctcctccctggaaaagagctacgagctgccagacgggcaggtcatcaccatcggcaacgagcgcttccgctgcccggagacgctcttccagccctccttcatcggtatggagtcggcgggcattcacgagaccacctacaacagcatcatgaagtgtgacatcgacatcaggaaggacctgtatgccaacaacgtcatgtcggggggcaccacgatgtaccctgggatcgctgaccgcatgcagaaagagatcaccgcgctggcacccagcaccatgaagatcaagatcatcgccccgccggagcgcaaatactcggtgtggatcggcggctccatcctggcctcgctgtccaccttccagcagatgtggatcaccaagcaggagtacgacgaggccggcccttccatcgtccaccgcaaatgcttctagacacactccacctccagcacgcgacttctcaggacgacgaatcttctcaatgggggggcggctgagctccagccaccccgcagtcactttctttgtaacaacttccgttgctgccatcgtaaactgacacagtgtttataacgtgtacatacattaacttattacctcattttgttatttttcgaaacaaagccctgtggaagaaaatggaaaacttgaagaagcattaaagtcattctgttaagctgcgaaaaaaaaaaaaaaaaaaaaaaaaaaaaaaaaaaaaaaaaaaaaaaaaaaaaaaaaaaaaaaaaaaaaaaaaaaaaaaaaaaaaaaaaaaaaaaaaaaaaaaaaaaaaaaaaaaaaaaaaaaaaaaaaaaaaaaaaaaaaaaaaaaaaaaaaaaaaaaaaaaaaaaaaaaaaaaaaaaaaaaaaaaaaaaaaaaaaaaaaaaa

SEQ ID NO: 2956 - DNA, 1322 bp, Homo sapiens
ggggacaccagccctcagtcactgggagaagaacctctcataccctcggtgctccagtccccagctcactcagccacatacaccatgtgtgaagaggagaccaccgcgctcgtgtgtgacaatggctctggcctgtgcaaggcaggcttcgcaggagatgatgccccccgggctgtcttcccctccattgtgggccgccctcgccaccagggtgtgatggtgggaatgggccagaaagacagctatgtgggggatgaggctcagagcaagcgagggatcctaactctcaaataccccattgaacacggcatcatcaccaactgggatgacatggagaagatctggcaccactccttctacaatgagctgcgtgtagcacctgaagagcaccccaccctgctcacagaggctcccctaaatcccaaggccaacagggagaagatgacccagatcatgtttgaaaccttcaatgtccctgccatgtacgtcgccattcaagctgtgctctccctctatgcctctggccgcacgacaggcatcgtcctggattcaggtgatggcgtcacccacaatgtccccatctatgaaggctatgccctgccccatgccatcatgcgcctggacttggctggccgtgacctcacggactacctcatgaagatcctcacagagagaggctattcctttgtgaccacagctgagagagaaattgtgcgagacatcaaggagaagctgtgctatgtggccctggattttgagaatgagatggccacagcagcttcctcttcctccctggagaagagctatgagctgccagatgggcaggttatcaccattggcaatgagcgcttccgctgccctgagaccctcttccagccttcctttattggcatggagtccgctggaattcatgagacaacctacaattccatcatgaagtgtgacattgacatccgtaaggacttatatgccaacaatgtcctctctgggggcaccaccatgtaccctggcattgctgacaggatgcagaaggagatcacagccctggcccccagcaccatgaagatcaagattattgctcccccagagcggaagtactcagtctggatcgggggctctatcctggcctctctctccaccttccagcagatgtggatcagcaagcctgagtatgatgaggcagggccctccattgtccacaggaagtgcttctaaagtcagaacaggttctccaaggatcccctcgagactactctgttaccagtcatgaaacattaaaacctacaagccttaaaaaaaaaaaaaaaaaaaaaaaaaaaaaa

SEQ ID NO: 2957 - DNA, 1964 bp, Homo sapiens
aacagctgctgctggctcttcctcttgcggccttttcctgaaacggattcttctttcggggaacagaaagcgccagccatgcagccttggcacggaaaggccatgcagagagcttccgaggccggagccactgcccccaaggcttccgcacggaatgccaggggcgccccgatggatcccaacgagtctccggctgcccccgaggccgccctgcctaaggcgggaaagttcggccccgccaggaagtcgggatcccggcagaaaaagagcgccccggacacccaggagaggccgcccgtccgcgcaactggggcccgcgccaaaaaggcccctcagcgcgcccaggacacgcagccgtctgacgccaccagcgcccctggggcagaggggctggagcctcctgcggctcgggagccggctctttccagggctggttcttgccgccagaggggcgcgcgctgctccacgaagccaagacccccgcccgggccctgggacgtgcccagccccggcctgccggtctcggcccccattctcgtacggagggatgcggcgcctggggcctcgaagctccgggcggttttggagaagttgaagctcagccgcgatgatatctccacggcggcggggatggtgaaaggggttgtggaccacctgctgctcagactgaagtgcgactccgcgttcagaggcgtcgggctgctgaacaccgggagctactatgagcacgtgaagatttctgcacctaatgaatttgatgtcatgtttaaactggaagtccccagaattcaactagaagaatattccaacactcgtgcatattactttgtgaaatttaaaagaaatccgaaagaaaatcctctgagtcagtttttagaaggtgaaatattatcagcttctaagatgctgtcaaagtttaggaaaatcattaaggaagaaattaacgacattaaagatacagatgtcatcatgaagaggaaaagaggagggagccctgctgtaacacttcttattagtgaaaaaatatctgtggatataaccctggctttggaatcaaaaagtagctggcctgctagcacccaagaaggcctgcgcattcaaaactggctttcagcaaaagttaggaagcaactacgactaaagccattttaccttgtacccaagcatgcaaaggaaggaaatggtttccaagaagaaacatggcggctatccttctctcacatcgaaaaggaaattttgaacaatcatggaaaatctaaaacgtgctgtgaaaacaaagaagagaaatgttgcaggaaagattgtttaaaactaatgaaataccttttagaacagctgaaagaaaggtttaaagacaaaaaacatctggataaattctcttcttatcatgtgaaaactgccttctttcacagactctactgatatatttccaagtattaggtcacttgataagtgatccgcactgaagcaaaagataaactcagcattcttaggtgcttattctaatgccaccagttttacttctgttagcaaaaatctaaagtaacataacagacttatcacccccatttggaattagtatacaaatagaaatgatcctaatcaatttaattaattataatggacacacaagaaaaaatacctacacagcttttcgagaaacgaagacaatgactttgtctgtggatgacatactctgtagaaaagtttgcatgtgactccatttctcttcctcggtggttacaattatattttgcttcactgaacttacagcctaaaggattcaaagaacatagttcatcaaggtcatcatgattgagggtgagaccgcatacatcagctcaaaatgcatcttctctctcattggttaatgtttttaataaactgctaagcaaaatggcagacgtcctaaaaaaaaaaaaaaaaaaaaaaaataaaaaaaaaaaataaaaaaaaaaaaaaaa

SEQ ID NO: 2958 - DNA, 2156 bp, Homo sapiens
gtccccgccgtgcgcccttcgccgctgagctcgcagcctccggcgcccacctccacctccagtgtcccgcctcgggccgtcgccctccagcggctcgcgagcgtgggagacgtacctgggcaggcactgtccagcccaggcccaggcacagccgtgaggggcgaggcacggggacatcctggcggccaccatggtggccacgtgcctgcaggtggtgggcttcgtcacgagcttcgtgggctggatcggggtcatcgtgaccacctccaccaatgactgggtggtgacctgcggctacaccatccccacctgccgcaagctggatgagctgggctccaaggggctgtgggccgactgcgtcatggccacggggctgtaccactgcaagcccctggtggacatcctcatcctgccgggctacgtgcaggcctgccgcgccctgatgattgctgcctcggtcctgggtctgccggccattttactgctgctgactgttcttccctgcatccggatgggccaggagcccggtgtggctaagtacaggcgggcccagctggctggtgttttgctcattctgctggctctctgcgcccttgttgccaccatctggttccctgtgtgcgcccaccgtgagaccaccatcgtgagctttggctactccctgtatgcaggctggattggtgctgtgctgtgcctcgtgggtggctgtgtcatcctctgctgcgctggagatgcccaggcctttggtgaaaaccgtttctactacactgcgggctctagctccccgactcatgcgaagagtgcccacgtataagagggctgcccggctgcccacagaggtgctgtagatgctgggcccagggccctaggtttgctcgtcacagtgtggggaagcccattcctctgccaggctctaaagccaaaggtctagaaaagcatcctgtctggcattttgtagtcttaacttctccccatttcccccatcttttggttgccttaaaagaaatctctagctcagataatgcccagacatttttttcccttggtgttgcccctattagctcttttcttgggcattcttctgctgtttattaaaaatatattatatatattttgtttctttaaatttcaaatgttttgcaaacatcactgagttaggtgggggtggggaagagaaatacaagatacttttttttttttttttttaaatagggcctcactctgttgctcaggctggagtgcggtggtgtgatctcggctcatgtagcctcaacctccccggctcaagtgatcctcctgcctcagcctcccaagtagctgggactacaggcgttcactactacacccagctaatttttaagttttttatagagatgagggctccctatgttgcccaggttggtctcgaactcctggactcaaagtatcctcccgcctcggcctcccaaagtgttgggattataggagtgagccaccacaccagccaagatgcttttcaaactgatacagatgacaatgggagcctcataaagatggcttttgtttcttcccttcaaggtcatttacttgtacgagacagaaaaagatagcattggggacatgggatgggggagggagggcaatagtggaacgaactttccatgggaaactttcccttttgtaagttgagggccaggggtagggatattttttagtttgtgattttacatttatctgtacatactttttcaagattgatcatttttataaccatggttttcctgaaatcctcaattcatcaatatgaaggaaatgaaccacatagactttatgcaataaataacagtgcaagtgagtataactctaactgatgttccacaaaacatttttgatttcaggtttgtatgatgtagtttttaatcgtacattttcatatgcttcaaactaacacatttttaaagctttcccccacttttctctctatttgtattgttagccatcttgaagtgatgttgtttaacataaattgtactgttgaatttggctttacgggtgtaaacactgatggtatatcagtatctgagaccccaaactctccaaatactgatggtgcattttattcttgaagtgaaatctgtgcaataaaataacagactgtctgcaaaaaaaaaaaaaaa

SEQ ID NO: 2959 - DNA, 1510 bp, Homo sapiens
ctcactcgagacggcggcgcgtgcagcagctccagaaagcagcgagttggcagagcagggctgcatttccagcaggagctgcgagcacagtgctggctcacaacaagatgctcaaggtgtcagccgtactgtgtgtgtgtgcagccgcttggtgcagtcagtctctcgcagctgccgcggcggtggctgcagccggggggcggtcggacggcggtaattttctggatgataaacaatggctcaccacaatctctcagtatgacaaggaagtcggacagtggaacaaattccgagacgatgattatttccgcacttggagtccaggaaaacccttcgatcaggctttagatccagctaaggatccatgcttaaagatgaaatgtagtcgccataaagtatgcattgctcaagattctcagactgcagtctgcattagtcaccggaggcttacacacaggatgaaagaagcaggagtagaccataggcagtggaggggtcccatattatccacctgcaagcagtgcccagtggtctatcccagccctgtttgtggttcagatggtcatacctactcttttcagtgcaaactagaatatcaggcatgtgtcttaggaaaacagatctcagtcaaatgtgaaggacattgcccatgtccttcagataagcccaccagtacaagcagaaatgttaagagagcatgcagtgacctggagttcagggaagtggcaaacagattgcgggactggttcaaggcccttcatgaaagtggaagtcaaaacaagaagacaaaaacattgctgaggcctgagagaagcagattcgataccagcatcttgccaatttgcaaggactcacttggctggatgtttaacagacttgatacaaactatgacctgctattggaccagtcagagctcagaagcatttaccttgataagaatgaacagtgtaccaaggcattcttcaattcttgtgacacatacaaggacagtttaatatctaataatgagtggtgctactgcttccagagacagcaaggtaaaagatgagacccttacagatgcaaatagttgacctgcatgtcaaattttacttattttttaagaaaataaaacagtacactatgctcattcattttgtgtatgtttttgtaattcaagtgttgaataaaagagcaaataagaagcatgttgaacaaataactctgccagagatacaacacatgctaaataagatgaaaaatagtaattaatattttgtattaatgccactacattatagtttccattatgagccaccaagaagcacacagaaatattaaggacttagatactgaaagtaatcattaaaattaatttgctatctgctttgcccacaatgtaaaataaatggattttttatcactatactgtggagttttaatgttctattttgtgatcttattaaatgagttgaatgaaaaaaaaaaaaaaaaaaaaaaaaaaaaaaaaaaaaaaaaaaaaaaaaaaaa

SEQ ID NO: 2960 - DNA, 1605 bp, Homo sapiens
ggggcttttgaggtagagtcagagtagggaaaacaactaatctgttttccaaacaggttttcataaataactgacaggagatgggctgtttttatggaagtattaacccaaatgatgggtgttaatcattaaacctttttggtggtggctcgcttgtttctctgatattctaatccgggtcacagaatggctaaggcagatttaagtgcagcgtggattttttttttctcactttgccttgtgttttccaccctgaaagaatgttgtggctgctcttttttctggtgactgccattcatgctgaactctgtcaaccaggtgcagaaaatgcttttaaagtgagacttagtatcagaacagctctgggagataaagcatatgcctgggataccaatgaagaatacctcttcaaagcgatggtagctttctccatgagaaaagttcccaacagagaagcaacagaaatttcccatgtcctactttgcaatgtaacccagagggtatcattctggtttgtggttacagacccttcaaaaaatcacacccttcctgctgttgaggtgcaatcagccataagaatgaacaagaaccggatcaacaatgccttctttctaaatgaccaaactctggaatttttaaaaatcccttccacacttgcaccacccatggacccatctgtgcccatctggattattatatttggtgtgatattttgcatcatcatagttgcaattgcactactgattttatcagggatctggcaacgtagaagaaagaacaaagaaccatctgaagtggatgacgctgaagataagtgtgaaaacatgatcacaattgaaaatggcatcccctctgatcccctggacatgaagggagggcatattaatgatgccttcatgacagaggatgagaggctcacccctctctgaagggctgttgttctgcttcctcaagaaattaaacatttgtttctgtgtgactgctgagcatcctgaaataccaagagcagatcatatattttgtttcaccattcttcttttgtaataaattttgaatgtgcttgaaagtgaaaagcaatcaattatacccaccaacaccactgaaatcataagctattcacgactcaaaatattctaaaatatttttctgacagtatagtgtataaatgtggtcatgtggtatttgtagttattgatttaagcatttttagaaataagatcaggcatatgtatatattttcacacttcaaagacctaaggaaaaataaattttccagtggagaatacatataatatggtgtagaaatcattgaaaatggatcctttttgacgatcacttatatcactctgtatatgactaagtaaacaaaagtgagaagtaattattgtaaatggatggataaaaatggaattactcatatacagggtggaattttatcctgttatcacaccaacagttgattatatattttctgaatatcagcccctaataggacaattctatttgttgaccatttctacaatttgtaaaagtccaatctgtgctaacttaataaagtaataatcatctcttaagtaaaaaaaaaaaaaaaaaaaaaaaaaaaaa

SEQ ID NO: 2961 - DNA, 1757 bp, Homo sapiens
ggggagctctgcgaggggccggagcgcggcggagccatgcagtacccgcaccccgggccggcggcgggcgccgtgggggtgccgctgtacgcgcccacgccgctgctgcaacccgcacacccgacgcccttttacatcgaggacatcctgggccgcgggcccgccgcgcccacgcccgcccccacgctgccgtcccccaactcctccttcaccagcctcgtgtccccctaccggaccccggtgtacgagcccacgccgatccatccagccttctcgcaccactccgccgccgcgctggccgctgcctacggacccggcggcttcgggggccctctgtaccccttcccgcggacggtgaacgactacacgcacgccctgctccgccacgaccccctgggcaaacctctactctggagccccttcttgcagaggcctctgcataaaaggaaaggcggccaggtgagattctccaacgaccagaccatcgagctggagaagaaattcgagacgcagaaatatctctctccgcccgagaggaagcgtctgaccaagatgctgcagctcagcgagagacaggtcaaaacctggtttcagaatcgacgcgctaaatggaggagactaaaacaggagaaccctcaaagcaataaaaaagaagaactggaaagtttggacagttcctgtgatcagaggcaagatttgcccagtgaacagaataaaggtgcttctttggatagctctcaatgttcgccctcccctgcctcccaggaagaccttgaatcagagatttcagaggattctgatcaggaagtggacattgagggcgataaaagctattttaatgctggatgatgaccactggcattggcatgttcagaaaactggatttaggaataatgttttgctacagaaaatcttcatagaagaactggaaggctatataagaaagggaatcaattctctggtattctggaaacctaaaaatatttggtgcactgctcaattaacaaacctacatggagaccttaattttgacttaacaaatagtttatgtactgctcttaggttgttttgataaagtgacattatagtgattaaattcttccccctttaaaaaaacagttagtggttttcactatttataaaaaattaattttgaactttttgttaaatttttaagttatagctttaaaggttttaataggaccttcttgaacgacttttctgtaatctgtttatctcccacttaatggaaaggcaaaggggtaccccaaatccagaggtgcctacatttcaggcagccttggagtattttaaaaggaaaacattctttacttttatatgacattcttatactgctgtctcaaatccaaaaacatttcagagctcttgtctcagagatgtgtgttctttttgtcagagatatggttgatgagaatcttaaatgcttgttttgcactatcacttagtacctgtttgaccaaggtgttaaggggatagtacctcccaattcaagcagagaaactgacctgactaaagttaatcgcagatgaactagaagtcacaggttaattaaatgtaagtagattgtagatactgttttatatcaaacaatgtttataatgtgtatatagaattgttcactgtaaaaaaaatggccaaaatgtgttttttttttaataagtaacttgactataaaataaagccgtccgtgggacgactgaaaaaaacaaaaaaaaaaaaaaaaaaaaaaaaaaaaa

SEQ ID NO: 2962 - DNA, 1186 bp, Homo sapiens
gggggattgtctattgttctccaaacagtaaaccagtatttcacactgagattgtcggctgcgggtatattccaattccccgtctcctcatgaatatgaagtgaagggctctgaccctggaagtggttctaagcagggcaaaatggggtctcggaagtgtggaggctgcctaagttgtttgctgattccgcttgcactttggagtataatcgtgaacatattattgtatttcccgaatgggcaaacttcctatgcatccagcaataaactcaccaactacgtgtggtattttgaaggaatctgtttctcaggcatcatgatgcttatagtaacaacagttcttctggtactggagaataataacaactataaatgttgccagagtgaaaactgcagcaaaaaatatgtgacactgctgtcaattatcttttcttccctcggaattgctttttctggatactgcctggtcatctctgccttgggtcttgtccaagggccatattgccgcacccttgatggctgggagtatgcttttgaaggcactgctggacgtttccttacagattctagcatatggattcagtgcctggaacctgcacatgttgtggagtggaacatcattttattttccattctcataaccctcagtgggcttcaagtgatcatctgcctcatcagagtagtcatgcaactatccaagatactgtgtggaagctattcagtgatcttccagcctggaatcatttgaataaggacaaaatgttttccattatcaagacatggccatctatctaaatattatatcaactgtgtagacttgagggcaatattgaaatgatggtgctttctgcatttggtgtttatttgtaaaaaatttgcagtcctcactgcacatgcaagtataccacccttccatttagtatgttttttaagtaatatgcatcagaaacttcagaaatacttctgccctttgatcaaacaaatccatttccaagaatctgtactagggaagtaaataagaatatgagagaaacctttatgcaaatatgtatattgcaacattatttaatattctggaaaattggaaacaccccaaaattctaaactcagaggaaggattaagtaaagagtggtacatactgtaaatgttttctgataaaaaaaaaaaaaaaaaaaaaaaaaaaaa

SEQ ID NO: 2963 - DNA, 3395 bp, Homo sapiens
gatggcagcccaggctttggcgctgctgagagaggtagcgaggctggaagcgccgctggaggagctacgcgcgcttcactccgtgctgcaggcagtgccgctcaacgagcttcgccagcaagcggcggagctgcgcctcggcccgctcttctccctgcttaacgagaaccatagggaaaagactactttgtgtgtatccattctggagagattgctccaagctatggaaccggttcacgtggcccggaacctcagggttgacctgcagaggggactaattcaccctgatgattctgtaaaaatcctcactctttcccagattggaagaattgttgaaaattctgatgctgttactgagattctaaataatgctgaattactaaaacaaattgtttattgcattggtggagagaatctatctgtagcaaaagcggctatcaaatccctgtcaagaatatcactaacccaagctggactggaggctttatttgaaagcaatctgctggatgatttgaaaagtgtaatgaaaacaaatgacattgttcgatacagggtgtatgagctaattatagagatttcttccgtgtcaccagaatctttaaactactgtaccacaagtggattggtaacccagctcctgagagagctgactggtgaggatgtgttggtcagagccacctgtatagaaatggtgacatcactggcatatactcatcatgggcgacaatatcttgctcaagaaggagtaattgaccaaatttctaatataattgttggggcagattcagaccctttctctagcttctatctgccaggattcgtgaagttttttggaaacctggctgtcatggatagtcctcaacagatctgtgagcgttatcctatctttgtggaaaaagtctttgaaatgatagaaagtcaggaccccactatgattggtgtagctgtagacacagttggaatcttgggatccaatgttgaaggaaaacaggttttacagaaaacaggaactcgctttgaacgcttgcttatgagaataggacatcaatcaaagaatgccccagtggagctaaaaattagatgtttggatgcaatttcatctcttctgtacttaccacctgagcagcagactgatgaccttctgaggatgacagaatcctggttttcttctttatctcgggatccactggagctcttccgtggcattagtagtcagcccttccctgaactacactgtgctgccttaaaagtgtttacggccattgcaaaccaaccctgggctcagaaacttatgtttaacagtccaggttttgtagaatatgtggtggaccggtctgtggagcatgacaaagcttcaaaggatgccaaatatgaactagtgaaagcacttgccaattccaagacaattgcagaaatctttgggaacccaaattatttgaggctcagaacttacctgagtgaagggccatactatgtgaaacctgtttccacgacagcagtagaaggagccgaatgatttcttctagagctcatctatagaggaccacgttttgaccaaaacttctcctaaggcatttgactccatctatatttcacaaaagagacttcctttccccaagaattatcatggaatgtcagatgttactttgttaccaacactgttatatttctacattgaaatgcaaagtggaactaggagtttggaatgcattaagagcagacaagcttggtcataatagatccagtgtttttcagattcctttcactgccttaatctttgcaacagggtggaagtttttttcttccctcaaaattttcatggacatgcaatcttatctaaaagcctgcttcagggctgggcgcggtggctaacacctataattcccagcactttgggaggccaagatgggcaaatcacttgagtctaggagttcaagaccagcctggccaatatggcaaaaccctgtctctactaaaaatataaaatcagccaggcatggtggcgcacacctataatctcagctactcaggaggctgaggcacgagaatcgcttgagcctgggaggcagaggttgcagtgagctgagatcttgccactgcacaccagcctgggcaacacagcaagactctgtctcaaaaataaatgaataaaataaaaacctgccaccaaattatttctggattctcttcactatctttttttttctttttggtcctttttccatttctgattccactttcaaagtcttggatatattctttgaaaaatgagtagtatggaatattaagattatgttccttatactcagaatactttttatgagctctcttgtttttttgttactattattcctttgaaaaaaagacaaaatatctaaaaaatgtttatagtgttcatgtaattttttttgctgtttaccaatgaactttgccctgttgtggttttgggggatcagaaggattcctaaactgtcatttcatttattggtaggtcatgattgctgagggttttgctttggatttttcatacctataaagtcaatcttgagttgatcagagaaagggaaacttactcctaataaacagactcagaacagaagggacatatgcataaatcaggataccatctcattaatttacaaaggataatctttcttttcattgacaacacctacacccacctgttttccagtgttcttctctctaaacagcaaagccaaagcactctgcacaccaaatcacctgttcagaggtttatgcatgagcatatttcttttaggccgtggtgaagttgataaaccacccctgctttgtaacaaaattattttaaagtgactggaattatctagtccccagattgatcatctcccctggcaacgtgactctgttttttgtgtgtgtttccatgctgactagtcccctactgttaatatcactactaattaggctataaccaggtctttcctggcctgagaaatattctcttaaaatgacctttgttttaatctcattcatgatgttgattttttttcaatgtggtgcaatatatacaataaaatttgtcataactattttaagtgtacagttcagtatattacatatgttcataagttgtacaaccatcaccaccatccatcttcagaattattttcatcttatacaattgaaactgtattcattaaacaataactgtctattccctcttttccccagcctctggcaaccaccattctgcttcatgacattgattttattcacttaacatcagattttggggggatgccctctctcctatgtatggtctacacattctgattttttttttagattgaataaaatttgtaaatcattattttcatttcataagtaaaaaaaaaaaaaaaaaaaaaaaaaaa

SEQ ID NO: 2964 - DNA, 3479 bp, Homo sapiens
gacaggcatggtgaaaacattgttcttgggtgttaccaatctccaagccaaacatgttgaaatgaccagcttgtgtgcccactggcaggtacatcgccatgccacagcctatagggttgttatagaatccctccaggataggcaaaagcaagaatccactgtgggtggagggacaaccaggcattgcttctatggacttcagcctgattctgaatataaaatcagtgtttatacaaagctccaggagattgaaggacctagtgtgagcataatggaaaaaacacaatcacttcctacacgaccaccaacttttcctccaaccattccaccagcaaaagaagtatgtaaggcggccaaggctgacctggtatttatggtggatggatcctggagcattggagatgaaaaatttcaataagatcatcagctttctatacagcactgttggagccctgaacaagattggcacagatggaacccaagttgcaatggttcagttcactgatgatcccagaacagaatttaaactaaatgcttacaaaaccaaagagactcttcttgatgcaattaaacacatttcatacaaaggaggaaatacaaaaacaggaaaagcaattaagtatgttcgagataccttgttcactgcagagtcaggtacaagaaggggcatcccaaaggttatcgtggttataactgatggaagatcacaagatgatgtgaacaaaatctccagggagatgcaattagatggctatagcatttttgcaattggtgtggccgatgcagattactcggagttggttagcattggcagtaagcccagcgcacgccatgtcttctttgtggatgactttgacgcctttaagaaaatcgaagatgagttaattacttttgtctgcgaaacagcatcagcaacctgtccagtggtacacaaggatggcattgatcttgcaggatttaagatgatggaaatgtttggtttggttgaaaaagatttttcatcagtggaaggggtttctatggagcctggtaccttcaatgtgtttccatgttaccaactccataaagatgccctggtttcccagccaaccaggtacttgcacccagaaggattgccctccgactacacaatcagttttctattccggattcttcctgacactccacaggagccatttgctctttgggagattttaaataaaaattctgacccattggttggggttattttagacaatggtgggaaaactctaacatatttcaactatgaccagagtggggattttcaaactcttactttcgaaggacctgaaattaggaaaattttttatggaagctttcacaagctacacattgttgtcagtgagactttggtcaaagtggttattgactgcaagcaagtgggtgagaaggcaatgaacgcatcagctaatatcacgtcagatggtgtagaagtgctagggaaaatggttcgatcaagaggaccaggtggaaactctgcaccgttccagttacagatgtttgatattgtttgctccacatcatgggccaatacagacaaatgctgtgaacttccaggcctgagagatgatgagtcttgcccagaccttccccattcctgctcctgttctgaaaccaatgaagtggctctgggaccagcgggcccaccaggtggtccaggactccgaggaccaaagggccagcaaggtgaaccgggtccaaagggaccagatggccctcggggtgaaattggtctgccaggacctcagggtccacctggacctcaaggaccaagtggtctgtccattcaaggaatgcccggaatgccaggagaaaaaggagagaaaggagatactggccttccaggtccacagggtatcccaggaggcgttggttcaccaggacgtgatggctcaccaggccagaggggccttccgggaaaggatggatcctcgggacctccaggaccaccagggccaataggcattcctggcacccctggagtcccagggatcacaggaagcatgggaccgcaaggcgccctgggaccacctggtgtccctggagcaaagggggaacgaggagagcggggtgacctgcagtctcaagccatggtgagatcagtggcgcgtcaagtatgcgaacagctcatccagagtcacatggccaggtacactgccatcctcaaccagattcccagccactcctcatccatccggactgtccaagggcctcctggggagcctgggaggccaggctcacctggagcccctggtgaacaaggacccccaggcacaccaggcttccccggaaatgcaggcgtgccagggaccccaggagaacgaggtctaactggtatcaaaggagaaaaaggaaatccaggcgttggaacccaaggtccaagaggcccccctggaccagcaggaccttcaggggagagtcggcctggcagccctgggccccctggctctcctggaccaagaggcccaccaggtcatctgggggttcctggaccccaaggtccttctggccagcctggatattgtgacccctcatcatgttctgcctatggtgtgagagctccccatccagatcagccagagttcacccctgtccaagatgagctggaagccatggaactgtggggccctggagtctgatagcctcaggagaaatttgaagaccaactgcaagaactcttaaggaatcttgtttgagaaaatgttgttatgtggtttgtatgctacttttggggggcagggctcatttcagcagcctaaatctcctccttggataatgttaatattattattattattaacaaaaaatatatatttttaaaaagttcccttaatctatgacatggtagcaatgatttccctttggtgtcttaatggcatgtcagataatttgtttttccagagaagagagctcaaagaggaattgggaaaaataaattgaactctggaatcttctctctcaagtcctaaaatgaacaaacagatatgattgtgtttgagggaaatatgtccctagcaggaaaagaattcaaagaggttcaaagaatatgtcacttactcctacttgctataggaataaccttgctgataagaaaaaaagggacaatattggagaaactacctcttgtttaattgatctgtccaactctgagatcacttggtaactggtttcatgtgtatccaaaaatcagcatttggatttaagctttctgaatttggtagtttaagaaacagatttagtttttcagtggttttaactcatgtgaaataatgattttccaccagctctgatgcaaagagatataattttaatgaacgatttatccagcagtttgttccaggggttgcctctccttatctacggggattactttgtacatgcagataagttttcgcaaacctatttccattttcttttgtaagcaaataaaactttaaaacaaaaaaaaaaaaaaaaaa

SEQ ID NO: 2965 - DNA, 1081 bp, Homo sapiens
gataaatgctgactccgctcggaaagttctcaactgcaaagtttgctgtccggctgcctagggtctgggaagctcgggcaccctccctctccggggctcctgctcccacccctccggcccccccaccgtcgcgctcctccaggctgggcctgtggccgcggtgctttttaattttcccccagctcagaatcttgctgctcggcccccaggagagcaacaactcaacgggaacgatgtggaaggtgtcagctctgctcttcgttttgggaagcgcgtcgctctgggtcctggcagaaggagccagcacaggccagccagaagatgacactgagactacaggtttggaaggcggcgttgccatgccaggtgccgaagatgatgtggtgactccaggaaccagcgaagaccgctataagtctggcttgacaactctggtggcaacaagtgtcaacagtgtaacaggcattcgcatcgaggatctgccaacttcagaaagcacagtccacgcgcaagaacaaagtccaagcgccacagcctcaaacgtggccaccagtcactccacggagaaagtggatggagacacacagacaacagttgagaaagatggtttgtcaacagtgaccctggttggaatcatagttggggtcttactagccatcggcttcattggtggaatcatcgttgtggttatgcgaaaaatgtcgggaaggtactcgccctaaagagctgaagggttacgccctgctgccaacgtgcttaaaaaaagaccgtttctgactctgtgccctgtccctgagctcgtgggagaagatgacccgtggaacacttgcctggcccactcagaatccacggtgacctctccgcttgccaaaataaccgaaggaaagaccgttcaccagacttggctcctctaaacatttgctgttcaaacatgtttttgaatatacattctataaaagattatttgaaagacaaaattcatagaaaatggagcaaaactgtataaactgatttgtaactaacactggaccattggatcgatattatatgctgtaaccatgaaaaaaaaaaaaaaaaaaaa

SEQ ID NO: 2966 - DNA, 2179 bp, Homo sapiens
ggggacagccagggttagatgttctgaggaggcgggagcaaccgagagagcacgtgagcatctgtcctttctacccgttcctctttatctttagtgttcagtagcagcggggatagcccggggcccggtgtatggccacggagttacagtgtccggactccatgccctgtcacaaccagcaagtaaactctgcctcaaccccaagtcccgagcagctgcgacctggcgatctgatcctggaccacgcagggggaaacagagcctccagggccaaggtgattctcctcacggggtacgcccattctagcctgccggccgagctggactctggggcctgcggcggctccagcctcaactcagagggcaacagtggtagtggtgacagtagcagctatgacgcaccagctggcaactccttcctagaggactgcgaactctcccggcagatcggggcgcagcttaagctgctgcctatgaatgatcagatacgggagctacagaccatcatccgggacaagacagccagtagaggtgacttcatgttttctgcggatcgtttgatcagacttgttgtggaagagggattgaatcagctgccatataaagaatgcatggtgaccactccaacagggtacaagtatgaaggagtgaaatttgagaagggaaattgtggggtcagcataatgagaagcggtgaggcaatggaacaaggtttacgagactgctgtcgatccatacgaattggaaagatcctgattcagagtgatgaggagacacaaagagccaaagtatattatgccaaattccccccagacatttaccggagaaaagtccttctgatgtatccaattctcagcactggaaatactgtaattgaagctgtaaaggttcttatagaacatggagttcaacccagtgttatcatcctactcagtctgttctccactcctcatggtgccaaatcaatcattcaggagtttccagagatcacaattttaactactgaagttcatcctgttgcacctacacattttggacagaaatactttggaacagactaagttatttaagtaaaataattgtcttatgtaatattacaatcatgttttgattttctatttgttttactgattcacttgagggtggcagagaaaaatgtgttaaaatgctttttagttttggaagtgggtatatttgaggttatatctcatttagttatttgtttactgttggcaccgaattcaacaatgaagtatatgcaactcttacaaaacataaattttaataatattctaatgcaaattactgaaccctcagtgcattaaaattatttcctaatttatgagcctcttagtttggaggttgcttgaagccacaaataaaactcaaatgagagtcagttctttgtcccactgtagtttgcattttgtttagtttggttttagctctactaaggtttcacatatgtggctattgccacattcctctactgttttctttctgatactggacatgctagtaacttggagaggagaataaaagaatgtctcctggaattttacattcccattaatgtcctcattcaattggcagacctaggatgtatggttaactctcaggccattatgtttttcatggcccatttcccaaactgcattgttggtaggtgccttgctaagctgtaatgcagtgaagaagatggtggggcatttttagtaattggaactgtaacattaatctacaagattgaaccggggatgtctggatgctgacaagggagagccaagtactgttaatgccatcaatcctctaggaaggaattggtggtttttctgaagtgtgggggaaagggtggtttcttgctggatttcatggccagtaagtaaatttaaatgcttcatttttaatttggatgtttctgctagagacctttgatttggaaattagttattttgcatgtttgtcaactgtatatgtatgaaaatagaaaaaaaacatgctttttgtaaaaacccctaagatttgtatatgttcatctttaggcttctgaaagggagagaaatcatattggaaatcagtgttggtgttctgaaatctgcttgtaaaactctcatctcattttacattgatattaaaacattttaacactaaaaaaaaaaaaaaaaaaaaaaaaaaaaaa

SEQ ID NO: 2967 - DNA, 958 bp, Homo sapiens
ggatgaccacgctcacacgacaagacctcaactttggccaagtggtggccgatgtgctctgcgagttcctggaggtggctgtgcatctcatcctctacgtgcgcgaggtctaccccgtgggcatcttccagaaacgcaagaagtacaacgtgccggtccagatgtcctgccacccggagctgaatcagtatatccaggacacgctgcactgcgtcaagccactcctggagaagaatgatgtggagaaagtggtggtggtgattttggataaagagcaccgcccagtggagaaattcgtctttgagatcacccagcctccactgctgtccatcagctcagactcgctgttgtctcatgtggagcagctgctccgggccttcatcctgaagatcagcgtgtgcgatgccgtcctggaccacaaccccccaggctgtaccttcacagtcctggtgcacacgagagaagccgccactcgcaacatggagaagatccaggtcatcaaggatttcccctggatcctggcggatgagcaggatgtccacatgcatgacccccggctgataccactaaaaaccatgacgtcggacattttaaagatgcagctttacgtggaagagcgcgctcataaaggcagctgagggggcacctgccaccccactgatgcccaaactgtcagactttgggggatccccgcctagggcagtgctgcatggctgccctgattccaagtgctcttatcgcctctgtgtgtggatcgcccgccccagcccggggccgctcaggtctgcttggaggatgcctcccccaggagggcagtgagggatgccgcaacctcgacttctcagcctcctggggttccgccggccaacactgtctgtctcaaatactgtgctgtgagttgtttcaataaaggggccccaagggctgggctgaaaaaaaaaaaaaaaaaaaaaaaaaa

SEQ ID NO: 2968 - DNA, 2186 bp, Homo sapiens
caatgccgccacccgcggacatcgtcaaggtggccatagaatggccgggcgcctaccccaaactcatggaaattgatcagaaaaaaccactgtctgcaataataaaggaagtctgtgatgggtggtctcttgccaaccatgaatattttgcactccagcatgccgatagttcaaacttctatatcacagaaaagaaccgcaatgagataaaaaatggcactatccttcgattaaccacatctccagctcagaacgcccagcagctccatgaacgaatccagtcctcgagtatggatgccaagctggaagccctgaaggacttggccagcctctcccgggatgtcacgtttgcccaggagtttataaacctggacggtatctctctcctcacgcagatggtggagagcggcactgagcgataccagaaattgcagaagatcatgaagccttgctttggagacatgctgtccttcaccctgacggccttcgtcgagctgatggaccatggcatagtgtcctgggatacattttcggtggcgttcattaagaagatagcaagttttgtgaacaagtcagccatagacatctcgatcctgcagcggtccttggccattttggagtcgatggtgctcaatagccatgatctctaccagaaagtggcgcaggagatcaccatcggccagctcattccacacctgcaagggtcagatcaagaaatccaaacctatactattgcagtgattaatgcgcttttcctgaaggctcctgatgagaggaggcaggagatggcgaatattttggctcagaagcaactgcgttccatcattttaacacatgtcatccgagcccagcgggccatcaacaatgagatggcgcaccagctgtatgttctacaagtgctcacctttaacctcctggaagacaggatgatgaccaaaatggacccccaggaccaggctcagagggacatcatatttgaacttcgaagaattgcttttgatgctgagtctgaacctaacaacagcagtggcagcatggagaaacgcaagtccatgtacacgcgagattataagaagcttgggttcattaatcatgtcaaccctgccatggacttcacgcagactccacctgggatgttggctctggacaacatgctgtactttgccaagcaccaccaagatgcctacatccggattgtgcttgagaacagtagtcgagaagacaagcatgaatgtccctttggccgcagtagtatagagctgaccaagatgctatgtgagatcttgaaagtgggcgagttgcctagtgagacctgcaacgacttccacccgatgttcttcacccacgacagatcctttgaggagtttttctgcatctgtatccagctcctgaacaagacatggaaggaaatgagggcaacttctgaagacttcaacaaggtaatgcaggtggtgaaggagcaggttatgagagcacttacaaccaagcctagctccctggaccagttcaagagcaaactgcagaacctgagctacactgagatcctgaaaatccgccagtccgagaggatgaaccaggaagatttccagtcccgcccgattttggaactaaaggagaagattcagccagaaatcttagagctgatcaaacagcaacgcctgaaccgccttgtggaagggacctgctttaggaaactcaatgcccggcggaggcaagacaagttttggtattgtcggctttcgccaaatcacaaagtcctgcattacggagacttagaagagagtcctcagggagaagtgccccacgattccttgcaggacaaactgccggtggcagatatcaaagccgtggtgacgggaaaggactgccctcatatgaaagagaaaggtgcccttaaacaaaacaaggaggtgcttgaactcgctttctccatcttgtatgactcaaactgccaactgaacttcatcgctcctgacaagcatgagtactgtatctggacggatggactgaatgcgctactcgggaaggacatgatgagcgacctgacgcggaatgacctggacaccctgctcagcatggaaatcaagctccgcctcctggacctggaaaacatccagatccctgacgcacctccgccgattcccaaggagcccagcaactatgacttcgtctatgactgtaactga

SEQ ID NO: 2969 - DNA, 2082 bp, Homo sapiens
gggggtggagctgccagagtaaagcaaagagaaaggaagcaggcccgttggaagtggttgtgacaaccccagcaatgtggagaagcctggggcttgccctggctctctgtctcctcccatcgggaggaacagagagccaggaccaaagctccttatgtaagcaacccccagcctggagcataagagatcaagatccaatgctaaactccaatggttcagtgactgtggttgctcttcttcaagccagctgatacctgtgcatactgcaggcatctaaattagaagacctgcgagtaaaactgaagaaagaaggatattctaatatttcttatattgttgttaatcatcaaggaatctcttctcgattaaaatacacacatcttaagaataaggtttcagagcatattcctgtttatcaacaagaagaaaaccaaacagatgtctggactcttttaaatggaagcaaagatgacttcctcatatatgatagatgtggccgtcttgtatatcatcttggtttgcctttttccttcctaactttcccatatgtagaagaagccattaagattgcttactgtgaaaagaaatgtggaaactgctctctcacgactctcaaagatgaagacttttgtgaacgtgtatctttggctactgtggataaaacagttgaaactccatcgcctcattaccatcatgagcatcatcacaatcatggacatcagcaccttggcagcagtgagctttcagagaatcagcaaccaggagcaccaaatgctcctactcatcctgctcctccaggccttcatcaccaccataagcacaagggtcagcataggcagggtcacccagagaaccgagatatgccagcaagtgaagatttacaagatttacaaaagaagctctgtcgaaagagatgtataaatcaattactctgtaaattgcccacagattcagagttggctcctaggagctgatgctgccattgtcgacatctgatatttgaaaaaacagggtctgcaatcacctgacagtgtaaagaaaacctcccatctttatgtagctgacagggacttcgggcagaggagaacataactgaatcttgtcagtgacgtttgcctccagctgcctgacaaataagtcagcagcttatacccacagaagccagtgccagttgacgctgaaagaatcaggcaaaaaagtgagaatgaccttcaaactaaatatttaaaataggacatactccccaatttagtctagacacaatttcatttccagcatttttataaactaccaaattagtgaaccaaaaatagaaattagatttgtgcaaacatggagaaatctactgaattggcttccagattttaaattttatgtcatagaaatattgactcaaaccatattttttatgatggagcaactgaaaggtgattgcagcttttggttaatatgtctttttttttctttttccagtgttctatttgctttaatgagaatagaaacgtaaactatgacctaggggtttctgttggataattagcagtttagaatggaggaagaacaacaaagacatgctttccatttttttctttacttatctctcaaaacaatattactttgtcttttcaatcttctacttttaactaataaaataagtggattttgtattttaagatccagaaatacttaacacgtgaatattttgctaaaaaagcatatataactattttaaatatccatttatcttttgtatatctaagactcatcctgatttttactatcacacatgaataaagcctttgtatctttctttctctaatgttgtatcatactcttctaaaacttgagtggctgtcttaaaagatataaggggaaagataatattgtctgtctctatattgcttagtaagtatttccatagtcaatgatggtttaataggtaaaccaaaccctataaacctgacctcctttatggttaatactattaagcaagaatgcagtacagaattggatacagtacggatttgtccaaataaattcaataaaaaccctaaaaaaaaaaaaaaaaaaaaaaaaaaaaaa

SEQ ID NO: 2970 - DNA, 3654 bp, Homo sapiens; identical to SEQ ID NO: 215

SEQ ID NO: 2971 - DNA, 743 bp, Homo sapiens
agactaacccagaaacatccaattctcaaactgaagctcgcactctcgcctccagcatgaaagtctctgccgcccttctgtgcctgctgctcatagcagccaccttcattccccaagggctcgctcagccagatgcaatcaatgccccagtcacctgctgttataacttcaccaataggaagatctcagtgcagaggctcgcgagctatagaagaatcaccagcagcaagtgtcccaaagaagctgtgatcttcaagaccattgtggccaaggagatctgtgctgaccccaagcagaagtgggttcaggattccatggaccacctggacaagcaaacccaaactccgaagacttgaacactcactccacaacccaagaatctgcagctaacttattttcccctagctttccccagacaccctgttttattttattataatgaattttgtttgttgatgtgaaacattatgccttaagtaatgttaattcttatttaagttattgatgttttaagtttatctttcatggtactagtgttttttagatacagagacttggggaaattgcttttcctcttgaaccacagttctacccctgggatgttttgagggtctttgcaagaatcattaatacaaagaattttttttaacattccaatgcattgctaaaatattattgtggaaatgaatattttgtaactattacaccaaataaatatatttttgtacaaaaaaaaaaaaaaa

SEQ ID NO: 2972 - DNA, 3668 bp, Homo sapiens
gtcacttcctgccttgtgaccacacacccaggcttgacaaagctgttctgcagatcagaaagaaggggttcctggtcatacaccagtactaccaaggacagcttttttcctgcaagatctgttacctaaagcaataaaaaatggccagaggatcagtgtccgatgaggaaatgatggagctcagagaagcttttgccaaagttgatactgatggcaatggatacatcagcttcaatgagttgaatgacttgttcaaggctgcttgcttgcctttgcctgggtatagagtacgagaaattacagaaaacctgatggctacaggtgatctggaccaagatggaaggatcagctttgatgagtttatcaagattttccatggcctaaaaagcacagatgttgccaagacctttagaaaagcaatcaataagaaggaagggatttgtgcaatcggtggtacttcagagcagtctagcgttggcacccaacactcctattcagaggaagaaaagtatgcctttgtcaactggataaacaaagccctggaaaatgatcctgattgtcggcatgtcatcccaatgaacccaaacacgaatgatctctttaatgctgttggagatggcattgtcctttgtaaaatgatcaacctgtcagtgccagacacaattgatgaaagaacaatcaacaaaaagaagctaacccctttcaccattcaggaaaatctgaacttggctctgaactctgcctcagccatcgggtgccatgtggtcaacataggggctgaggacctgaaggaggggaagccttatctggtcctgggacttctgtggcaagtcatcaagattgggttgtttgctgacattgaactcagcagaaatgaagctctgattgctcttttgagagaaggtgagagcctggaggatttgatgaaactctcccctgaagagctcttgctgaggtgggctaattaccacctggaaaatgcaggctgcaacaaaattggcaacttcagtactgacatcaaggactcaaaagcttattaccacctgcttgagcaggtggctccaaaaggagatgaagaaggtgttcctgctgttgttattgacatgtcaggactgcgggagaaggatgacatccagagggcagaatgcatgctgcagcaggcggagaggctgggctgccggcagtttgtcacagccacagatgttgtccgagggaaccccaagttgaacttggcttttattgccaacctctttaacagataccctgccctgcacaaaccagagaaccaggacattgactggggggctcttgaaggtgagacgagagaagagcggacatttaggaactggatgaactccctgggtgttaaccctcgagtcaatcatttgtacagtgacttatcagatgccctggtcatcttccagctctatgaaaagatcaaagttcctgttgactggaacagagtaaacaaaccgccataccccaaactgggaggcaatatgaagaagcttgagaattgtaactacgcggtagaattggggaagaatcaagcgaagttctccctggttggcatcggtggacaagatctcaatgaaggaaaccgcactctcacactggccttgatttggcagctaatgagaaggtatacactgaatatcctcgaagaaattggtggtggccagaaggtcaatgatgacattattgtcaactgggtgaatgaaacattgagggaagcagagaaaagttcatccatctctagtttcaaggacccgaagattagtacaagtctgcctgttctggacctcatcgatgccatccaaccaggttccattaactatgaccttctgaagacagaaaatctgaatgatgatgagaaactcaacaatgcaaaatatgccatctctatggcccgaaaaattggagcaagagtgtatgccctgccagaagacctggttgaagtgaaccccaaaatggtcatgaccgtgtttgcctgcctcatggggaaaggaatgaagagggtgtgaggcccaatggggctgggtgggaggcggtgcactcactcctgactgcccggcacagatgctccagggatgattcaagccattccaaagttcaacttggtgacactctataagattccaaaaagcacatattagtgcagccaagtagcctctcctgtatttaacaaaaagtgcttcattctttgcaggaggcccaacctcctatatataggtttctattcttgatttatttgcttcttcgaaaatctagaggaaaagaaagaagttattttccaggtacccttctcgcttttgccattagccaaggatagaagctgcagtggtattaattttgatataatctttcaaaccagcttcatgtggcttcccttttctttgttcaagatgagggccaggaggggaaacatcacacctgccctaaaccctgttcctggaggtcagcatttgatctgttgcaagcccctctttctgtcccctcttcctaccctgcctcccatgactttgctcctcacacttttggaaccatgccttccgggggggcccatctcttctggccgtccttgtctctgggccacttggagtgtgtgataaatcagtcaagctgttgaagtctcaggagtctctggtagcctgcagaagtaagcctcatcatcagagcctttcctcaaaactggagtcccaaatgtcatcaggttttgttttttttcagccactaagaacccctctgcttttaactctagaatttgggcttggaccagatctaacatcttgaatactctgccctctagagccttcagccttaatggaaggttggatccaaggagggtgtaatggagcatcaagccactcggcggcagcatggagctataactaagcatcctttagggttctgcctctccaggcatttagccctcacattagatctagttactgtggtatggctaatacctgtcaacatttggaggcaatcctaccttgcttttgcttctagagcttagcatatctgattgttgtcaggccatattatcaatgtttacttttttggtactataaaagctttctgccacccctaaactccaggggggaaaatatgtgccaatcaatagcacccctactcacatacacacacacctagccagctgtcaagggcagaatgaatctatgctggataagaaatggtggaactgcgttatgaagagctaatttactggacaaagaattccaaagcaaaaccagaacagtatgaatttgagcaggtctcataggttgagcaatttccccctaaaccaactgaaggctaaaaagcaacaggccattgtgaaccaatgcaagacgccctctatcatggtgaaaagctccatcaatgaggtatcttctttagtggtggtatgtaatggaacttagccatttttcaaagcaattgaaatgcattgctctggatctgttccttggcagtggactcagaaagccaacatgtggctcctcccagcccataaccagtatttttgctgcttctgaatacaaattggttggttttgacttcagattgaacttactgtagcctcagatgatttcccccctccgcctccaggaagaaagaatgttactgccttaataaaaaaaaaaaaaaaaaaaaaaaaaaaaaaa

SEQ ID NO: 2973 - DNA, 2423 bp, Homo sapiens; identical to SEQ ID NO: 1443

SEQ ID NO: 2974 - DNA, 1852 bp, Homo sapiens
acagtctcgagggaagagggtctggtggaaggagatgacgccgtctctcagcgctgaggaaaacagaatgtataataagatgtggcatcagacccaagaagccctcggtgctttactcgataaagagcctcagaagatgattgaaccacaaagaaatcaggttttcatctttcaaacattagccaccttctacgtaaagtatgtgcagatctttagaaacctagagaatgtctacgaccagttcgtccacccccagaaacgaatactgatcaggaaagtcctggacggggtgatgggccgcatcctggagctgaagaacgagatggtggagctggaactcacggagttccattatttcgatgatatcctgcaggatctcaagctggccccccaacaattagatattcccatacccaagtattttttaaaggagaagttggaagtaataaaaggaagagagaaaattcttgctcaaatattagcggacagcggaatagatacatctgacatgaaataccctgtaaagagtatccctttcgatgaggctgttaaattaatccagattgctgagagggcacggcaaggtcgcctaagggctttattcatgaagcaaatctatctgcaagaatatagagcaaagcaatccaagatacttggcaagaaagtgacagatacctgggctgctgcactccgcattcagaaggtttggcgacgtttccatcaacgtaaggaaactgaaaaactgagagaagaggagatgatcttcctgggtatgaatccacctcctctctttaatgaagtcggtgctacagtaatccaggctgaaaaggtggaccgcctgcggaatgaggtgcagataaagcatgaagaggactacagggaagccctggttaccatcaagaatgacctaaagttgatagaaggcgtggatatcaaggagaaccttcaagaccagatccggcattggttcatcgaatgcagaaatttaaccgggacatttcctgactaccctgacgttgaagaaggagggtcagctattattttttctgacaagaccatacaacaggttattgaggatatcatagcaaaccaagaggaagaagaaaaaaacaaaaagaagaagaagaaaaaggaaaaacaacccaagaaagccaaaaaacaaaagaaaggaacaaaggagaaaaataaggaagaagacgaaaaatggaaaatgtcaccaagtctttttcttcctgcaatgaaggaaggatgtaacgcatacaaagaaatctggatgaaaaaagatgagtcttggaatttctctcaggactatgatccagaactgatcaaagaggagaaacgaaaagaattacagtcagagatcaggatacaggttgatgagttgatgagacaggaacttaaaaacttaaagctagctgtggacagagaaagggagcgcccagtgaaagcaggaaagaaaaaggacaagaagaaaggaaagaaaggcaaaaagaaagagaagaaggcaaagaaggataaagatctgacagctgacaggaccatcgagtctctgtataaggaactggtggaagaaggattactgatccaggctctgaaagtcaacctcactcttgacaccctccacagtctttccaagttggactcttcctctcatcagtactagttgtcaaatttaaaatgtgacagttaaagaatattctagtttgacaattagtaagcaatgagtatatcatcagtacactagctttttattaatccatgtacactgtatagtatcttgcatctattttaataaattaattctttgctctagtaatagattttatataatgaaataaaggtgttgtccttg

SEQ ID NO: 2975 - DNA, 1807 bp, Homo sapiens
atctccgcgcacagtggtggccaccgcgactggtgctgaagtgtcggcgtgtgccgggcgctccgccgggacccgggttgctcgccctgagtctcagctttctcatctgtacggttgggacaagtacagtaaccctcgcccgtcaagacgggccagggctgtggcgagggtccacgccttagagcaggcacctatcttgtgcagggccctgagatggggtctgactcagttcctgcggggaacttcaccagtgacccagtcagtgcccttcagttaaagaccaccaggagcacacttatatcatggaaatcaggacagtggcagttcggattgtggcaatcaaaggggtggaaagtgaattctatcttgcaatgaacgaggaaggaaaactctatgcaaaggtattgataattgatagcttaggcttaatttttaaaactcatttttgttgaaatatctcaccattctgaaaagtaaacatggacttaatctatctccaactgtataatttaatgattttattaaaacactttatactcaaatgttaagaaaaaatgttttctgtgtgactttggacaaatggcttgttctttggattctggtttcttcatctgtaaaatgagttgaattagctgacctctaaggagccttccagctctaacattccatgtgcattttagatatttaaaatccaaaatttccatttgccagtattaaagctctttttgctaaagttcacccaatttgcacgttgctgacatgaaaattcttgggaaaaaatcttgaaatgtttagttcattcatcaacatcaatctcacaatcatgggctttgaactgtaattattcacattgttcccacttcactacaatgcaaaatatgtaacagttcatcccactgtaataaaatataattggctttcctttgtattcccacagctcagcataatgcctggaacaggctaattatataatgatacaggtttaattgaatgaacaaatggttgcatggatgaacaaacaaattaaccttttatcttccattaccactgaagacagtgtacaagtaaataaagaaaagttgtgaaacaagtctctcacctgagggaggcagaggttctgctaattctaccaaatttccagtggttaaagaatgagtgatgtgggaagagtaatttgaggcctgttacttagggggaaataggtcctaattttaaagaatagttgacatgaacttccaaaaagctacacatatttcacactagctgtgcattatgtggtgtctttatttcaaatttaagatacctttttatgcaaatatactacataagtctagctaataaaccacattaggcctgctcaatctgagggttaaaaaaagttgtgtatgtttcaattctaccaaatattgctgcttactcttcgtttaattgagcctctctaaaaatcatttggataatgtttgtgtgtttgtttgtttgtttgaacagaaagaatgcaatgaagattgtaacttcaaagaactaattctggaaaaccattacaacacatatgcagcagctaaatggacacacaatggaggggaaatgtttgttgccttaaatcaaaaggggattcctgtaagaggaaaaaaaacgaagaaagaacaaaaaacagcccactttcttcctatggcaataacttaattgcatatggtatataaagaaccagttccagtagggagatttctttaagtggactgttttctttcttctcaaaattttctttccttttattttttagtaatcaagaaaggctggaaaactactg

SEQ ID NO: 2976 - DNA, 1971 bp, Homo sapiens
aattttagctgggattatgctgtgattatgtttggcttaacagtaatgaaaataagtttaggctgggtgcggtggctcatgcctgtaatcccagcactttaggaggctgaggcaagcggatcacctgaggtcaggggttcgagacaagcctgaccaagatggagaaaccccgtctctaccaaaaatacaaaattagccgggtgtggtggcgtctgcctgtaatcccagctactcgggaagcggaggacaatcgcttgaacccagaaggcagaggttgtggtgagccgagatctcgccattgcactccagcctggacaacaacagcgaaacttcatctcaaaacaataataagtttacaacctctgaatatgtaccaaatggagccaggggtggggagtattaggacaagccccgcactgcagagccccccagctctcactcgtggaccaagtgcatgggacacagccattcggaaagctctttcttttggagtgggactgggtgttctggttttggtttgcttgttttatcattttgtgacattggcgcctattcttcagtttgcatccctgccttgcttgcttgaagctggagcacaaatgtcccgtcaccctgtaacaacacaagtatgcatcatgcctgcgaggcttagcttgggaagtggaatctccaggaatctccttcggttgtctgtctgccactttacactgttgctcccatttcggtcactgaggccctgtcccttatcctccagggacatggtgctgtcctatgagctctggctcctttgtgacttttacattgctcctccagatagcagtggcagtggcatttgcaaaaaggctatttgagaacaaataagaaaaaatcttcaaagcgaagatgatagtaaaacagccctcatttttcaaagtccattcttttttctggtccgtgcactgccagctcacttctctggctaaaacccgggggcggcgggggtgtgtgtgggggttagttttgcaaaaagtactgatggcaccgctgtgctccaagttaaccagaacacaagaatcgaaaaagcctgtgagatactggtgctcgtgatcgtaagctccaggtcggggggttttcagatgaacacaaaaagggggctgctcccgtcccaagatgagtgataaatgagtcacttctcatactcgcactcacactcgctccatttcctctgggatgactgtcttccgtcctaccgctgtggctgctgttatttgcctgataaacttctttccctctccctccctctgacacagaaacacacacacacacacacacacagacacacacacacacacacagcccgctggatctataagcagtttgtaacaggatgcaccagttctaatcacgtttcaagtcaaatgaaccagtcgcagcttcctaataagtgaatggctgacataaggagttaattcagaagcagctcaatactatggacaatactagtggacaatattagcatactgctcgtacaacaaagataccgtagtctctggtgctgcctcttcaggacgaatttgctgaaagtgagttgtaattagagatgttaaaaaaaaacattggctgcgcgcgatggcttactcctgtaatcccagcacttttggaggcgaggcaggtggatgacctgaggttaggagttcgagaccagcctggctaacatggcaaaaccccatctctactaaaaatacaaaaaattagccaggcatcgtggtgggcacctgtaatctcagctacttgggaggctgaggccgaagaatttcttgaacctgggaggtggaggttgcagtgacccgagatcatgccattgcactccagcctgggcaacaagagtgaaattgtgtctcaaataataataataataataataaactgagatttatcattcctcctctctccttttccttgagaacttaataaaaatggaaaatatccatt

SEQ ID NO: 2977 - DNA, 3024 bp, Homo sapiens
gctcttccagaggcaagaccaaccaagatgaggtgggtccacagctttccctcctgcctttcctctggttctttatttcagtcttttttgcatacatcggtagagatgcagaaatagaacaaagaaacgggcaaatgggctaaattatagtgaaccaaagggcttagtgtgttaaatcttctccttttctgcatccatagaagacagtgctgctgtctttcccaggagataagatttactctcaggagtgtctttttccttcaggttacacttttgactttatagggtatgtcatcagctcccgtggtaggcttcctggcatcctgagtatatttattagcagatattttcctctttaaaaatgtacaataaggaagactaatagtaacacatttgaatgacacaattaattgactagtacctgggatacacactaatacctgggatacatctaattaaggcacttagatcttataaaaataaacactttttgaaatgttgaaataataagactagaaactttttttttttttgagatggagtctcgctttgtcaccaggctgcagtgcagtggcatgatctcggctcactgcaacctccacctcccaggttcaagtgattctcctgcctcagcctcccaggtagctgggactacaggcgtgcgccactatgcccacctaatttttgtatttttagtagagacgggctttcaccatgttggccaggatgacctcgatctcttgacctcgtgatctgcctgccttggcctcccaaagtgctgggattacaggcatgagccaccgtgtctggcctagaaactattttaatagaagcaagtagtgcccgaatggttggcatttgttagtgagatggtgaactggcagacggcacctgtgggtcaatgcccatggccaccgtcctgcttttggacaccagttctcttccaggtaaccttctggcattttggggtttcagataccatttcctaaaggtgaattattataaaatactagaaatacccacgtgtttaaaattatatatttaaggaaccttttattacggaaaatatcaagaagtagaggaatagcacagtaagcccaaagttcccatctctgagttatctacattttattaccactatctttgcggtgtctgagggaggtttctctttcctggagggctcctgtattattgccaatgtactttcctgaatgcagccagaaactgagcccacccctccacctatgtgcctttctatccctctctgaagcttctgcagaattcccagcaggacagggcttgctggaagcttggtatgctcagaagctgctaaagtgtgtatgggcaggtgtgggggcaatttcttggtcctagcacttccatatatcgactttcttttctggctgctaagtgggaggagtgtgtgtgtatgcatgtgtgtgtgtgtgtgtgtacatgcatgtgtgtgtggatgcatgcatgtgctgtgaagcagggagactagctttccactcctccttgtcttctctctgcagtgccctgggagctgtcattgccctcctgctctggggacagctttttgcagtggactcaggcaatgatgtcacggatatcgcaggtcagtctttggttgggtaggagtgtgcatcccactctgaccctctcgggtctgcactctctctgagaacacccaattcccccttcttatctcgacctctgggctttcaggaccataaagaacattggggttcctgccagaaatgaggggagcttgcctttccattggcttctattcggggtggaaggagattgatgtgcagagcagctcccgctcatctgacttttcacggttcactgggaacaatttccaaatagcaaactctctggcttctctctctttgcagatgacggctgcccgaagccccccgagattgcacatggctatgtggagcactcggttcgctaccagtgtaaggactactacaaactgcgcacagaaggagatggagtgtacaccttaaacaatgagaagcagtggataaataaggctgttggagataaacttcctgaatgtgaagcagtatgtgggaagcccaagaatccggcaaacccagtgcagcggatcctgggtggacacctggatgccaaaggcagctttccctggcaggctaagatggtttcccaccataatctcaccacaggtgccacgctgatcaatgaacaatggctgctgaccacggctaaaaatctcttcctgaaccattcagaaaatgcaacagcgaaagacattgcccctactttaacactctatgtggggaaaaagcagcttgtagagattgagaaggttgttctacaccctaactactcccaggtagatattgggctcatcaaactcaaacagaaggtgtctgttaatgagagagtgatgcccatctgcctaccttcaaaggattatgcagaagtagggcgtgtgggttatgtttctggctgggggcgaaatgccaattttaaatttactgaccatctgaagtatgtcatgctgcctgtggctgaccaagaccaatgcataaggcattatgaaggcagcacagtccccgaaaagaagacaccgaagagccctgtaggggtgcagcccatactgaatgaacacaccttctgtgctggcatgtctaagtaccaagaagacacctgctatggcgatgcgggcagtgcctttgccgttcacgacctggaggaggacacctggtatgcgactggggtcttaagctttgataagagctgtgctgtggctgagtatggtgtgtatgtgaaggtgacttccatccaggactgggttcggaagaccatagctgagaactaatgcaaggctggccggaagcccttgcctgaaagcaagatttcagcctggaagagggcaaagtggacgggagtggacaggagtggatgcgataagatgtggtttgaagctgatgggtgccagccctgcattgctgagtcaatcaataaagagctttcttttgaccc

SEQ ID NO: 2978 - DNA, 2436 bp, Homo sapiens
agtagcgcagcgagaaggatcgccatcacacggcgcactggtgcggcttctcccccgagtggatgaacatgtgcttggtgtcgtttttccttgagctgaacgtcttgcaacagtggccgcacgcatagctgccccagatcccggaagaaaatctctcccacaccactgtagtcagagaggccagtgggtgcatggaactcctcgcacgcgctgtcagcagcagcagtgaggaagccggcagcacagtctgggaaggaaggaggtgcttggctctctcccgggccgccaccttcgccgtcctcgccatcggtctcatcgtcagtttcctcgtcatcgttgtcacctcggtcgtcaggggccgcggacagtgaggggtaggcaccaagcccctcggctttggcaggtgtcgggggcgcaggcagctgcaaactcgcgggccggcgctgcttaccgctgtgcgcggcaccggggtgccccgggggtgcgcagccagcaggtggcgcaggcggtgacgcagctgctcaggtgcgagtggcgggggcacaggggtgggcaggggcgcgggtgcagaggtgctcgcgggtgcagaggagcgcgtgcgataatctgcgtgcattcgtcgataactgtctatgcgaagcaccgacgcagccatgagtacctgcggggcttcactctgtgccacaacgagcgaaccgctgtacaggagctcgactagctgtcgcaccgtctgcacaggcaccaccgaaggcacacggatctcagaggggccgagcagcagcttgtcttggaaggagggcgagccgattgccagcccgcagcggtgcgcacgcagcgaagcttcatgaatgcacacagtcacgtcgcagaagtgcccacccagcttttgcccattgagggtctcaagcagagagcgtgagaagttctgcagatgtatgtggcgcacagcctctacagccgccgactccgactcctcttcaggcaccaggcctggccgtggccgccttctcaccgactccaaggcagcacttccgggcgcttctctttatttttatacagttttattgagatataatttacatgctatccagcccatctatttcaagtgtaccatgcaaggggtttgtatatattcacagagttgtgtatccatcaccatcgttttagaacattcatcactccagaagaaactacctacccatcagcagccactgcccatttccctgatctgccccgccctaggaaatccgtaatcactttcagtctatggatttgcctattctagaccattcatataaatgaagtcacacaacactgggtcttatgtgactggcttctatcaaagtttgcaaggttcatttatgttcatgctgatgatataaactggctcatttgatgccaagactgaccatcaccaccataccaaggtcatcactgatcagaggcctaacccaaggagggggtcatgtgcagacccagctgtggggaggaaagatgctgcagaggagacggatgcccacagaggcccctgagtggatacaatgctcactaagtgggctgaccccacattggacaccgctgcatccatgtccatcacacaacacagctgccgtttcttctgcctgcttatgggaaagtcccctcttctcctccgttttcttctcttcctgccctatcacaccgtgcacttctccctttccttaaagaaccaccatcaactttaggaggagggaaaggggtggctctggcaggaaaagccagaatcccctctagccagcagagagagagaggaatggctgcatgttttctcccccagtccaaggcactgggtcttggctgggttgaaggttccaagctgctctcctgctgtgtcggtgagttctggtcaacctgcaacctcctgatatggccattgcagttcatcgagtcttcagggactccccatggcctggagtactttgccttgcttacacgggagaggagaatggatttatagagaacatcatctaaatccaacttgaccattgtgtggccacacttgctagattgctatagtctaaatctagcattgtagaaagacgggggagcttggagctgcacaaacccaggtctggaactggctccttaccttggaaggtgaatgatcctgccaggactcttagcctccctgggtctcaatttccttatctgtttcatgggaatgaggatctctgctgggtggttgggtgatgtgggggctgtgtgaaaacagcttgtcaatacaagccaaaatagaaatatttctccacagagtatgaaggtcaaatgagagaatacatttaaattaaatggaaaattaaaatggtaaaaaatgcaaagctgtattgaaagttccgagcttctctataaggagctttttgactatggaagaatcctgtactcgttccccctaaatat

SEQ ID NO: 2979 - DNA, 2191 bp, Homo sapiens
ggtcccggccttgcggcctgcgggggaggctgcccggaggaggcagcggcggcggcagcgcgtcctcggtccccaggaccacggcttctttcctgccagagcgactctaccttggaaaccagggattccccttcccgtcgcccgccccatttgatatatgggcctgaaatgtatgccatcccatcaccatcggactggactgttcacagcactggagagacagaggtccttcattcactccaggtcacaggctgtgcgtgtgcatgccgaacacccacatgcacacagttggtggctcagtctgatgtacctgacttctcacgccttcccccagtcctccagtaccgtgcctctacatgggctgggcagccccaaactgaaatgtgagtgccagagtgcatcctttaagcgaggtctgccccacggacacccgctccctctgtgtccctgttttgacagatctatccatctggccatccatccgtgggggtctgcaatggccacctttagccgccaggaatttttccagcagctactgcaaggctgtctcctgcctactgcccagcagggccttgaccagatctggctgctccttgccatctgcctcgcctgccgcctcctctggaggctcgggttgccatcctacctgaagcatgcaagcaccgtggcaggcgggttcttcagcctctaccacttcttccagctgcacatggtttgggtcgtgctgctcagcctcctgtgctacctcgtgctgttcctctgccgacattcctcccatcgaggcgtcttcctatccgtcaccatcctcatctacctactcatgggtgagatgcacatggtagacaccgtgacatggcacaagatgcgaggcaccacacataggggcacagatgattgtggccatgaaggcagtgtctctgggcttcgacctggaccggggcgaggtgggtacggtgccctcgccagtggagttcatgggctacctctacttcgtgggcaccatcgtcttcgggccctggatatccttccacagctacctacaagctgtccaaggccgcccactgagctgccggtggctgcagaaggtggcccggagcctggcactggccctgctgtgccttgtgctgtccacttgcgtgggcccctacctcttcccgtacttcatccccctcaacggtgaccgcctccttcgcaagtggctgcgagcctacgagagtgctgtctccttccacttcagcaactattttgtgggctttctttccgaggccacggccacgttggcgggggctggctttaccgaggagaaggatcacctggaatgggacctgacggtgtccaagccactgaatgtggagctgcctcggtcaatggtggaagttgtcacaagctggaacctgcccatgtcttattggctaaataactatgttttcaagaatgctctccgcctggggaccttctcggctgtgctggtcacctatgcagccagcgccctcctacatggcttcagtttccacctggctgcggtcctgctgtccctggcttttatcacttacgtggagcatgtcctccggaagcgcctggctcggatcctcagtgcctgtgtcttgtcaaagcggtgcccgccagactgttcgcaccagcatcgcttgggcctgggggtgcgagccttaaacttgctctttggagctctggccatcttccacctggcctacctgggctccctgtttgatgtcgatgtggatgacaccacagaggagcagggctacggcatggcatacactgtccacaagtggtcagagctcagctgggccagtcactgggtcacttttggatgctggatcttctaccgtctcataggctgaggcacatctgtggaccctcataaccctcttaagacccctctcagggtgccactgatgggggatgagggaaggccctctctctactccttgaccccctccatccttgacccccaacacctcaacacacacacacacacacacacacaaaatcacaccattttcatgcctgtcaatccccaccccaccacaaggcaggaagggggtggtgcctgctggggcctagagggggatgcttggggaaacagagaaggggagatccagggcctccccgccttccttcttcctttttatatacaatttgttattgtcaaataaaagtaggaaatatt

SEQ ID NO: 2980 - DNA, 2172 bp, Homo sapiens
aaaaagcttcttccatatggagggaccgggtgcgctgggcgcggcgtcccctgcgttgtcctcctgctgccgcccccgcggccgccgctttctgccgcggggaccctgagccccggcccgccggtgtcagccgccgcgcgcgcgcacagacacacacacagagacacacaaacacacacagaaaagacacacacgcgcacacacggcgcgcacaccctcacgcccgccacagccacaacacgcccgcacgcgccctccctctccggcccgcaacttctcggtcctcggctcctttgttgctccagccgcggccgctcgcccgtgttgtgtgtccccggtgtcaccgagcgtgttgtgtgtccgtgcggcgcggcgctgtgtggctccctcgcgcccaccacgctggcccccgggccccggctcgcccttcccaggcgccggctgcagcagagtttcagaacaagcttcctggaacccatgacccatgaagtcttgtcgacattcataccgtctgagggtagcagctcgaaagtagaagaagtggagtgttgccagggacggcagtatctctttgtgtgaccctggcggcttatgggacgttggcttcagacctttgtgatacaccatgctgcgtgggacgatgacggcgtggagaggaatgaggcctgaggtcacactggcttgcctcctcctagccacagcaggctgctttgctgacttgaacgaggtccctcaggtcaccgtccagcctgcgtccaccgtccagaagcccggaggcactgtgatcttgggctgcgtggtggaacctccaaggatgaatgtaacctggcgcctgaatggaaaggagctgaatggctcggatgatgctctgggtgtcctcatcacccacgggaccctcgtcatcactgcccttaacaaccacactgtgggacggtaccagtgtgtggcccggatgcctgcgggggctgtggccagcgtgccagccactgtgacactagccagtgagtctgctcctttgcctccctgccatggtgcggtccctcctcatctctcccaccctgaagcccccaccattcatgctgcctcttgttactcttagcataaaatgggccttaactgcagaaatgtcaaatcagaacagtagctgcctagtaatgcccagtgatgggggacccttgtgcccttggaaaacctcactccaagtagaggctgtatctggagtgagtgtctacagagaggggaattggtcagtgcatggcagaacttgacatggcagaactgttccgtgggccccagagcagggccgtgccgtgccttcctacttggtcatcctgtggctgtaggtgcactgtcccaactgctcacacaccttccagtcccctccctccattctcaccacagttacagtcggagcagggagagacaggacaccaagagacatgggcagggccacgtgtagtctggacagagcccacccagcccagacttggcctcctgtctctctgtgaggggcaagcatagtccgaaggcctggattataaatattagaacataatgaaaaggaaactgtgtggcaaagggataaagggatacagagaaaagaaacaaggaagagatgaggtgacagtttggaccaaggaaaatgccaagagaagacttcacactacctttttttttctggttttgccattcttttattcatgttgttacactcagtataggatagtttattaaaatcattatgtctgtagacattctatttgtgatatagaaattgtgttatttctgacctctattttttcctattatgtgacaaagaacataggtcctcagaccaacatgtggaaaccaagggccaaatggcttctaaggtccctcccaactgaataattctggtaaattccatttccatgtgctcactgacggatggtcctaataaccgctcttatttcttttatgcttgtgaaagtcatagtttttacaaaattacttgagggtgtattataaagattcaacagagcaaagtaaaggccaagtgacttgacatagtcatagctggaagaggagccttaccaagacaggtgtttctagttgccattatacttattctaccttatgaggacccattgtatgaggctagatggaagtgagtaaacagacgtcctacctttg

SEQ ID NO: 2981 - DNA, 3134 bp, Homo sapiens
aaggaccaggacgccggggttccaggagactctgcaggctccatccctccttattcccccaccccgaccccagtagcgctgggcctaggagcactcgggagttgctcagtggctctgcaccgctggcgcgggaaggggagaaaggggctgccagaggcgggaatttggtccccacgcgctgctccagggacgagaagccagggaccggcggttctgggagcagctgtgctggatgccctggaggaacaaggaggcctccagtccctcttctgctaatccccccttggaagccctccagagccccagcttcagaggcaacatggcggacaagctgaaggaccccagcaccctgggcttcctggaggcggccgtgaagatcagccacacgtccccagatatcccagctgaggtgcagatgtcggtcaaggagcacatcatgcgtcacacccggctgcagcggcaaactacagagccagcgtcatccaccaggcacacgtccttcaagcgccacctgccaaggcagatgcatgtctccagtgtagactatggcaatgagcttccaccagcagcagagcagcccaccagcattggccgcatcaagcctgagctctacaagcagaagtcggtggatggggaggatgccaagtctgaggccaccaagagctgcgggaagatcaacttcagcctacgctacgattacgagaccgagaccctgattgtgcgtatcctgaaggcttttgacctccctgccaaggacttttgtggaagctctgacccttatgtcaagatctacctcctgcctgaccgcaaatgcaagctgcagacccgggtgcaccgcaagaccctgaaccccacctttgatgagaacttccacttccctgtgccctatgaggagctggctgaccgcaagctgcatctcagtgtcttcgactttgaccgcttctcccgccatgacatgattggcgaggtcatcctggacaacctctttgaggcctctgacctgtctcgggaaacctccatctggaaggatatccaatatgccacaagtgaaagcgtggacttgggagagatcatgttctccctttgctacctgcccactgcaggcaggctcaccctcacagtgattaagtgtcggaacctcaaggcgatggacatcacaggctattcagatccctatgtgaaagtgtccttgctctgtgatgggcggaggctgaagaagaagaaaacaaccataaagaaaaacactctcaatcctgtctacaatgaggccatcatctttgacattcccccggaaaacatggatcaagtcagcctgctcatctcagtcatggactatgatcgagtgggccacaatgagatcataggagtctgtcgtgtggggatcactgctgaaggcctgggaagggaccactggaacgagatgctggcatacccccggaagcccatcgcacactggcactccttggtggaggtaaagaaatccttcaaagagggaaaccctcggttgtgatttcattcacgtggatgctgcaagcagagagactgccacctggagttaggatggcagggccgagctgctagcttcgacagtgagagctcgtgcccatctccgaaaccacttccaacaccatgagatgtgcagccaaataacacaaatgggactcagcaatgttctctttgcacttgttcaaccgtctaaacagtgttgtgcagtcgcagtggcggcagcagcggcagccgtccgtcactccagagtcttacctgctcctgtgtaggtcaaagctgagacacttgtcatgtggtcagatctgtcttagtcttttgtgtctcccaaggtgatgtttttgtggtttttcactttttatgagtctgctggtaagaaaagggaaaaaaaaaaaagagtaggaaaagacaaagggtggaaagcccagaagttggttctagaaaatacaaggtacagttttttggaaagaggtggattgagtttctgaaatgctgcgtctccagcaagctccacaaccctggaaaaggaggaggcgtggtgggactgcggctgcattttcagtgccctgcaggaatggggtgaatccatggaagagcctttgtgaggtgaattactagtctttgaagctcttcgctggcaggacataaaccacgctgggaccctcagtcccgtgttgaaatcacaagacctctgaggcgcttgtgagccttcagctgatgtgcagggttcctcgctccccttcctcgctggctttccccatgaattgaaaacgtcttgattcctcatgggaacttagtcactttctttaggaatgattcagttcagccgaaactaaacacgccatatgttttccgatgcgccacagttaatgatcacatttgtttgaaaacaggatctttgtcctcagaaataatcttgattgtaaagtaagagagaaacatatgttctggaatgatttctgcattatacatagctttataattccatgaagtatcaagctgctgtttaaaatgcctaaacagattaaagaaaaacctagattaaatgttcttttccaaatggggagttttgaaatccaaatagcagtttgagtccatctttctatgaagagtatgtttttgattgaaaccgagtcagcgtaagcctatttcagcccctttggctctttgacaatattcatcttaaactttagttctataaattactaagtacttcagtgttgtttgtttcagtggttgtgagggtttcttgtttcctttagatctttaccttaggccaaactcagtttaggaaaaaaaaaattgtttgaactattctgtgttgtaatagcacatttctgttgagttaatagtggtcttcccaccaacccctaaaaccaggttgatttgctcaatctcagtttgtataaccccagtaagcgcatggaggtgagtttctacttcgacttgtggcgacacagtgccagtttcctgagctgtgtgtactacttgcaagaggcaagtctgctgaagaaccccttcttttaacagtggaaaatcaagaacagaaaatctgttcacacacctgtgtcttattctttatatatgctacatggtagaggagcagcgaccaataaagtatccctcatttt

SEQ ID NO: 2982 - DNA, 2864 bp, Homo sapiens
ggtcgctggcgcctgtttcctcagagccactttttcctttgtgttgtctggtcgttcactactttgagggaaaagaattttgccgttcgcgttcgattgactccgtccccaagatcctgtagccccacggacctggcgactccaccgtgttcgggtctttctaggaacccaatctgccttcatgaagaaaagacagaggcagaaaggaagatggcttactgcctgacaaattgttatcagtactccgtgacctttgaggatacagctgtggacttcacccaggaggagtggattttactggacccagttcagagaaacttatacagagatgtgatgctggagaattatgagaacgtggccaaagtaggatttcagctctttaaacccagtgtcatctcttggttggaagaagaagagttgagaaccttgcagcaaggagttctccaagactgggcaataaaacatcaaaccagtgtttcagcactgcagcaggagttttggaaaatacaaacttctaatgggatacaaatggacctggtaacctttgacagtgtggctgtggagttcacccaggaagagtggactttactggacccagctcagagaaacctgtacagtgatgtgatgctggagaactacaagaacctgtcctcagtaggttaccagctcttcaaacccagtctgatctcttggctggaggaagaggaagagttgagcacactgccaagagttctccaagaatggaaaatgtgcctgaaaaccaaagggccagccctttggcaagataatttttgtttaaaaacattaaatgggatacagttggcaagaaaccaaaatggagaggaactctatgactgtaagcaatgtgaagatgtcttctgtaaacatccatgccttaagaccaacatgagtactcaaaatagaggcaacacgtctgaatgtattcagtatgcaaaagacctcctttctctatacaataaaacctctaccataaggaaagtttctgtgttcagtaagcatggaaaatctttccgcctgattttaaatgttcaggtccagagaaagtgtacacaagataaatcctttgaaggcactgactatgggaaagccttcatttatcagtcataccttgaagcacacaggaaaactcagagtggagaaaaactcaatgaatggaagcaatgtggggaagcatttactcactccacaagccatgctgtaaatgttgaaacacacattattaaaaacccctatgaatgtaaggaatgtggaaaagattttagataccctacccaccttaataatcacatgcaaacccacattgggataaaaccttataaatgtaagcactgtggcaaaaccttcactgtgccgtcaggctttcttgaacatgtacgaactcacactggagagaagccctatgggtgtaaggaatgtggtaaagcctttggtacatctgcaggccttattgaacatataagatgtcacgccagagagaaaacctttaaatgtgaccactgtgggaaagcctttatttcttacccatctctttttggacatttgagagttcataatggagagaagccatatgagcataaggaatatgggaaggcctttggtacatcctcaggtattattgaagatagaagaagtaacacaggacagaaacgctttgattgtgaccagtgtgggaaagtctttgtttctttctcatctctttttgctcatttgagaactcacactggtgagaagccctttaagtgttacaaatgtgggaaaccatttacctcttctgcctgtcttcgtattcacatgcgaactcacacagaagagagactctatcaatgtaagaaatgtggtaaagctttcactaagtgctcatatcttaccaaacatttacgaacacacgctggagagaaaccctatgaatgtatgaaatgtgggaaagccttcactgagcgctcataccttactaaacatttacgaagacacagtggagagaagccatatgaatgtaagaaatgtggaaaagccttcacagaacgctcagatcttactaaacatttacgaagacacactggagataagccctatgaatataaggactgtgggaaagcctttgttgtctcctccagtctagttgatcatttaagaactcacactggatataaaccctataaatgtaatgcatgtgaaaaggcttacagtaggtcttgtgtactaactcaacacttaaaaactcatgcagcagagaagacctctgaatgtaacgcatgtggaaattcctttcgaaattccatgtgctttcatgatcgcttaaaaactctcaccaaaataaaaccctataaatgtaaggactgtgggaaagccttcacttgtcattcagatcttactaatcatgtgcgaattcacactggagagaagccctataaatgtaaggaatgtgggaaggccttccgtacatcctcaggacgtattcaacatttaagaactcatatgggagagaaaccctttgaatgtgaccagtgtgggaaagcctttgcttctttctcagctcgtattgcacatttgaaaacacactagagagaagccctgtggatgtgaagaatgtggaaaaacctttgctgtttcctcaagcctaactgaacatgtaaaaattcacaggagaaagtaacactatcaatgtaaggaatgtgagaaagcctgaacagttgaatctttctagatatgtacaaactcacactgtagagaaaccctgtaaatgtaagggatgtaggaaaacactagttcttctctctctcttttttttttttgatgagtctcgctctgcactccagcctggcgactgagtgagactccatctc

SEQ ID NO: 2983 - DNA, 2112 bp, Homo sapiens
aggctgcccggaggaggcagcggcggcggcagcgcgtcctcggtccccaggaccacggcttctttcctgccagatctatccatctggccatccatccgtgggggtctgcaatggccacctttagccgccaggaatttttccagcagctactgcaaggctgtctcctgcctactgcccagcagggccttgaccagatctggctgctccttgccatctgcctcgcctgccgcctcctctggaggctcgctgcacatggtttgggtcgtgctgctcagcctcctgtgctacctcgtgctgttcctctgccgacattcctcccatcgaggcgtcttcctatccgtcaccatcctcatctacctactcatgggtgagatgcacatggtagacaccgtgacatggcacaagatgcgaggtaggtagccctgcccctctcacctgcccaacccccctgccccactcctcgtctcctaactgcccccaccctgtgcctttcctctcctgcttttctccctcacctgcccaccccactggacgtgcagacctcacattactcttgggtccgtgtctctttccaccgtgcattttcccgaagtctgtctgtctcgtgtcatgtatgtgcctgactctctggagtaagggcatctatctgtcctgggcttccttgcccacctgcctatctgtcccatgcccacctatccatccttgtgcccgcttttcctaccacatctcacctggtgcacctcctccttgccatgctgatctgctctctgcccatccacttgaccatgggcgccacacataggggcacagatgattgtggccatgaaggcagtgtctctgggcttcgacctggaccggggcgaggtgggtacggtgccctcgccagtggagttcatgggctacctctacttcgtgggcaccatcgtcttcgggccctggatatccttccacagctacctacaagctgtccaaggccgcccactgagctgccggtggctgcagaaggtggcccggagcctggcactggccctgctgtgccttgtgctgtccacttgcgtgggcccctacctcttcccgtacttcatccccctcaacggtgaccgcctccttcgcaagtggctgcgagcctacgagagtgctgtctccttccacttcagcaactattttgtgggctttctttccgaggccacggccacgttggcgggggctggctttaccgaggagaaggatcacctggaatgggacctgacggtgtccaagccactgaatgtggagctgcctcggtcaatggtggaagttgtcacaagctggaacctgcccatgtcttattggctaaataactatgttttcaagaatgctctccgcctggggaccttctcggctgtgctggtcacctatgcagccagcgccctcctacatggcttcagtttccacctggctgcggtcctgctgtccctggcttttatcacttacgtggagcatgtcctccggaagcgcctggctcggatcctcagtgcctgtgtcttgtcaaggcggtgcccgccagactgttcgcaccagcatcgcttgggcctgggggtgcgagccttaaacttgctctttggagctctggccatcttccacctggcctacctgggctccctgtttgatgtcgatgtggatgacaccacagaggagcagggctacggcatggcatacactgtccacaagtggtcagagctcagctgggccagtcactgggtcacttttggatgctggatcttctaccgtctcataggctgaggcacatctgtggaccctcataaccctcttaagacccctctcagggtgccactgatgggggatgagggaaggccctctctctactccttgaccccctccatccttgacccccaacacctcaacacacacacacacacacacacacaaaatcacaccattttcatgcctgtcaatccccaccccaccacaaggcaggaagggggtggtgcctgctggggcctagagggggatgcttggggaaacagagaaggggagatccagggcctccccgccttccttcttcctttttatatacaatttgttattgtcaaataaaagtaggaaatattc

SEQ ID NO: 2984 - DNA, 3342 bp, Homo sapiens; identical to SEQ ID NO: 668

SEQ ID NO: 2985 - DNA, 5000 bp, Homo sapiens
ttctgcgtttctctagtgcagtgcctggagatgaccaccaaacggaaaatcatcggccgtctggtgccatgccgatgtttccgaggtgaagaagaaatcatctcagttttagattactcccactgcagtcttcagcaggtgccaaaggaggtctttaacttcgaacgaacattagaggagctttatctagatgccaatcaaattgaagaactacccaagcaattgttcaactgtcaagctctacgaaaactaagtattcctgataacgacctttcaaatctgccaaccactattgctagtttagttaatcttaaagaactcgacatcagtaaaaatggtgtacaagaatttccagaaaacataaagtgctgtaagtgtttaacaattattgaagccagtgtcaatcccatttctaaactacctgatggcttcacacagctcctaaacctgacccagctctacctgaatgacgcctttcttgaatttcttccagccaattttggaagacttgtcaaattgcggatcttggagttaagagaaaatcacttgaaaactctaccaaagtcaatgcacaaactggcccagttggaaagacttgacctaggcaataatgaattcggtgagctgcctgaagttctggatcaaatacaaaatttgagggagttatggatggataataatgcattacaagtgttacctgggtctatagggaagttaaagatgttggtatacctggatatgtcaaaaaacagaatagaaacagttgacatggacatttctggatgtgaagcccttgaggacctcttattgtcatccaatatgttgcaacaattgcctgattctataggacttttgaaaaaactaacaactctaaaagtagatgacaatcaacttacaatgctacccaatacaattggaaatttatctttattagaagaatttgactgtagctgtaatgaactggagtcactaccttctactattggctaccttcatagtcttcggacattagcagttgatgagaatttccttccagaattacccagagaaattggaagttgtaagaatgtaacagtcatgtctctacgctccaacaaattagaatttcttcctgaagagattggacagatgcagaaactaagagtcctaaatttgagtgacaacagattgaagaatttaccattctcatttaccaaacttaaagagcttgcagctttgtggctttctgacaatcagtccaaagcccttatccctttacaaacagaagcccatccagaaacaaagcaaagagtattgactaactacatgtttccccagcagcctcgtggtgatgaagatttccagtcagacagtgacagctttaaccctacactgtgggaagagcagagacaacaacgcatgactgttgcctttgaatttgaagacaaaaaagaagatgacgaaaatgctgggaaagttaaggatctctcctgccaagccccctgggaaaggggccagcgtgggattactctccaacctgccagactgtctggcgattgctgcacaccatgggccaggtgtgatcagcagatccaagatatgcccgtcccccagaatgacccacagctggcatggggttgtataagtggcctccagcaggaaaggagcatgtgtactccattgccagttgcagcacaatccaccactcttccctctctaagtggcagacaggttgaaataaacctaaaacgatatccaactccttacccagaggatttaaagaatatggtaaaatctgttcaaaatttggtgggtaagccaagccatggagtgcgtgttgagaattcaaatccaactgctaacacggagcaaactgtgaaagaaaaatatgaacacaagtggccggtagccccaaaggagattacagtggaggattcttttgttcatccagctaatgaaatgaggattggggaacttcacccttcattagctgagacccctctgtacccacccaaacttgttctgctagggaaggacaaaaaagaatcaactgatgagtctgaagttgacaaaactcactgtctgaataacagtgtttcctcaggcacttactcagactactcgccttcccaggcttcctcaggatcctctaatacccgggttaaagtggggtccttgcagacaacagctaaagatgcagtacataattctttgtggggtaacaggattgcaccatctttcccacagcctcttgattcaaagccattactcagccagcgggaggctgttcccccaggcaatataccacagcgtcctgaccggctgcccatgagtgatactttcactgacaactggactgatggctcgcattatgacaacacagggtttgttgctgaggaaaccacagccgagaatgccaacagtaatcctctcttaagttcgaaatctagaagcacatcttcgcatggacgcaggcctttgatcaggcaagacaggattgttggtgttcccctggaactcgagcagtctacacacagacacacaccagaaacagaagtgcctccttccaatccttggcagaattggaccagaacccctagtccgtttgaagacaggaccgcttttccttccaaattagagacaacccccactaccagcccattgcctgaaaggaaagaacatataaaggaatctactgaaatacctagtcctttttctccaggcgtaccatgggagtatcatgattccaatcccaacaggagtcttagtaatgtcttttctcaaatccattgccgcccggaatcttctaaaggtgttatttcaattagcaaaagcacagagaggctttcccccctaatgaaagatatcaagtctaataaattcaaaaagtcacagagtatcgatgagattgacattggtacatataaggtgtataacataccattagaaaactatgcttctgggagtgatcacttaggaagccacgaacgaccggataagatgctgggaccagagcatggtatgtccagtatgtctcgaagccagtcagtcccaatgctggatgatgagatgctcacctacggaagtagtaaggggccacaacaacaaaaagcttctatgacaaaaaaagtctatcagtttgaccaaagcttcaatcctcaaggatcagtggaagtgaaagccgaaaagaggataccacccccttttcaacacaatcccgagtacgtgcaacaggccagcaaaaacatcgccaaggatttgattagtcctagagcttacagaggatacccaccgatggagcaaatgttttcattttctcagccatctgtgaatgaggatgctgtggtgaatgcccagttcgcaagccaaggggccagggcgggcttcctgagaagggccgactccctggtgagcgccacagaaatggccatgtttagaagggtcaatgagcctcatgagctgcccccaactgataggtacggcagacccccatataggggagggctggatcgccaaagcagcgttacagtgactgagtcccagttcctgaaaaggaatggcaggtatgaagatgaacacccttcatatcaagaagtgaaagctcaggcgggaagttttccggttaaaaaccttacccaaaggaggccattgtctgcgagaagctacagtacagagagttacggtgcctcccaaaccaggccagtttcagctaggcctactatggcagctcttttggaaaaaataccatctgactataacttgggtaactatggtgacaagccatcagataacagtgatttaaagacgaggcctactcctgtgaagggagaggagagctgtggtaaaatgcctgcagactggagacaacagctgcttagacatatagaagctagacggttagacaggaatgctgcttacaaacacaatacagttaaccttggcatgctgccctatggaggtatttcagcaatgcatgcaggcagaagcatgactttaaacttgcagactaagtctaaatttgatcatcaagaactacctcttcagaaaaccccgtcccagcaaagcaacattttagacaatggacaagaagatgtatctcctagtggccaatggaatccttatccacttgggaggcgggatgtacctccggacaccattactaagaaggcaggcagccacatccagacgttgatggggtcccaaagccttcagcatcgcagccgggagcagcagccgtatgaaggaaatataaacaaagtgaccatccagcaatttcagtcaccattgcctattcagatcccctcttcacaggccacccggggacctcagcctggacggtgcttaattcaaactaaagggcaaaggagtatggatggatatccagagcagttttgtgtgagaatagaaaagaatcctggccttggatttagtatcagtggtggaattagtggacaaggaaatccattcaaaccttctgacaagggtatctttgttactagggttcagcctgatgggccagcatcaaacctactgcagcctggtgataagatccttcaggcaaatggacacagttttgtacatatggaacatgaaaaagctgtattactactgaagagtttccagaacacagtagacctagttattcaacgtgagcttactgtctaaatattttttataaatagtgaagatacgtctagccagacctaatgttcaaaaataaatttatacatagaaacaaattttgccaattgctggaccaatggcaaacattagtgccaaatgtataatactatatgttagcactgaccatccttaaaaaatgttaactctataaatatgatgttcatgtggttatgtattagttttaattgtcagcctctggctgtgcattggtgcagttttgtttctgtttttgtttttgtttttaatcaaataagtttcttctcaaaatggatttcatataatttcggagcacggaagcacacacaagctctttatgaattctgctctccatcagaaac

SEQ ID NO: 2986 - DNA, 2709 bp, Homo sapiens
gcagaataggagcaagccagcactagtcagctaactaagtgactcaaccaaggccttttttccttgttatctttgcagatacttcattttcttagcgtttctggagattacaacatcctgcggttccgtttctgggaactttactgatttatctcccccctcacacaaataagcattgattcctgcatttctgaagatctcaagatctggactactgttgaaaaaatttccagtgaggctcacttatgtctgtaaagatgggaaaaaaatacaagaacattgttctactaaaaggattagaggtcatcaatgattatcattttagaatggttaagtccttactgagcaacgatttaaaacttaatttaaaaatgagagaagagtatgacaaaattcagattgctgacttgatggaagaaaagttccgaggtgatgctggtttgggcaaactaataaaaattttcgaagatataccaacgcttgaagacctggctgaaactcttaaaaaagaaaagttaaaagtaaaaggaccagccctatcaagaaagaggaagaaggaagtggatgctacttcacctgcaccctccacaagcagcactgtcaaaactgaaggagcagaggcaactcctggagctcagaaaagaaaaaaatcaaccaaagaaaaggctggacccaaagggagtaaggtgtccgaggaacagactcagcctccctctcctgcaggagccggcatgtccacagccatgggccgttccccatctcccaagacctcattgtcagctccacccaacacttcttcaactgagaacccgaaaacagtggccaaatgtcaggtaactcccagaagaaatgttctccaaaaacgcccagtgatagtgaaggtactgagtacaacaaagccatttgaatatgagaccccagaaatggagaaaaaaataatgtttcatgctacagtggctacacagacacagttcttccatgtgaaggttttaaacaccagcttgaaggagaaattcaatggaaagaaaatcatcatcatatcagattatttggaatatgatagtctcctagaggtcaatgaagaatctactgtatctgaagctggtcctaaccaaacgtttgaggttccaaataaaatcatcaacagagcaaaggaaactctgaagattgatattcttcacaaacaagcttcaggaaatattgtatatggggtatttatgctacataagaaaacagtaaatcagaagaccacaatctacgaaattcaggatgatagaggaaaaatggatgtagtggggacaggacaatgtcacaatatcccctgtgaagaaggagataagctccaacttttctgctttcgacttagaaaaaagaaccagatgtcaaaactgatttcagaaatgcatagttttatccagataaagaaaaaaacaaacccgagaaacaatgaccccaagagcatgaagctaccccaggaacagagtcagcttccaaatccttcagaggccagcacaaccttccctgagagccatcttcggactcctcagatgccaccaacaactccatccagcagtttcttcaccaagaaaagtgaagacacaatctccaaaatgaatgacttcatgaggatgcagatactgaaggaagggagtcattttccaggaccgttcatgaccagcataggcccagctgagagccatccccacactcctcagatgcctccatcaacaccaagcagcagtttcttaaccacgttgaaaccaagactgaagactgaacctgaagaagtttccatagaagacagtgcccagagtgacctcaaagaagtgatggtgctgaacgcaacagaatcatttgtatatgagcccaaagagcagaagaaaatgtttcatgccacagtggcaactgagaatgaagtcttccgagtgaaggtttttaatattgacctaaaggagaagttcaccccaaagaagatcattgccatagcaaattatgtttgccgcaatgggttcctggaggtatatcctttcacacttgtggctgatgtgaatgctgaccgaaacatggagatcccaaaaggattgattagaagtgccagcgtaactcctaaaatcaatcagctttgctcacaaactaaaggaagttttgtgaatggggtgtttgaggtacataagaaaaatgtaaggggtgaattcacttattatgaaatacaagataatacagggaagatggaagtggtggtgcatggacgactgaccacaatcaactgtgaggaaggagataaactgaaactcacctgctttgaattggcaccgaaaagtgggaataccggggagttgagatctgtaattcatagtcacatcaaggtcatcaagaccaggaaaaacaagaaagacatactcaatcctgattcaagtatggaaacttcaccagactttttcttctaaaatctggatgtcattgacgataatgtttatggagataaggtctaagtgcctaaaaaaatgtacatatacctggttgaaatacaacactatacatacacaccaccatatatactagctgttaatcctatggaatggggtattgggagtgcttttttaatttttcatagtttttttttaataaaatggcatattttgcatctacaacttctataatttgaaaaaataaataaacattatcttttttgtgaaaaaaaaaaaaaaa

SEQ ID NO: 2987 - DNA, 2562 bp, Homo sapiens; identical to SEQ ID NO: 119

SEQ ID NO: 2988 - DNA, 2805 bp, Homo sapiens; identical to SEQ ID NO: 2107

SEQ ID NO: 2989 - DNA, 2818 bp, Homo sapiens
atcatggcaagttagaagttttctgactcctttcggaggagcctccgggaccccggggagtaacaggtgtctggaggctgaagggtggaggggttcctggatttggggtttgcttgtgaaactcccctccaccctcctctctcgcacccacccaccccctcacccccttctttttccgtccttggaaaatggtgtccaagctcacgtcgctccagcaagaactcctgagcgccctgctgagctccggggtcaccaaggaggtgctggttcaggccttggaggagttgctgccatccccgaacttcggggtgaagctggagacgctgcccctgtcccctggcagcggggccgagcccgacaccaagccggtcttccatactctcaccaacggccacgccaagggccgcttgtccggcgacgagggctccgaggacggcgacgactatgacacacctcccatcctcaaggagctgcaggcgctcaacaccgaggaggcggcggagcagcgggcggaggtggaccggatgctcagtgaggacccttggagggctgctaaaatgatcaagggttacatgcagcaacacaacatcccccagagggaggtggtcgatgtcaccggcctgaaccagtcgcacctctcccagcatctcaacaagggcacccctatgaagacccagaagcgtgccgctctgtacacctggtacgtcagaaagcaacgagagatcctccgacaattcaaccagacagtccagagttctggaaatatgacagacaaaagcagtcaggatcagctgctgtttctctttccagagttcagtcaacagagccatgggcctgggcagtccgatgatgcctgctctgagcccaccaacaagaagatgcgccgcaaccggttcaaatgggggcccgcgtcccagcaaatcttgtaccaggcctacgatcggcaaaagaaccccagcaaggaagagagagaggccttagtggaggaatgcaacagggcagaatgtttgcagcgaggggtgtccccctccaaagcccacggcctgggctccaacttggtcactgaggtccgtgtctacaactggtttgcaaaccgcaggaaggaggaggcattccggcaaaagctggccatggacgcctatagctccaaccagactcacagcctgaaccctctgctctcccacggctccccccaccaccagcccagctcctctcctccaaacaagctgtcaggagtgcgctacagccagcagggaaacaatgagatcacttcctcctcaacaatcagtcaccatggcaacagcgccatggtgaccagccagtcggttttacagcaagtctccccagccagcctggacccaggccacaatctcctctcacctgatggtaaaatgatctcagtctcaggaggaggtttgcccccagtcagcaccttgacgaatatccacagcctctcccaccataatccccagcaatctcaaaacctcatcatgacacccctctctggagtcatggcaattgcacaaagcctcaacacctcccaagcacagagtgtccctgtcatcaacagtgtggccggcagcctggcagccctgcagcccgtccagttctcccagcagctgcacagccctcaccagcagcccctcatgcagcagagcccaggcagccacatggcccagcagcccttcatggcagctgtgactcagctgcagaactcacacatgtacgcacacaagcaggaacccccccagtattcccacacctcccggtttccatctgcaatggtggtcacagataccagcagcatcagtacactcaccaacatgtcttcaagtaaacagtgtcctctacaagcctggtgatgcccacacaccacttacttcgtgcgcaacaacaaggaccctgttttccacaccatcaccctctgggcagctgtcatggaaaagcccagtgacctgaccagcacctgcgagaggtccctgcttacctgacggacgtcctgctggcacctcagacaatccactctcaggaggcgcagcccgaagcccagtttcccttctatgcagtattgccacaatgcctctcccacgatgtcaaggactcctgtctgtcctggaggtgggagacaaggaacctccgaagaggaagcaagaaagccgtactgtctatgttgtgatccttcatcgaacaaactgatgcgaaaacttgaatctgttactgaaatgaggagagaaggacatgtgctattgaactgagccaaacacactgtaaatatccacagactccctcccctgcccccatcccaaatgatcttgagatttcttttaaagaagtaaatttgtccaatggctgtaaactataaactactgtaattaagtgcaatttcccctctgtgtcctctcccctctgccctgtatataatactaaagtgtctattagttttctttgtaaaggtcagagtcaaaatttcaaaagtgatctgtcccctctcccctcatggagaaacatcctaagtgggaagtgaagccccttgtcctctcccgcgggcctggacacttatggggacagcataccttggactgactaccagctaactccagtctcctgacattaagacacacctctggatccctggaggggctgaatgtagtgtgtcagagtaacatgccagcttcctgtgggccaggagctcagccgtgcactccctaagaaaccccagggcagggaaactggctgtttgatagcagaagaaaaagttgcagtctcagaaagccttccattaaaacaatttattttatcactaaaaaaaaaaaaaaaa

SEQ ID NO: 2990 - DNA, 2098 bp, Homo sapiens
cgccaggccacgtcgcggttggtggtcggagagggcgaggggtcccagggggcttcggggcctgcagccaccatgctccgctccctgctgcttcactccttgaggctctgcgcccagaccgcctcgtgcctcgtgctcttcccgcgcttcctcggcacggccttcatgctctggcttctcgatttcttgtgtatccgcaagcatttcctgggccgccgccgccgggggcagcccgagcccgaagtggagctcaacagtgaaggcgaggaggtgcctcccgatgacccgcccatctgcgtgtccgacgacaaccgcctgtgcaccctggcgtcgctcaaggcggtgtggcatggccagaagttggatttcttcaagcaggcgcacgagggcggtccggcgcccaactccgaggtggttctgcccgacggcttccagagccagcacatcctcgactacgcgcaagggaaccgcccgctggttctcaatttcggcagctgcacctgaccaccgttcatggcgcgcatgagcgccttccagcgcctggtcactaagtaccagcgcgacgtcgacttcctcatcatctacatcgaggaagcgcacccctccgacggctgggtcaccacggactctccctacatcatcccacagcaccggagcctggaggaccgggtcagcgcagcgagggtactgcagcaaggtgcacccggctgcgctctggtcctcgacaccatggccaactccagcagctcggcctatggcgcctacttcgagcgtctctatgtcatccagagtggcactattatgtaccagggcggccgtggccccgacggctaccaggtctctgagctgcgcacttggttggaacgctatgatgagcaactgcacggcgctcggccccggagggtgtaaacatccaacggacaattgactgaacttggtgggctgggccttcgagccttcgaagcccacgtgcaagcgcctcaaaccaagtcacgcttggcgaggccccagtgacactgatgtgctgagccaccatttcagactgagtctgcaccctcagccacatgaacaatctcccctacctccctgggactctgcttctgtaactgtctcattcacacctgcctggctcactggaaatcctcttttgagcgcgggatatggcttgcccttgtccgtgtgcccccaggactttgcctctacagcattttcttacaccccctccccagcgtgccctcagccaagtgctttggcccggtgcttcccgcagctgcacagagaccttggccacgcccgcgcgccctgagcgcagctgggttccaggagactctcagctcagctgagctagttgcctggcacccacctgtcgcgcgcggagagggggttccctgttgcttttgtgtctgtttcctgtccctggtaggggaagtgatgtcgtggatggggaggggtgggcagggtagtttcccccgcttgttttgggtgcacaggagccccactgctgatgacgaactatctctaactggtcttgaccacgagctagttctgaattgcaggggcctcaaagcagcacctaaaccttgagggggagggtgctctgggtttccgtgaggtaaccaccttaaatgggagggaagttggggtgtctgctttgggaccagaggaagatagcttgagaggcattggcgaggttcgcagcgccccagggagagagaaaaagctgagactcctggggaatgacgttggggtgatggagtccggggaaagagaggtggggggagagcctgaggtccccaagtgaggggagtcctaggcagagctgctgattgtggggctgggaggtggagggcccctgattcgaaggccatttggtgagtgttttgctggaaatatttcctgtatataaacttctttcaatctacaataataaaggcttgaggtaaactgcttaaaaaaaaaaaaaaaaaaaaaaaaaaaaaaaaaaaaaaaaaaaaaaaaaaaaaaaaaaaaaaaaaaaaaaaaaaaaaaaaaaaaaaaaaaaaaaaaaaaaaaaaaaaaaaaaaaaaaaaaaaaaaaaaaaaaaaaaaaaaaaaaaaaa

SEQ ID NO: 2991 - DNA, 788 bp, Homo sapiens
acacagctgcagagatgaataaacaaagaggaacctactcagaagtgagtctggcccaggacccaaagaggcagcaaaggaaacttaagggcaataaaatctccatttcaggaaccaaacaggaaatattccaagtagaattaaaccttcaaaatgcttcttcggatcatcaagggaatgacaagacatatcactgcaaaggtttactgccacctccagagaagctcactgctgaggtcctaggaatcatttgcattgtcctgatggccactgtgttaaaaacaatagttcttattccttgtattggagtactggagcagaacaatttttccctgaatagaagaatgcagaaagcacgtcattgtggccattgtcctgaggagtggattacatattccaacagttgttattacattggtaaggaaagaagaacttgggaagaaagagtttgctggcctgtgcttcgaagaactctgatctgctttctatagataatgaggaagaaatggtaagacgtaaatgtttcaacactttactaaaagcttatttctgtcaatatcatatttgtagaaatcatccatatgtttatacatatatttacttcatatatttttaagtctgtgtagtattcaactgacttcataatatttttatattcatatactgttaatgcacatttggttatttccagttttgcttttcatggaaacccatgcttctataaatgtttttatcacaaaataaatataaagaaaacaaaaaaaaaaaaaaaaaaaaaaaaaaaaaaa

SEQ ID NO: 2992 - DNA, 1232 bp, Homo sapiens
gctcttccagaggcaagaccaaccaagatgagtgccctgggagctgtcattgccctcctgctctggggacagctttttgcagtggactcaggcaatgatgtcacggatatcgcagatgacggctgcccgaagccccccgagattgcacatggctatgtggagcactcggttcgctaccagtgtaagaactactacaaactgcgcacagaaggagatggagtgtacaccttaaacaatgggaagcagtggataaataaggctgttggagataaacttcctgaatgtgaagcagtatgtgggaagcccaagaatccggcaaacccagtgcagcggatcctggcaggctaagatggtttcccaccataatctcaccacaggtgccacgctgatcaatgaacaatggctgctgaccacggctaaaaatctcttcctgaaccattcagaaaatgcaacagcgaaagacattgcccctactttaacactctatgtggggaaaaagcagcttgtagagattgagaaggttgttctacaccctaactactcccaggtagatattgggctcatcaaactcaaacagaaggtgtctgttaatgagagagtgatgcccatctgcctaccttcaaaggattatgcagaagtagggcgtgtgggttatgtttctggctgggggcgaaatgccaattttaaatttactgaccatctgaagtatgtcatgctgcctgtggctgaccaagaccaatgcataaggcattatgaaggcagcacagtccccgaaaagaagacaccgaagagccctgtaggggtgcagcccatactgaatgaacacaccttctgtgctggcatgtctaagtaccaagaagacacctgctatggcgatgcgggcagtgcctttgccgttcacgacctggaggaggacacctggtatgcgactgggatcttaagctttgataagagctgtgctgtggctgagtatggtgtgtatgtgaaggtgacttccatccaggactgggttcagaagaccatagctgagaactaatgcaaggctggccggaagcccttgcctgaaagcaagatttcagcctggaagagggcaaagtggacgggagtggacaggagtggatgcgataagatgtggtttgaagctgatgggtgccagccctgcattgctgagtcaatcaataaagagctttcttttgacccataaaaaaaaaaaaaaaaaaaaaaaaaaaaaa

SEQ ID NO: 2993 - DNA, 1220 bp, Homo sapiens
ccctttaatgagttcttgttttcctgactgcagctctcttcattctgccaaccttttccaactccatgatgatcctgcaggtttcagggggcccctggacagtggctctgacagcattactgatggtgctgctcatatctgtggtccagagcagggccactccagagaattccgtctaccaggaacggcaggaatgctatgcgttcaatgggactcagcgcgttgtggacgggctcatctacaaccgggaggaatacgtgcattttgacagcgcagtgggggagttcctagcagtgatggagctggggcggcccataggcgagtacttcaatagccagaaggactttatggaacggaagcgagccgaggtggacaaggtgtgcagacacaagtacgagctgatggagccactcatccggcagcgccgaggagacgtaaccataactgctgttagggggtgttggacgacgattctttctggctacttcctgctgaaaaggggcgtcgtgtcggggggctgcagttggggctcctcctgaggttgatctaaggcttcttggaagaatggcatgtccatgtgtggctttgtttgcagcaccatttgaagtttgattgcttctaggcaaaaagagataaattttacaagaaggtttaaaatatagggttaccatatgagtattaagattaccacctatagactgtaactatggcagtagagtttgatacctgttacaccaatggattgtaatactggtttgtctccactagatgtcgctgtacattaccagaaacgttaatataaaagcatcatttcctttgagaaaacatgtttcccccttgacttgctattagggcataatttttggtttaggccattctttataacttatgatatgattgggagaaaaacgttattgggtggctaaaataactttggtgttaatcttggcaattcctttcctttaattattaaatttcttaattattaaattctttcatgactttcacagaccctcttacaatgtactcaactttctgacttgtcttaaacaaccagtcatttccttttaggacaagaatttactatacaagatcctttcttatataaaatccctttatttgtaaccttctttccatagcttagagtgcaccatttaccaatcttcaataaaaaagtcctatcaaactataaaaaaaaaaaaaaaaaaaaaaaaaaaaaa

SEQ ID NO: 2994 - DNA, 2101 bp, Homo sapiens
cgcgcgcggcgaatctcaacgctgcgccgtctgcgggcgcttccgggccaccagtttctctgctttccaccctggcgccccccagccctggctccccagctgcgctgccccgggcgtccacgccctgcgggcttagcgggttcagtgggctcaatctgcgcagcgccacctccatgttgaccaagcctctacaggggcctcccgcgccccccgggacccccacgccgccgccaggaggcaaggatcgggaagcgttcgaggccgagtatcgactcggccccctcctgggtaaggggggctttggcaccgtcttcgcaggacaccgcctcacagatcgactccaggtggccatcaaagtgattccccggaatcgtgtgctgggctggtcccccttgtcagactcagtcacatgcccactcgaagtcgcactgctatggaaagtgggtgcaggtggtgggcaccctggcgtgatccgcctgcttgactggtttgagacacaggagggcttcatgctggtcctcgagcggcctttgcccgcccaggatctctttgactatatcacagagaagggcccactgggtgaaggcccaagccgctgcttctttggccaagtagtggcagccatccagcactgccattcccgtggagttgtccatcgtgacatcaaggatgagaacatcctgatagacctacgccgtggctgtgccaaactcattgattttggttctggtgccctgcttcatgatgaaccctacactgactttgatgggacaagggtgtacagccccccagagtggatctctcgacaccagtaccatgcactcccggccactgtctggtcactgggcatcctcctctatgacatggtgtgtggggacattccctttgagagggaccaggagattctggaagctgagctccacttcccagcccatgtctccccagactgctgtgccctaatccgccggtgcctggcccccaaaccttcttcccgaccctcactggaagagatcctgctggacccctggatgcaaacaccagccgaggatgtacccctcaacccctccaaaggaggccctgcccctttggcctggtccttgctaccctaagcctggcctggcctggcctggcccccaatggtcagaagagccatcccatggccatgtcacagggatagatggacatttgttgacttggttttacaggtcattaccagtcattaaagtccagtattactaaggtaagggattgaggatcaggggttagaagacataaaccaagtctgcccagttcccttcccaatcctacaaaggagccttcctcccagaacctgtggtccctgattctggagggggaacttcttgcttctcattttgctaaggaagtttattttggtgaagttgttcccattctgagccccgggactcttattctgatgatgtgtcaccccacattggcacctcctactaccaccacacaaacttagttcatatgctcttacttgggcaagggtgctttccttccaataccccagtagcttttattttagtaaagggaccctttcccctagcctagggtcccatattgggtcaagctgcttacctgcctcagcccaggattctttattctgggggaggtaatgccctgttgttaccccaaggcttcttttttttttttttttgggtgaggggaccctactctgttatcccaagtgctcttattctggtgagaagaaccttacttccataatttgggaaggaatggaagatggacaccaccggacaccaccagacactaggatgggatggatggttttttgggggatgggctaggggaaataaggcttgctgtttgttctcctggggcgctccctccaacttttgcagattcttgcaacctcctcctgagccgggattgtccaattactaaaatgtaaataatcacgtattgtggggaggggagttccaagtgtgccctcctctcttctcctgcctggattatttaaaaagccatgtgtggaaacccactatttaataaaagtaatagaatcagaaaaaaaaaaaaaaaaaaaaaaaaaaaaaaaaaaaaaaaaaaaaaaaaa

SEQ ID NO: 2995 - DNA, 1815 bp, Homo sapiens
ggggagggccaactccagggattccttccacgacagaaaaacatacaagactccttcagccaacatgatggtactgaaagtagaggaactggtcactggaaagaagaatggcaatggggaggcaggggaattccttcctgaggatttcagagatggagagtatgaagctgctgttactttagagaagcaggaggatctgaagacacttctagcccaccctgtgaccctgggggagcaacagtggaaaagcgagaaacaacgagaggcagagctcaaaaagaaaaaactagaacaaagatcaaagcttgaaaatttagaagaccttgaaataatcattcaactgaagaaaaggaaaaaatacaggaaaactaaagttccagttgtaaaggaaccagaacctgaaatcattacggaacctgtggatgtgcctacgtttctgaaggctgctctggagaataaactgccagtagtagaaaaattcttgtcagacaagaacaatccagatgtttgtgatgagtataaacggacagctcttcatagagcatgcttggaaggacatttggcaattgtggagaagttaatggaagctggagcccagatcgaattccgtgatatgcttgaatccacagccatccactgggcaagccgtggaggaaacctggatgttttaaaattgttgctgaataaaggagcaaaaattagcgcccgagataagttgctcagcacagcgctgcatgtggcggtgaggactggccactatgagtgcgcggagcatcttatcgcctgtgaggcagacctcaacgccaaagacagagaaggagataccccgttgcatgatgcggtgagactgaaccgctataagatgatccgactcctgattatgtatggcgcggatctcaacatcaagaactgtgctgggaagacgccgatggatctggtgctacactggcagaatggaaccaaagcaatattcgacagcctcagagagaactcctacaagacctctcgcatagctacattctgaggcaaacgacagactcttaatcagtaaatgttcactggcattttgaaggcatggcccaagagaagagacactagccataaaatctagtttctatttatcaacgtgttgtgaagatgtacctaatgaagttttgagaaagcacagggttataggtgtttaaatttcctttagtgaaactcttatttatttttatgtattcctgtttatttatttactgccacgctactgatattcagaccttcatgatcatccatctggtgagcagagcttcatttgtatataacactttcagagccttcccacccataggtagttcttaaaccaggtgaaagagcaaagttcaagtgcctacttatgtgtcattcgctcatgtaagagtttttaagagagggctgattatcacagccctcttttctcctgaatttttaatgcagaagtttgaatgaagcaagggaaggcatgtagggacaggaaaggaaacaatggaaggaaagtgattctgtgaaaaggacagtgaagccagctattttacccccaggctggattttttttttttttttttttttttttaccgagtacacagagtacccaagtgaagagaacgtcatgagtgtaagtgcaaatcagtggaaggagcggcaaactgggacatgcagaattgaatttgctcaaaaaagatgaaaggaaatgcaaactgtaaatgtataaatgtatattgtattgtatgtacattttatattcataataaaggcaatcaaactcaaaaaaaaaaaaaaaaaaaaaaaaaaaaa

SEQ ID NO: 2996 - DNA, 1327 bp, Homo sapiens
cagggtcccagatgcacaggaggagaagcaggagctgtcgggaagatcagaagccagtcatggatgaccagcgcgaccttatctccaacaatgagcaactgcccatgctgggccggcgccctggggccccggagagcaagtgcagccgcggagccctgtacacaggcttttccatcctggtgactctgctcctcgctggccaggccaccaccgcctacttcctgtaccagcagcagggccggctggacaaactgacagtcacctcccagaacctgcagctggagaacctgcgcatgaagcttcccaagcctcccaagcctgtgagcaagatgcgcatggccaccccgctgctgatgcaggcgctgcccatgggagccctgccccaggggcccatgcagaatgccaccaagtatggcaacatgacagaggaccatgtgatgcacctgctccagaatgctgaccccctgaaggtgtacccgccactgaaggggagcttcccggagaacctgagacaccttaagaacaccatggagaccatagactggaaggtctttgagagctggatgcaccattggctcctgtttgaaatgagcaggcactccttggagcaaaagcccactgacgctccaccgaaagagtcactggaactggaggacccgtcttctgggctgggtgtgaccaagcaggatctgggcccagtccccatgtgagagcagcagaggcggtcttcaacatcctgccagccccacacagctacagctttcttgctcccttcagcccccagcccctcccccatctcccaccctgtacctcatcccatgagaccctggtgcctggctctttcgtcacccttggacaagacaaaccaagtcggaacagcagataacaatgcagcaaggccctgctgcccaatctccatctgtcaacaggggcgtgaggtcccaggaagtggccaaaagctagacagatccccgttcctgacatcacagcagcctccaacacaaggctccaagacctaggctcatggacgagatgggaaggcacagggagaagggataaccctacacccagaccccaggctggacatgctgactgtcctctcccctccagcctttggccttggcttttctagcctatttacctgcaggctgagccactctcttccctttccccagcatcactccccaaggaagagccaatgttttccacccataatcctttctgccgacccctagttccctctgctcagccaagcttgttatcagctttcagggccatggttcacattagaataaaaggtagtaattagaaaaaaaaaaaaaaaaaa

SEQ ID NO: 2997 - DNA, 2445 bp, Homo sapiens
gcgtgttgagtttccggcgttccgaaggactgagctcttgtcgcggatcccgtccgccgtttccagcccccagtctcagagcggagcccacagagcagggcaccggcatggccaaagccgcggcgatcggcatcgacctgggcaccacctactcctgcgtgggggtgttccaacacggcaaggtggagatcatcgccaacgaccagggcaaccgcaccacccccagctacgtggccttcacggacaccgagcggctcatcggggatgcggccaagaaccaggtggcgctgaacccgcagaacaccgtgtttgacgcgaagcggctgatcggccgcaagttcggcgacccggtggtgcagtcggacatgaagcactggcctttccaggtgatcaacgacggagacaagcccaaggtgcaggtgagctacaagggggagaccaaggcattctaccccgaggagatctcgtccatggtgctgaccaagatgaaggagatcgccgaggcgtacctgggctacccggtgaccaacgcggtgatcaccgtgccggcctacttcaacgactcgcagcgccaggccaccaaggatgcgggtgtgatcgcggggctcaacgtgctgcggatcatcaacgagcccacggccgccgccatcgcctacggcctggacagaacgggcaagggggagcgcaacgtgctcatctttgacctgggcgggggcaccttcgacgtgtccatcctgacgatcgacgacggcatcttcgaggtgaaggccacggccggggacacccacctgggtggggaggactttgacaacaggctggtgaaccacttcgtggaggagttcaagagaaaacacaagaaggacatcagccagaacaagcgagccgtgaggcggctgcgcaccgcctgcgagagggccaagaggaccctgtcgtccagcacccaggccagcctggagatcgactccctgtttgagggcatcgacttctacacgtccatcaccagggcgaggttcgaggagctgtgctccgacctgttccgaagcaccctggagcccgtggagaaggctctgcgcgacgccaagctggacaaggcccagattcacgacctggtcctggtcgggggctccacccgcatccccaaggtgcagaagctgctgcaagacttcttcaacgggcgcgacctgaacaagagcatcaaccccgacgaggctgtggcctacggggcggcggtgcaggcggccatcctgatgggggacaagtccgagaacgtgcaggacctgctgctgctggacgtggctcccctgtcgctggggctggagacggccggaggcgtgatgactgccctgatcaagcgcaactccaccatccccaccaagcagacgcagatcttcaccacctactccgacaaccaacccggggtgctgatccaggtgtacgagggcgagagggccatgacgaaagacaacaatctgttggggcgcttcgagctgagcggcatccctccggcccccaggggcgtgccccagatcgaggtgaccttcgacatcgatgccaacggcatcctgaacgtcacggccacggacaagagcaccggcaaggccaacaagatcaccatcaccaacgacaagggccgcctgagcaaggaggagatcgagcgcatggtgcaggaggcggagaagtacaaagcggaggacgaggtgcagcgcgagagggtgtcagccaagaacgccctggagtcctacgccttcaacatgaagagcgccgtggaggatgaggggctcaagggcaagatcagcgaggcggacaagaagaaggttctggacaagtgtcaagaggtcatctcgtggctggacgccaacaccttggccgagaaggacgagtttgagcacaagaggaaggagctggagcaggtgtgtaaccccatcatcagcggactgtaccagggtgccggtggtcccgggcctgggggcttcggggctcagggtcccaagggagggtctgggtcaggccctaccattgaggaggtggattaggggcctttgttctttagtatgtttgtctttgaggtggactgttgggactcaaggactttgctgctgttttcctatgtcatttctgcttcagctctttgctgcttcacttctttgtaaagttgtaacctgatggtaattagctggcttcattatttttgtagtacaaccgatatgttcattagaattctttgcatttaatgttgatactgtaagggtgtttcgttccctttaaatgaatcaacactgccaccttctgtacgagtttgtttgttttttttttttttttttttttgcttggcgaaaacactacaaaggctgggaatgtatgtttttataatttgtttatttaaatatgaaaaataaaatgttaaactttaaaaaaaaaaaaaaaaaaaaaaaaaaaaaaaaaaaa

SEQ ID NO: 2998 - DNA, 855 bp, Homo sapiens
atctcatctcccagacgccacgtctctcggtttcttcttagatcactcctctgccaaagatcccaacaagacaacatggctcccaagaagcctgagcctaagaaggaggcagccaagccagctccagctccagctccagcccctgcaccagcccctgccccagctcctgaggctcccaaggaacctgcctttgaccccaagagtgtaaagatagacttcactgccgaccagattgaagagttcaaagaggccttttcattgtttgaccggaccccgactggagagatgaagatcacctacggccagtgcggggatgtactgcgggccctgggccagaaccctaccaatgccgaggtgctgcgtgtgctgggcaagcccaagcctgaagagatgaatgtcaagatgctggactttgagacgttcttgcccatcctgcagcacatttcccgcaacaaggagcagggcacctatgaggacttcgtggagggcctgcgtgtctttgacaaggagagcaatggcacggtcatgggtgctgagcttcggcacgtccttgccaccctgggagagaagatgactgaggctgaagtggagcagctgttagctgggcaagaggatgccaatggctgcatcaattatgaagcctttgtcaagcacatcatgtcagggtgaagcagagtcttccaggtgcctggcccttggctttagccataccagggtgagttaaagagaggccccggctgggtgagctgagatggagtcctcgacttatcaccacaccactgccccaaggaccttacaggccctccctgttaataaacagctctaacacggccaggctgggctctgggattctga

SEQ ID NO: 2999 - DNA, 1085 bp, Homo sapiens; identical to SEQ ID NO: 570

SEQ ID NO: 3000 - DNA, 3057 bp, Homo sapiens
cgaagcggctgcatctggcgccgcgtctgccccgcgtgctcggagcggattctgcccgccgtccccggagccctcggcgccccgctgagcccgcgatcacttcctccctgtgaccaaccggcgctgcaggttagagcctggcaatgccgtttgggtgtgtgactctgggcgacaagaagaactataaccagccatcggaggtgactgacagatatgatttgggacaggtcatcaagactgaggagttttgtgaaatcttccgggccaaggacaagacgacaggcaagctgcacacctgcaagaagttccagaagcgggacggccgcaaggtgcggaaagctgccaagaacgagataggcatcctcaagatggtgaagcatcccaacatcctacagctggtggatgtgtttgtgacccgcaaggagtactttatcttcctggagctggccacggggagggaggtgtttgactggatcctggaccagggctactactcggagcgagacacaagcaacgtggtacggcaagtcctggaggccgtggcctatttgcactcactcaagatcgtgcacaggaatctcaagctggagaacctggtttactacaaccggctgaagaactcgaagattgtcatcagtgacttccatctggctaagctagaaaatggcctcatcaaggagccctgtgggacccccgagtatctggccccagaggtggtaggccggcagcggtatggacgccctgtggactgctgggccattggagtcatcatgtacatcctgctttcaggcaatccacctttctatgaggaggtggaagaagatgattatgagaaccatgataagaatctcttccgcaagatcctggctggtgactatgagtttgactctccatattgggatgatatttcgcaggcagccaaagacctggtcacaaggctgatggaggtggagcaagaccagcggatcactgcagaagaggccatctcccatgagtggatttctggcaatgctgcttctgataagaacatcaaggatggtgtctgtgcccagattgaaaagaactttgccagggccaagtggaagaaggctgtccgagtgaccaccctcatgaaacggctccgggcaccagagcagtccagcacggctgcagcccagtcggcctcagccacagacactgccacccccggggctgcaggtggggccacagctgcagctgcgagtggagctacctcagcccctgagggtgatgctgctcgtgctgcaaagagtgataatgtggcccccgcagaccgtagtgccaccccagccacagatggaagtgccaccccagccactgatggcagtgtcaccccagccaccgatggaagcatcactccagccactgatgggagtgtcaccccagccactgacaggagcgctactccagccactgatgggagagccacaccagccacagaagagagcactgtgcccaccacccaaagcagtgccatgctggccaccaaggcagctgccacccctgagccggctatggcccagccggacagcacagccccagagggcgccacaggccaggctccaccctctagtaaaggggaagaggctgctggttatgcccaggagtctcaaagggaggaggccagctgagtaggcagcctggtgagggggggcaggggatgggcaggagggtgggagagtggatgaggggcttctcactgtacatagagtcactggcatgatgccctcgctcccccatgcccccacatcccagtggggcataactaggggtcacgggagagcagtctcgtctcctgtgtgtatgtgtgtgagtggtgggcaggccagtggcagggccggccccagcccctgcatggattccttgtggcttttctgtcttttgctagcttcaccagtttctgttccttgtgggatgctgctctagggatactcagggggctcctgctctccttccccttcccttcttgcctcaccattcccctaggcaggccctgcaggtcccacactctcccaggccctaaacttgggcggccttgccctgagagctggtcctccagcgaggccctgtcagcggtcttaggctcctgcacatgaaggtgtgtgcctgtggtgtgtgggctgctctaggagcagatacaggctggtatagaggatgcagaaaggtagggcagtatgtttaagtccagacttggcacatggctagggatactgctcactagctgtggaggtcctcaggagtggagagaatgagtaggagggcagaagcttccatttttgtccttcctaagaccctgttatttgtgttatttcctgcctttccgagtcctgcagtgggctgccctgtaccctgaacctcatgagcctctaagggaaaggaggaacaattaggacgtggcaatgagacctggcagggcagagtacaagcccagcacccagtgtcccagccttactgggtccttaccctgggccaaacagggagggctgatacctccttgctcttcctagatgcccacctcctacaatctcagcccacaagtcctctccaccctagggggcttgctgcatggcaataactcataatctgatttggaggtttgccctttacaggggcagattttctgctcagttcaacaatgaaatgaagaggaactccctctttctacagctcacttctatcagaggcccaggtgcctcagagccacattgagttgctttttctgggatgaggaagtagggttaaactccccagtttcctgagggaggctcctgacaggtgccctttgtcagaccctaccacagcctggataggcagccacattggtcctcgcccttgctcggcactccgtggtggtcctgcccttctccctgcatgcctgtgggtctgctctggtgtgtgaaggtcggtgggttaactgtgtgcctactgaacctggcaaataaacatcaccctgcaaagccaaaaaaaaaaaaaaaaaaaaaaaaaaaaaaaaaaaaaaaaaaaaaaaaaaaaaaaaaaaaaaaaaaaaaaaacctcggg

SEQ ID NO: 3001 - DNA, 4860 bp, Homo sapiens
  misc_feature (4804)..(4804): n is a, c, g, or t
ggcagtcggcgaactgtctgggcgggaggagccgtgagcagtagctgcactcagctgcccgcgcggcaaagaggaaggcaagccaaacagagtgcgcagagtggcagtgccagcggcgacacaggcagcacaggcagcccgggctgcctgaatagcctcagaaacaacctcagcgactccggctgctctgcggactgcgagctgtggcggtagagcccgctacagcagtcgcagtctccgtggagcgggcggaagccttttttctccctttcgtttacctcttcattctactctaaaggcatcgttattagagggtgcttaaaaagtacagatcaactggatggatgaatggatggaagaggatggaatatcttaacaaaacacattttccttaagtaaattcatgcatactccaaataaaatacagaatgtgaagtatctctgaactgtgctgttgaatatggtagctactagctacatgaaaatcctgttgtgaataagaaggattccacagatcacataccagagcggttttgcctcagctgctctcaactttgtaatcttgtgaagaagctgacaagcttggctgattgcagtgcactatgaggactgaatgacagtgggttttaattcagatatttcaagtgttgtgcgggttaatacaacaaactgtcacaagtgtttgttgtccgggacgtacattttcgcggtcctgctagtatgcgtggtgttccactctggcgcccaggagaaaaactacaccatccgagaagaaattccagaaaacgtcctgataggcaacttgttgaaagaccttaacttgtcgctgattccaaacaagtccttgacaactactatgcagttcaagctagtgtacaagaccggagatgtgccactgattcgaattgaagaggatactggtgagatcttcactaccggcgctcgcattgatcgtgagaaattatgtgctggtatcccaagggatgagcattgcttttatgaagtggaggttgccattttgccggatgaaatatttagactggttaagatacgttttctgatagaagatataaatgataatgcaccattgttcccagcaacagttatcaacatatcaattccagagaactcggctataaactctaaatatactctcccagcggctgttgatcctgacgtaggcataaacggagttcaaaactacgaactaattaagagtcaaaacatttttggcctcgatgtcattgaaacaccagaaggagacaagatgccacaactgattgttcaaaaggagttagatagggaagagaaggatacctatgtgatgaaagtaaaggttgaagatggtggctttcctcaaagatccagtactgctattttgcaagtaagtgttactgatacaaatgacaaccacccagtctttaaggagacagagattgaagtcagtataccagaaaatgctcctgtaggcacttcagtgacacagctccatgccacagatgctgacataggtgaaaatgccaagatccacttctctttcagcaatctagtctccaacattgccaggagattatttcacctcaatgccaccactggacttatcacaatcaaagaaccactggatagggaagaaacaccaaaccacaagttactggttttggcaagtgatggtggattgatgccagcaagagcaatggtgctggtaaatgttacagatgtcaatgataatgtcccatccattgacataagatacatcgtcaatcctgtcaatgacacagttgttctttcagaaaatattccactcaacaccaaaattgctctcataactgtgacggataaggatgcggaccataatggcagggtgacatgcttcacagatcatgaaattcctttcagattaaggccagtattcagtaatcagttcctcctggagaatgcagcatatcttgactatgagtccacaaaagaatatgccattaaattactggctgcagatgctggcaaacctcctttgaatcagtcagcaatgctcttcatcaaagtgaaagatgaaaatgacaatgctccagttttcacccagtctttcgtaactgtttctattcctgagaataactctcctggcatccagttgatgaaagtaagtgcaacggatgcagacagtgggcctaatgctgagatcaattacctgctaggccctgatgctccacctgaattcagcctggatcgtcgtacaggcatgctgactgtagtgaagaaactagatagagaaaaagaggataaatatttattcacaattctggcaaaagataatggggtaccacccttaaccagcaatgtcacagtctttgtaagcattattgatcagaatgacaatagcccagttttcactcacaatgaatacaaattctatgtcccagaaaaccttccaaggcatggtacagtaggactaatcactgtaactgatcctgattatggagacaattctgcagttacgctctccattttagatgagaatgatgacttcaccattgattcacaaactggtgtcatccgaccaaatatttcatttgatagagaaaaacaagaatcttacactttctatgtaaaggctgaggatggtggtagagtatcacgttcttcaagtgccaaagtaaccataaatgtggttgatgtcaatgacaacaaaccagttttcattgtccctccttacaactattcttatgaattggttctaccgtccactaatccaggcacagtggtctttcaggtaattgctgttgacaatgacactggcatgaatgcagaggttcgttacagcattgtaggaggaaacacaagagatctgtttgcaatcgaccaagaaacaggcaacataacattgatggagaaatgtgatgttacagaccttggtttacacagagtgttggtcaaagctaatgacttaggacagcctgattctctcttcagtgttgtaattgtcaatctgttcgtgaatgagtcagtgaccaatgctacactgattaatgaactggtgcgcaaaagcattgaagcaccagtgaccccaaatactgagatagctgatgtatcctcaccaactagtgactatgtcaagatcctggttgcagctgttgctggcaccataactgtcgttgtagttattttcatcactgctgtagtaagatgtcgccaggcaccacaccttaaggctgctcagaaaaacatgcagaattctgaatgggctaccccaaacccagaaaacaggcagatgataatgatgaagaaaaagaaaaagaagaagaagcattcccctaagaacctgctgcttaattttgtcactattgaagaaactaaggcagatgatgttgacagtgatggaaacagagtcacactagaccttcctattgatctagaagagcaaacaatgggaaagtacaattgggtaactacacctactactttcaagcctgacagccctgatttggcccgacactacaaatctgcctctccacagcctgccttccaaattcagcctgaaactcccctgaatttgaagcaccacatcatccaagaactgcctctcgataacacctttgtggcctgtgactctatctccaagtgttcctcaagcagttcagatccctacagcgtttctgactgtggctatccagtgacaaccttcgaggtacctgtgtccgtacacaccagaccgactgattccaggacatgaactattgaaatctgcagtgagatgtaactttctaggaacaacaaaattccattccccttccaaaaaatttcaatggattgtgatttcaaaattaggctaagatcattaattttgtaatctagatttcccattataaaagcaagcaaaaatcatcttaaaaatgatgtcctagtgaaccttgtgctttctttagctgtaatctggcaatggaaatttaaaatttatggaagagacagtgcagcacaataacagagtactctcatgctgtttctctgtttgctctgaatcaacagccatgatgtaatataaggctgtcttggtgtatacacttatggttaatatatcagtcatgaaacatgcaattacttgccctgtctgattgttgaataattaaaacattatcttccaggagtttggaagtgagctgaactagccaaactactctctgaaaggtatccagggcaagagacatttttaagaccccaaacaaacaaaaaacaaaaccaaaacactctggttcagtgttttgaaaatattcactaacataatattgctgagaaaatcatttttattacccaccactctgcttaaaagttgagtgggccgggcgcggtggctcacgcctgtaatcccagcactttgggaggccgaggcgggtggatcacgaggtcaggagattgagaccatcctggctaacacggtgaaaccccatctccactaaaaatacaaaaaattagcctggcgtggtggcgggcgcctgtagtcccagctactcgggaggctgaggcaggagaatagcgtgaacccgggaggcggagcttgcagtgagccgagatggcgccactctgcactccagcctgggtgacagagcaagactctgtctcaaaaagaaaaaaatgttcaatgatagaaaataattttactaggtttttatgttgattgtactcatggtgttccactccttttaattattaaaaagttatttttggggtgggtgtggtggctcacaccgtaatcccagcactttgggaggccgaggtgggtggatcacctgaggtcaggagttcaagaccagtntggccaacatggcgaaaccccgttttaaaaaaaaaaaaaaaaaaaaaaaagaaaaa

SEQ ID NO: 3002 - DNA, 4335 bp, Homo sapiens
acccactcccgctgccccgtccggcccgcgccgcttcctcgcagcagctgctcccggctccgcggccgcagcccgcgtggacgctccgagcgccccccgacggacgggaccggctccctggcggtcgggcgagcgggcggcaacgctgcccggccggcagcgctggggttaagtggcccaagtaaacctagctcggcgatcggcgccggagattcgcgagcccagcgccctgcacggccgccagccggcctcccgccagccagccccgacccgcggctccgccgcccagccgcgccccagccagccctgcggcaggaaagcatgaagggagacaccaggcatctcaatggagaggaggacgccggcgggagggaagactcgatcctcgtcaacggggcctgcagcgaccagtcctccgactcgcccccaatcctggaggctatccgcaccccggagatcagaggccgaagatcaagctcgcgactctccaagagggaggtgtccagtctgctaagctacacacaggacttgacaggcgatggcgacggggaagatggggatggctctgacaccccagtcatgccaaagctcttccgggaaaccaggactcgttcagaaagcccagctgtccgaactcgaaataacaacagtgtctccagccgggagaggcacaggccttccccacgttccacccgaggccggcagggccgcaaccatgtggacgagtcccccgtggagttcccggctaccaggtccctgagacggcgggcaacagcatcggcaggaacgccatggccgtcccctcccagctcttaccttaccatcgacctcacagacgacacagaggacacacatgggacgccccagagcagcagtaccccctacgcccgcctagcccaggacagccagcaggggggcatggagtccccgcaggtggaggcagacagtggagatggagacagttcagagtatcaggatgggaaggagtttggaataggggacctcgtgtggggaaagatcaagggcttctcctggtggcccgccatggtggtgtcttggaaggccacctccaagcgacaggctatgtctggcatgcggtgggtccagtggtttggcgatggcaagttctccgaggtctctgcagacaaactggtggcactggggctgttcagccagcactttaatttggccaccttcaataagctcgtctcctatcgaaaagccatgtaccatgctctggagaaagctagggtgcgagctggcaagaccttccccagcagccctggagactcattggaggaccagctgaagcccatgttggagtgggcccacgggggcttcaagcccactgggatcgagggcctcaaacccaacaacacgcaaccagtggttaataagtcgaaggtgcgtcgtgcaggcagtaggaaattagaatcaaggaaatacgagaacaagactcgaagacgcacagctgacgactcagccacctctgactactgccccgcacccaagcgcctcaagacaaattgctataacaacggcaaagaccgaggggatgaagatcagagccgagaacaaatggcttcagatgttgccaacaacaagagcagcctggaagatggctgtttgtcttgtggcaggaaaaaccccgtgtccttccaccctctctttgagggggggctctgtcagacatgccgggatcgcttccttgagctgttttacatgtatgatgacgatggctatcagtcttactgcactgtgtgctgcgagggccgagagctgctgctttgcagcaacacgagctgctgccggtgtttctgtgtggagtgcctggaggtgctggtgggcacaggcacagcggccgaggccaagcttcaggagccctggagctgttacatgtgtctcccgcagcgctgtcatggcgtcctgcggcgccggaaggactggaacgtgcgcctgcaggccttcttcaccagtgacacggggcttgaatatgaagcccccaagctgtaccctgccattcccgcagcccgaaggcggcccattcgagtcctgtcattgtttgatggcatcgcgacaggctacctagtcctcaaagagttgggcataaaggtaggaaagtacgtcgcttctgaagtgtgtgaggagtccattgctgttggaaccgtgaagcacgaggggaatatcaaatacgtgaacgacgtgaggaacatcacaaagaaaaatattgaagaatggggcccatttgacttggtgattggcggaagcccatgcaacgatctctcaaatgtgaatccagccaggaaaggcctgtatgagggtacaggccggctcttcttcgaattttaccacctgctgaattactcacgccccaaggagggtgatgaccggccgttcttctggatgtttgagaatgttgtagccatgaaggttggcgacaagagggacatctcacggttcctggagtgtaatccagtgatgattgatgccatcaaagtttctgctgctcacagggcccgatacttctggggcaacctacccgggatgaacaggcccgtgatagcatcaaagaatgataaactcgagctgcaggactgcttggaatacaataggatagccaagttaaagaaagtacagacaataaccaccaagtcgaactcgatcaaacaggggaaaaaccaacttttccctgttgtcatgaatggcaaagaagatgttttgtggtgcactgagctcgaaaggatctttggctttcctgtgcactacacagacgtgtccaacatgggccgtggtgcccgccagaagctgctgggaaggtcctggagcgtgcctgtcatccgacacctcttcgcccctctgaaggactactttgcatgtgaatagttccagccaggccccaagcccactggggtgtgtggcagagccaggacccaggaggtgtgattcctgaaggcatccccaggccctgctcttcctcagctgtgtgggtcataccgtgtacctcagttccctcttgctcagtgggggcagagccacctgactcttgcaggggtagcctgaggtgccgcctccttgtgcacaaatcagacctggctgcttggagcagcctaacacggtgctcattttttcttctcctaaaactttaaaacttgaagtaggtagcaacgtggctttttttttttcccttcctgggtctaccactcagagaaacaatggctaagataccaaaaccacagtgccgacagctctccaatactcaggttaatgctgaaaaatcatccaagacagttattgcaagagtttaatttttgaaaactggctactgctctgtgtttacagacgtgtgcagttgtaggcatgtagctacaggacatttttaagggcccaggatcgttttttcccagggcaagcagaagagaaaatgttgtatatgtcttttacccggcacattccccttgcctaaatacaagggctggagtctgcacgggacctattagagtattttccacaatgatgatgatttcagcagggatgacgtcatcatcacattcagggctattttttcccccacaaacccaagggcaggggccactcttagctaaatccctccccgtgactgcaatagaaccctctggggagctcaggaaggggtgtgctgagttctataatataagctgccatatattttgtagacaagtatggctcctccatatctccctcttccctaggagaggagtgtgaagcaaggagcttagataagacaccccctcaaacccattccctctccaggagacctaccctccacaggcacaggtccccagatgagaagtctgctaccctcatttctcatctttttactaaactcagaggcagtgacagcagtcagggacagacatacatttctcataccttccccacatctgagagatgacagggaaaactgcaaagctcggtgctccctttggagattttttaatccttttttattccataagaagtcgtttttagggagaacgggaattcagacaagctgcatttcagaaatgctgtcataatggtttttaacaccttttactcttcttactggtgctattttgtagaataaggaacaacgttgacaagttttgtggggctttttatacactttttaaaatctcaaacttctatttttatgtttaacgttttcattaaaattttttttgtaactggagccacgacgtaacaaatatggggaaaaaactgtgccttgtttcaacagtttttgctaatttttaggctgaaagatgacggatgcctagagtttaccttatgtttaattaaaatcagtatttgtct

SEQ ID NO: 3003 - DNA, 1523 bp, Homo sapiens
ccgagcggtgccaggccaggtgtgtgcgtccgtcggtctttccgtgcccacgccggagaccagccccggaggccgcctgggcctatccctgtgccaggcaccatgaagcaggagtctgcagccccgaacaccccgcccacctcgcagtcccctacgccgtccgctcagttcccccgaaacgacggcgaccctcaagcgctgtggattttcgggtacggctccctggtgtggaggcccgacttcgcctacagcgacagccgtgtgggcttcgtgcgcggctacagccgccgtttctggcagggagacaccttccatcggggcagcgacaagatgcctggccgtgtggtgacgctccttgaagatcatgagggctgcacttggggcgtggcataccaagtgcaaggggagcaggtaagcaaggccctgaagtacctgaatgtgcgagaggcagtgcttggtggctacgataccaaggaggtcaccttctatccccaagatgctcctgaccaaccactgaaggcattggcctatgtggccaccccacagaaccctggttacctgggccctgcgcctgaagaggccattgccacgcagatcctggcctgccggggcttctccggccacaaccttgaatacttgctgcgtctggcagacttcatgcagctctgtgggcctcaggcgcaggacgagcacctggcagccatcgtggacgctgtgggcaccatgttgccctgcttctgccccaccgagcaggctctggcgctggtgtgaggggctgagcccctgcggggagtgctcatgtggacatcagggccagacacccactccagtgcacaagacagacttgcgaccgcttgagcccactgagcagatatggtgggtggctggaggcttctctttctcagtccctgcctgtctgccagcctgcagctctcctgcttgacactgacttactacttgaaactttatttattgcaccatgttggtgtggtgggcaggtggagggcctgccctggacacaggggccctgctgagcagtggccccatcctggaacttgaccagattccccccagtgctgctgctaaccccacaccacccaggcctccacctccccagggagtctccaagagcctcgatcctctgctcactcagcccagccatccatagccctgggaattccacctgccaaggatcccagcaggctggatgagggatagtagggcatgaggagaaggagccctgtaaggactgaggccccggccagcccttctcctccaccagttccccagagcagagctggagctgatgcctggacacagctgctgagcctggcctgggcctcttacccacttggttgttttcttgtccctctgtctgtctgtctatctacttgtctgtctgggccactcctgcctgtgtgttggtctattcctgggaagctcatcactacaggccctggcaaccttcccagtctgtcccatactgttacccataaaactatctctttaaaaaaaaaaaaaaa

SEQ ID NO: 3004 - DNA, 806 bp, Homo sapiens
ttacatttttctccaagaagccatcaaagtagaaagcatagaggatgtcagaaatcagtgtactgaccatggagcggacatgataagcatacataatgaagaagaaaatgcttttatactggatactttgaaaaagcaatggaaaggcccagatgatatcctactaggcatgttttatgacacagatgatgcgagtttcaagtggtttgataattcaaatatgacatttgataagtggacagaccaagatgatgatgaggatttagttgacacctgtgcttttctgcacatcaagacaggtgaatggaaaaaaggaaattgtgaagtttcttctgtggaaggaacactatgcaaaacagctatcccatacaaaaggaaatatttatcagataaccacattttaatatcagcattggtgattgctagcacggtaattttgacagttttgggagcaatcatttggttcctgtacaaaaaacattctgattctcgtttcaccacagttttttcaaccgcaccccaatcaccttataatgaagactgtgttttggtagttggagaagaaaatgaatatcctgttcaatttgactaagtttttggtaatcttgcactaagacatcaacaaaatgccctggcagagataacttgggaaagattttaatataaaacttgacattggatattagagctttaatggtattccttattccagtaacatttttatgtactcatctgctgtgaaaagtctttaggttcattaaaaaaacaggttttataaaaaaaaaaaaaaaaaaaaaaaagaaaaa

SEQ ID NO: 3005 - DNA, 769 bp, Homo sapiens
aggggagagagcagttaaggcacacagagcaccagctccctcctgcctgaagatgttccaccaaatttgggcagctctgctctacttctatggtattatccttaactccatctaccagtgccctgagcacagtcaactgacaactctgggcgtggatgggaaggagttcccagaggtccacttgggccagtggtactttatcgcaggggcagctcccaccaaggaggagttggcaacttttgaccctgtggacaacattgtcttcaatatggctgctggctctgccccgatgcagctccaccttcgtgctaccatccgcatgaaagatgggctctgtgtgccccggaaatggatctaccacctgactgaagggagcacagatctcagaactgaaggccgccctgacatgaagactgagctcttttccagctcatgcccaggtggaatcatgctgaatgagacaggccagggttaccagcgctttctcctctacaatcgctcaccacatcctcccgaaaagtgtgtggaggaattcaagtccctgacttcctgcctggactccaaagccttcttattgactcctaggaatcaagaggcctgtgagctgtccaataactgacctgtaacttcatgtaagtccccagatgggtacaatgggagctgagttgttggagggagaagctggagacttccagctccagctcccactcaagataataaagataatttttcaatcctcaaaaaaaaaaaaaaaaaaaaaaaaaaaaaa

SEQ ID NO: 3006 - DNA, 434 bp, Homo sapiens
actccgccttccacgtgcacccactgcctcttcccttctcgcttgggaactctagtctcgcctcgggttgcaatggaccccaactgctcctgtgccgctgcaggtgtctcctgcacctgcgccagctcctgcaagtgcaaagagtgcaaatgcacctcctgcaagaagagctgctgctcctgctgccctgtgggctgtgccaagtgtgcccagggctgcatctgcaaaggggcatcggagaagtgcagctgctgcgcctgatgtcgggacagccctgctcccaagtacaaatagagtgacccgtaaaatccaggattttttgttttttgctacaatcttgacccctttgctacattcctttttttctgtgaaatatgtgaataataattaaacacttagactggaaaaaaaaaaaaaaaaaaaaaaaaaaaaaa

SEQ ID NO: 3007 - DNA, 1475 bp, Homo sapiens; identical to SEQ ID NO: 629

SEQ ID NO: 3008 - DNA, 872 bp, Homo sapiens
ggacgcagcagccaccgccgcgtccctctctccacgaggctgccggcttaggacccccagctccgacatgtcgccctctggtcgcctgtgtcttctcaccatcgttggcctgattctccccaccagaggacagacgttgaaagataccacgtccagttcttcagcagactcaactatcatggacattcaggtcccgacacgagccccagatgcagtctacacagaactccagcccacctctccaaccccaacctggcctgctgatgaaacaccacaaccccagacccagacccagcaactggaaggaacggatgggcctctagtgacagatccagagacacacaagagcaccaaagcagctcatcccactgatgacaccacgacgctctctgagagaccatccccaagcacagacgtccagacagacccccagaccctcaagccatctggttttcatgaggatgaccccttcttctatgatgaacacaccctccggaaacgggggctgttggtcgcagctgtgctgttcatcacaggcatcatcatcctcaccagtggcaagtgcaggcagctgtcccggttatgccggaatcattgcaggtgagtccatcagaaacaggagctgacaacctgctgggcacccgaagaccaagccccctgccagctcaccgtgcccagcctcctgcatcccctcgaagagcctggccagagagggaagacacagatgatgaagctggagccagggctgccggtccaagtctcctacctcccccaaccctgcccgcccctgaaggctacctggcgccttgggggctgtccctcaagttatctcctctgctaagacaaaaagtaaagcactgtggtctttgccc

SEQ ID NO: 3009 - DNA, 1657 bp, Homo sapiens
gccatgagcagcccggatgcgggatacgccagtgacgaccagagccagacccagagcgcgctgcccgcggtgatggccgggctgggcccctgcccctgggccgagtcgctgagccccatcggggacatgaaggtgaagggcgaggcgccggcgaacagcggagcaccggccggggccgcgggccgagccaagggcgagtcccgtatccggcggccgatgaacgctttcatggtgtgggctaaggacgagcgcaagcggctggcgcagcagaatccagacctgcacaacgccgagttgagcaagatgctgggcaagtcgtggaaggcgctgacgctggcggagaagcggcccttcgtggaggaggcagagcggctgcgcgtgcagcacatgcaggaccaccccaactacaagtaccggccgcggcggcgcaagcaggtgaagcggctgaagcgggtggagggcggcttcctgcacggcctggctgagccgcaggcggccgcgctgggccccgagggcggccgcgtggccatggacggcctgggcctccagttccccgagcagggcttccccgccggcccgccgctgctgcctccgcacatgggcggccactaccgcgactgccagagtctgggcgcgcctccgctcgacggctacccgttgcccacgcccgacacgtccccgctggacggcgtggaccccgacccggctttcttcgccgccccgatgcccggggactgcccggcggccggcacctacagctacgcgcaggtctcggactacgctggccccccggagcctcccgccggtcccatgcacccccgactcggcccagagcccgcgggtccctcgattccgggcctcctggcgccacccagcgcccttcacgtgtactacggcgcgatgggctcgcccggggcgggcggcgggcgcggcttccagatgcagccgcaacaccagcaccagcaccagcaccagcaccaccccccgggccccggacagccgtcgccccctccggaggcactgccctgccgggacggcacggaccccagtcagcccgccgagctcctcggggaggtggaccgcacggaatttgaacagtatctgcacttcgtgtgcaagcctgagatgggcctcccctaccaggggcatgactccggtgtgaatctccccgacagccacggggccatttcctcggtggtgtccgacgccagctccgcggtatattactgcaactatcctgacgtgtgacaggtccctgatccgccccagcctgcaggccagaagcagtgttacacacttcctggaggagctaaggaaatcctcagactcctgggtttttgttgttgctgttgttgttttttaaaaggtgtgttggcatataatttatggtaatttattttgtctgccacttgaacagtttgggggggtgaggtttcatttaaaatttgttcagagatttgtttcccatagttggattgtcaaaaccctatttccaagttcaagttaactagctttgaatgtgtcccaaaacagcttcctccatttcctgaaagtttattgatcaaagaaatgttgtcctgggtgtgttttttcaatcttctaaaaaataaaatctggaatcctgcttttttgctctactagtacctctgtcacacta

SEQ ID NO: 3010 - DNA, 1149 bp, Homo sapiens; identical to SEQ ID NO: 2887

SEQ ID NO: 3011 - DNA, 3521 bp, Homo sapiens
agcggaggcttcttcggtgcccgagagggagcgggtgcccaagggggtggtccctgtggcaggtcccggggtgggggcgcggcgctccgggaagagccttccgcaggtccccgccccgtcacgtgggcgccggccccggccgctgcggtcggtccgctggttggtcgggcgcttggtccggcagttggtcggtgggccagtggcccgtcgctcgcttctgggctctcatgtttgaaggtgggagggacacgggagcggcccgcacacctgagccgcccggagaggagcctcggccccgtacccagtaagaagaggaggaggccaggcaggcaaaaggagtcatggcttctgatgctagtcatgcgctggaagctgccctggagcaaatggacgggatcattgcaggcactaaaacaggtgcagatcttagtgatggtacttgtgagcctggactggcttccccggcctcctacatgaaccccttcccggtgctccatctcatcgaggacttgaggctggccttggagatgctggagcttcctcaggagagagcagccctcctgagccagatccctggcccaacagctgcctacataaaggaatggtttgaagagagcttgtcccaggtaaaccaccacagtgctgctagtaatgaaacctaccaggaacgcttggcacgtctagaaggggataaggagtccctcatattgcaggtgagtgtcatcacagaccaagtagaagcccagggagaaaagattcgagacctggaagtgtgtctggaaggacaccaggtgaaactcaatgctgctgaagagatgcttcaacaggagctgctaagccgcacatctcttgagacccagaagctcgatctgatgactgaagtgtctgagctgaagctcaagctggttggcatggagaaggagcagagagagcaggaggagaagcagagaaaagcagaggagttactgcaagagctcaggcacctcaaaatcaaagtggaagagttggaaaatgaaaggaatcagtatgaatggaagctaaaggccactaaggctgaagtcgcccagctgcaagaacaggtggccctgaaagatgcagaaattgagcgtctgcacagccagctctcccggacagcagctctccacagtgagagtcacacagagagagaccaagaaattcaacgtctgaaaatggggatggaaactttgctgcttgccaatgaagataaggaccgtcggatagaggagcttacggggctgttaaaccagtaccggaaggtaaaggagattgtgatggtcactcaagggccttcggagagaactctctcaatcaatgaagaagaaccggagggaggtttcagcaagtggaacgctacaaataaggaccctgaagaattatttaaacaagagatgcctccaagatgtagctctcctacagtggggccacctccattgccacagaaatcactggaaaccagggctcagaaaaagctctcttgtagtctagaagacttgagaagtgaatctgtggataagtgtatggatgggaaccagcccttcccggtgttagaacccaaggacagccctttcttggcggagcacaaatatcccactttacctgggaagctttcaggagccacgcccaatggagaggctgccaaatctcctcccaccatctgccagcctgacgccacggggagcagcctgctgaggctgagagacacagaaagtggctgggatgacactgctgtggtcaatgacctctcatccacatcatcgggcactgaatcaggtcctcagtctcctctgacaccagatggtaaacggaatcccaaaggcattaagaagttctggggaaaaatccgaagaactcagtcaggaaatttctacactgacacgctggggatggcagagtttcgacgaggtgggctccgggcaaccgcagggccaagactctctaggaccagggactccaagggacagaaaagtgacgccaatgccccctttgcccagtggagcacagagcgtgtgtgtgcatggctggaggactttggcctggctcagtatgtgatctttgccaggcagtgggtatcttctggccacaccttattgacagccacccctcaggacatggaaaaggagctaggaattaagcacccactccacaggaagaagcttgttttagcagtgaaagccatcaacaccaaacaggaggagaagtctgcactgctagaccacatttgggtgacaaggtggcttgatgatattggcttaccccagtacaaagaccagtttcatgaatctagagttgacggacgaatgctgcaatacctaactgtgaacgatttactcttcttaaaagtcaccagccaactacatcatctcagcatcaaatgtgccattcacgtgctgcatgtcaacaagttcaacccccactgcctgcaccggcggccagctgatgagagtaacctttctccttcagaagttgtacagtggtccaaccacagggtgatggagtggttacgatctgtggacctggcagagtatgcacccaatcttcgagggagtggagtccatggaggcctcattatcctggagccacgcttcactggggacaccctggctatgcttctcaacatccccccacaaaagacgctcctcaggcgccacctgaccaccaagttcaatgccttgattggtccggaggctgaacaggaaaagcgagagaaaatggcctcaccagcttacacaccactgaccaccacagccaaagtccggccaaggaaactaggattttcacacttcggaaacataagaaaaaagaagttcgatgaatcgacggactacatttgcccaatggagcccagtgacggtgtcagtgatagtcacagggtctacagtggctaccggggcctcagcccccttgatgcccctgaactggatgggctggaccaggtgggacagattagctgatgcccttgtcacctgccctctgtgcaccctgagagctcacagtaacactgtgtgtgtcaccatataactgcacctcacccccgcacgtgtgcatgactcgcagagaatattccagcaattgtgtacccctgggccagtctctttgaaccctgagggtggccaggatctggagctgcatctctaaggggccaggctttggggaccattgccaaaggtggactcaggaggaaagacacttaaagacacttttacatgtctagtaattcttgatgttcatcttcagcaccagtggaaacacatgaacttcgatgcaggtccagagaccatggacactcccacgaggctcagctctcaggcaccccctacacttcagttgagggaaaagctcaagtgccttaggcccgtggaccacagtcttggctgagatcaaagggatgagcaacagggacttctgccacagtgacaatggaattgtgttgtgccttacttcagaggtggtctcttctttcttgtaataaaagcaatatttatgcaaaaaaaaaaaaaaaa

SEQ ID NO: 3012 - DNA, 1673 bp, Homo sapiens
cgcctcgctcccggaccccacggctgcaaactgatctggcgcgcggggaggaggagagcgcaggcgagcgaacccgcgagagagggagagagcgagcgagcaacagcgagagcgagagcgagagagccgggaggcagagggagtagtgaccgccttccggagccgggattcatgcctgtcctcgggaccagcgaaggggactttacggctgagtatgagccaggctgctaggagccaggtacccccacgcctgcagtccccgcgccgtgcccggaatgcgagctggacgcagggctctcccaagttcccaccgagccgaataaaaagcgtccgcccgcagctctccgccaaagacggacattgactccaggactccacagaatggagcaagaatgagaggaaaaaggccggcagaaaagcatgaactggaggtttgttgagctcctctacttcctgtttatatggggccgtatctcagtgcagccctcccaccaggaaccagctgggacagaccaacatgtctccaaggaatttgattggctcatttcagacagggggcctttccaccactccaggagctacctatcctttgtggaaagacaccgtcaaggatttacaaccagatataaaatatacagggagtttgcccgttggaaggtgaggaacacagccatcgagaggagagatctggtccgccatccagtgcccctcatgccggagtttcaaaggagcatccgcctgcttggcaggagacctaccactcagcagttcatcgataccatcatcaaaaagtacggcacccacctgctcatctcagccacattgggaggggaggaggctttgaccatgtatatggacaaaagtcgcctcgacaggaagtcagggaatgccactcaaagtgttgaagctctgcaccagctcgcatcatcctactttgttgaccgtgatggtaccatgaggaggcttcatgagatccagatatcaactggagcaatcaaggtcacagagacacgcactgggcctctgggctgtaacagttatgacaatctggactctgtgagttccgtccttctgcaaagcacggagagcaaactgcaccttcaaggtcttcagataatctttcctcagtatctgcaagagaagtttgtccagtcggccttgagctatatcatgtgcaatggggagggggagtacctgtgccagaacagccagtgtcgctgccaatgtgccgaggagtttccgcagtgcaactgccccatcacggacatccagatcatggagtacacgctggccaacatggccaagtcttgggccgaagcttataaggacctggagaattcaggtagagagtctcactcagtgccactgcatgagtggccttgagccaagtctgaaagggagctaatctaactggaattaggactgctgcaagggaaagttcagtgaccctgaccctttcactttggagtgtccagatgcaagtataatagctgtcacagagcaggcactcaataaatctcaactgaataaaattaatgaatagcataatccagtttgtggtcatatgatgtattgtttctgtcgtacccagaagacagaaagaataaatctgcataggaagcctctggagagggaagagtcgaaaaaaaaaaaaaaaaaaaaaaaaaaaaaaa

SEQ ID NO: 3013 - DNA, 1994 bp, Homo sapiens
agttgggctttgaagaattccatcccactggcactgaggagaatatttctccgtcttgcttacccatctcccagttttttggaattttctctagctgttactccagaggattatgtttctttcaaagccttctgtgtacatctgtcttttcacctgtgtcctccaactcagccacagctggtcggtgaacaatttcctgatgactggtccaaaggcttacctgatttactccagcagtgtggcagctggtgcccagagtggtattgaagaatgcaagtatcagtttgcctgggaccgctggaactgccctgagagagccctgcagctgtccagccatggtgggcttcgcagtgccaatcgggagacagcatttgtgcatgccatcagttctgctggagtcatgtacaccctgactagaaactgcagccttggagattttgataactgtggctgtgatgactcccgcaacgggcaactggggggacaaggctggctgtggggaggctgcagtgacaatgtgggcttcggagaggcgatttccaagcagtttgtcgatgccctggaaacaggacaggatgcacgggcagccatgaacctgcacaacaacgaggctggccgcaaggcggtgaagggcaccatgaaacgcacgtgcaagtgccacggcgtgtctggcagctgcaccacgcagacctgttggctgcagctgcccgagttccgcgaggtgggcgcgcacctgaaggagaagtaccacgcagcactcaaggtggacctgctgcagggtgctggcaacagcgcggccggccgcggcgccatcgccgacacctttcgctccatctctacccgggagctggtgcacctggaggactccccggactactgcctggagaacaaaacgctagggctgctgggcaccgaaggccgagagtgcctaaggcgcgggcgggccctgggtcgctgggaacgccgcagctgccgccggctctgcggggactgcgggctggcggtggaggagcgccgggccgagaccgtgtccagctgcaactgcaagttccactggtgctgcgcagtccgctgcgagcagtgccgccggagggtcaccaagtacttctgtagccgcgcagagcggccgcgggggggcgctgcgcacaaacccgggagaaaaccctaagggtttcctctgccccctccttttcccactggttcttggcttcctttagagaccccggtaattgtggaacctagggaatggggaacccgctctcccagacctagggatcctgagagggagagactgcaatttctccaaagcttgccactttccagcctgtttccccaattcctctgtgctctcctagagctctgtctgaatcctcgcagccacacctaggtctgagaactcaggctttgagttactgatcttccttggattaggagaacaggtgttcctcctcccctctcctagcagccctaatgtctgacctagcctatcaagccttaggcgctggaagaacccttctcagacacgcaggacccaggtaaagtcaaagctttgcccttttgcccactgtctgctaccagggctcacccactgctgcacctctcttctgcacagctcctcccctgctacctgctgagccagattccccaggaatcttgaatgctttctctcctcttctccctttcctttcccagaaaaactgaggaaactggccccggaaaagcatgtctttggggttggttcctagaggcagaggttgaagatggaagagggagctctggagtgctaacttgaacaccaagggtgctactcatccctatggtatcatatcatgaatggactttactagtggggcaatgactttcctagacaataacccgagggactccagatacataccccgaaggtctaggaaatacgttaagggcagattacagtcatttcctaccctttaaaggtaacttctcccttctcctgacctacttcctcctagcaa

SEQ ID NO: 3014 - DNA, 3371 bp, Homo sapiens
agcgggttccattcccgggggattggagtagcgttggagtcaccgacgccatcccctcccgcctctggcgtagcaggagcatgcgcttccttcctcacttcctctccaggagggagcgagagtaaagctacgccctggcgcgcagtctccgcgtcacaggaacttcagcacccacagggcggacagcgctcccctctacctggagacttgactcccgcgcgccccaaccctgcttatcccttgaccgtcgagtgtcagagatcctgcagccgcccagtcccggcccctctcccgccccacacccaccctcctggctcttcctgtttttactcctccttttcattcataacaaaagctacagctccaggagcccagcgccgggctgtgacccaagccgagcgtggaagaatggggttcctcgggaccggcacttggattctggtgttagtgctcccgattcaagctttccccaaacctggaggaagccaagacaaatctctacataatagagaattaagtgcagaaagacctttgaatgaacagattgctgaagcagaagaagacaagattaaaaaaacatatcctccagaaaacaagccaggtcagagcaactattcttttgttgataacttgaacctgctaaaggcaataacagaaaaggaaaaaattgagaaagaaagacaatctataagaagctccccacttgataataagttgaatgtggaagatgttgattcaaccaagaatcgaaaactgatcgatgattatgactctactaagagtggattggatcataaatttcaagatgatccagatggtcttcatcaactagacgggactcctttaaccgctgaagacattgtccataaaatcgctgccaggatttatgaagaaaatgacagagccgtgtttgacaagattgtttctaaactacttaatctcggccttatcacagaaagccaagcacatacactggaagatgaagtagcagaggttttacaaaaattaatctcaaaggaagccaacaattatgaggaggatcccaataagcccacaagctggactgagaatcaggctggaaaaataccagagaaagtgactccaatggcagcaattcaagatggtcttgctaagggagaaaacgatgaaacagtatctaacacattaaccttgacaaatggcttggaaaggagaactaaaacctacagtgaagacaactttgaggaactccaatatttcccaaatttctatgcgctactgaaaagtattgattcagaaaaagaagcaaaagagaaagaaacactgattactatcatgaaaacactgattgactttgtgaagatgatggtgaaatatggaacaatatctccagaagaaggtgtttcctaccttgaaaacttggatgaaatgattgctcttcagaccaaaaacaagctagaaaaaaatgctactgacaatataagcaagcttttcccagcaccatcagagaagagtcatgaagaaacagacagtaccaaggaagaagcagctaagatggaaaaggaatatggaagcttgaaggattccacaaaagatgataactccaacccaggaggaaagacagatgaacccaaaggaaaaacagaagcctatttggaagccatcagaaaaaatattgaatggttgaagaaacatgacaaaaagggaaataaagaagattatgacctttcaaagatgagagacttcatcaataaacaagctgatgcttatgtggagaaaggcatccttgacaaggaagaagccgaggccatcaagcgcatttatagcagcctgtaaaaatggcaaaagatccaggagtctttcaactgtttcagaaaacataatatagcttaaaacacttctaattctgtgattaaaattttttgacccaagggttattagaaagtgctgaatttacagtagttaaccttttacaagtggttaaaacatagctttcttcccgtaaaaactatctgaaagtaaagttgtatgtaagctgagattttgtatacagaatccttatttcctcatagacttatattttataatcagaatatgttgctttgaaaaagcctctaatggactgaccttaaaactcatccttcttccactgtctcatccacataagcactccccgaagaattaagggggttctgttttcaaggcatgccaagtactaaagcaccttgcagagcgtgtctattacaagatgtcatttccaccagcagttcccttaggggagctgaaataaattcacattttctcaaagtctcatagctttggaggagccatctgcttttttggctgctctttttagctggctttttattaggctcagtgacataaaaaggatccaggtaaatgggtataggatttgctggatttactaacaatttccccctgttcttaacacttcctattagtgacttttcagacattgagtttacttataaagagagatatttatgtactctctaagaagacaaatgaggtcataaacactgcataaagcaaggcaaaaatgtatgccacatctcagttatctaaactagattagatccaagccaagttttctcaacagagagcaaagggccaggcagtaaggtagaaatagagataaaaatcattccttccttgtgatccaaagctggtcgagcagctttcctggaggaaaaggttaatgaacttcaggtccctgcaactcagcccccaccacaaacacagccctggaaacatacagtggcgcaaggtcctcttgaaatgttaatggttaatgttcccaaaccagagaatgctttgaaaatgtatcattcagtgtaaattaattacatacatatttttctatatatttgtttcaaactgtaaaaataacataatatgtaatttgtgtattagtgagaggtgaagccagctggacttcctgggtcgagtggggccttggagaacttttctgtcttacaagaggattgtaaaatgcacccatcagtgctctgtaaaacacaccaatcagcgctctgtagctagcaataggtttgtaaaatgcacccatcagcactctgtaaaacgcaccaatcagcactctgtaaaatgcaccaatcagcaggattctaaaagtagacaatcacagggaggattgaaaaaaagggcactctgatagggcaaaaacggaacatgggaggggacaaataagggaataaaatctggccaccccagccagcagcagcaacctgttcaggtcgcctgccgctgtggaagctttgtccttttgctcttcataataaaccttgctactgttcaaaaaaaaaaaaaaaaaaaaaaaaaaaaaaaaaaaaaaaaaaaaaaaaaaaaaaaaa

SEQ ID NO: 3015 - DNA, 757 bp, Homo sapiens
agcggagtctccgccttgcgagctcagagtgtgcccgctgcgccgccgctgtccatacctgccgccgccgccaccgccaccatgcccaacttcgccggcacctggaagatgcgcagcagcgagaatttcgacgagctgctcaaggcactgggtgtgaacgccatgctgaggaaagtggccgtagcggctgcgtccaagccgcacgtggagatccgccaggacggggatcagttctacatcaagacatccaccacggtgcgcaccactgagatcaacttcaaggtcggagaaggctttgaggaggagaccgtggacggacgcaagtgcaggagtttagccacttgggagaatgagaacaagatccactgcacgcaaactcttcttgaaggggacggccccaaaacctactggaccagtgagctggccaacgatgaacttatcctgacgtttggcgccgatgacgtggtctgcaccagaatttatgtccgagagtgaaggcagctggcttgctcctactttcaggaagggatgcaggctcccctgaggaatatgtcatagttctgagctgccagtggaccgcccttttcccctaccaatattaggtgatcccgttttccccatgacaatgttgtagtgtcccacaccaccaccccccaggccttggtgcctcttgtatccctagtgctccatagtttggcatttgcacggtttcgaagtcattaaactggttagacgtgtcgcaaaaaaaaaaaaaaaa

SEQ ID NO: 3016 - DNA, 2838 bp, Homo sapiens
ggggaaactcatttgtggagaccagccctctggcttggtgagtgaatctggtttacaccggctcctgccctgccttcactcttctcccctgattcaagactcctctgctttggactgaagcactgcaggagtttgtgaccaagaacttcaagagtcaagacagaaggaagccaagggagcagtgcaatggatttctcagtaaaggtagacatagagaaggaggtgacctgccccatctgcctggagctcctgacagaacctctgagcctagattgtggccacagcttctgccaagcctgcatcactgcaaagatcaaggagtcagtgatcatctcaagaggggaaagcagctgtcctgtgtgtcagaccagattccagcctgggaacctccgacctaatcggcatctggccaacatagttgagagagtcaaagaggtcaagatgagcccacaggaggggcagaagagagatgtctgtgagcaccacggaaaaaaactccagatcttctgtaaggaggatggaaaagtcatttgctgggtttgtgaactgtctcaggaacaccaaggtcaccaaacattccgcataaacgaggtggtcaaggaatgtcaggaaaagctgcaggtagccctgcagaggctgataaaggagaatcaagaggctgagaagctggaagatgacatcagacaagagagaaccgcctggaagaattatatccagatcgagagacagaagattctgaaagggttcaatgaaatgagagtcatcttggacaatgaggagcagagagagctgcaaaagctggaggaaggtgaggtgaatgtgctggataacctggcagcagctacagaccagctggtccagcagaggcaggatgccagcacgctcatctcagatctccagcggaggttgaggggatcgtcagtagagatgctgcaggatgtgattgacgtcatgaaaaggagtgaaagctggacattgaagaagccaaaatctgtttccaagaaactaaagagtgtattccgagtaccagatctgagtgggatgctgcaagttcttaaagagctgacagatgtccagtactactgggtggacgtgatgctgaatccaggcagtgccacttcgaatgttgctatttctgtggatcagagacaagtgaaaactgtacgcacctgcacatttaagaattcaaatccatgtgatttttctgcttttggtgtcttcggctgccaatatttctcttcggggaaatattactgggaagtagatgtgtctggaaagattgcctggatcctgggcgtacacagtaaaataagtagtctgaataaaaggaagagctctgggtttgcttttgatccaagtgtaaattattcaaaagtttactccagatatagacctcaatatggctactgggttataggattacagaatacatgtgaatataatgcttttgaggactcctcctcttctgatcccaaggttttgactctctttatggctgtgcctccctgtcgtattggggttttcctagactatgaggcaggcattgtctcatttttcaatgtcacaaaccacggagcactcatctacaagttctctggatgtcgcttttctcgacctgcttatccgtatttcaatccttggaactgcctagtccccatgactgtgtgcccaccgagctcctgagtgttctcattcctttacccacttctgcatagtagcccttgtgctgagactcagattctgcacctgagttcatctctactgagaccatctcttcctttctttccccttcttttacttagaatgtctttgtattcatttgctagggcttccatagcaaagcatcatagattgctgatttaaactgtaattgtattgccgtactgtgggctggaaatcccaaatctagattccagcagagttggttctttctgaggtctgcaaggaagggctctgttccatgcctctctccttggcttgtagaaggcatcttgtccctatgactcttcacattgtctttatgtacatctctgtgcccaagttttcccttttttattaagacaccagtcatactggctcagggcccaccgctaatgccttaatgaaatcattttaacattatattctctacaaagaccttatttccaaataagataatatttggaggtattgggaataaaaactccaacatataaatttgaggaaggcacgatttcactcataacaatcttaccctttcttgcaagagatgcttgtacataattttcctaataccttggtttcactagtagtaaacattattattttttttatatttgcaaaggaaacatatctaatccttcctatagaaagaacagtattgctgtaattccttttcttttcttcctcatttcctctgccccttaaaagattgaagaaagagaaacttgtcaactcatatccacgttatctagcaaagtacataagaatctatcactaagtaatgtatccttcagaatgtgttggtttaccagtgacaccccatattcatcacaaaattaaagcaagaagtccatagtaatttatttgctaatagtggatttttaatgctcagagtttctgaggtcaaattttatcttttcacttacaagctctatgatcttaaataatttacttaatgtattttggtgtattttcctcaaattaatattggtgttcaagactatatctaattcctctgatcactttgagaaacaaacttttattaaatgtaaggcacttttctatgaattttaaatataaaaataaatattgttctgattattactgaaaaaaaaaaaaaaaaaaaaaaaaaaaaaa

SEQ ID NO: 3017 - DNA, 1049 bp, Homo sapiens
ggagtctggaccacgcagactcagaacagcactactcacagcagggcctcttgctcgctctagctgctgggaggaaaacggcttgctaatctccacgcccagaaattcagacaagagcattctccttatctcatctgcacaggaagcaggtctaagtgtaatttcacaagcccctgactctgtgtagacacccagctctccagaaaaatgctttgaagacaaaggatacagcatacagtcccgtgtctcggctgagtcatcgcattccttaatagtgtcttctccccgggtttggtggcctgcttctggagtggtcagttctgctgccgacatgcccacccagctcgagatggccatggacaccatgattagaatcttccaccgctattctggcaaggcaaggaagagattcaagctcagcaagggggaactgaaactgctcctgcagcgagagctcacggaattcctctcgtgccaaaaggaaacccagttggttgataagatagtgcaggacctggatgccaataaggacaacgaagtggattttaatgaattcgtggtcatggtggcagctctgacagttgcttgtaatgattactttgtagaacaattgaagaagaaaggaaaataaaggtaagtaataagctcatctaaaggcagaaatatatccaaagttatgtacttaatgttcatttatacccttcagatctatagacccagtaatgtcatttatagctataatatccagtgcatatattaataattaattgctactattgaattatgtgccccttaaaatattgactttatgtaaatattctaaatctcatatgccctacctgaaacttgcctgtattattaagaggctatatgcatctttttggtttgtcaaaacgagggcattacaaaaatttagctactttcaaatgagacttgaatttggcaaatttctaagatggacattcatatccttaaattgtattttgaacttcttaccctattaaaaaaaattaactggcaaaaaaaaaaaaaaaaaaaaaaaaaaaaaa

SEQ ID NO: 3018 - DNA, 2089 bp, Homo sapiens
ggagcgtctcctgctcgcgcacgccagaagcagctcggggtctctccgccgccgccgccgctcgcccgcccggatcccgcctgcggcagttgccgcacaacatgctacctgcggccgccccggcggctcctggaaccccggttcgcggcgatgccagccaccccagcgaagccgccgcagttcagtgcttggataatttgaaagtacaatagttggtttccctgtccacccgccccacttcgcttgccatcacagcacgcctatcggatgtgagaggagaagtcccgctgctcgggcactgtctatatacgcctaacacctacatatattttaaaaacattaaatataattaacaatcaaaagaaagaggagaaaggaagggaagcattactgggttactatgcacttgcgactgatttcttggctttttatcattttgaactttatggaatacatcggcagccaaaacgcctcccggggaaggcgccagcgaagaatgcatcctaacgttagtcaaggctgccaaggaggctgtgcaacatgctcagattacaatggatgtttgtcatgtaagcccagactattttttgctctggaaagaattggcatgaagcagattggagtatgtctctcttcatgtccaagtggatattatggaactcgatatccagatataaataagtgtacaaaatgcaaagctgactgtgatacctgtttcaacaaaaatttctgcacaaaatgtaaaagtggattttacttacaccttggaaagtgccttgacaattgcccagaagggttggaagccaacaaccatactatggagtgtgtcagtattgtgcactgtgaggtcagtgaatggaatccttggagtccatgcacgaagaagggaaaaacatgtggcttcaaaagagggactgaaacacgggtccgagaaataatacagcatccttcagcaaagggtaacctgtgtcccccaacaaatgagacaagaaagtgtacagtgcaaaggaagaagtgtcagaagggagaacgaggaaaaaaaggaagggagaggaaaagaaaaaaacctaataaaggagaaagtaaagaagcaatacctgacagcaaaagtctggaatccagcaaagaaatcccagagcaacgagaaaacaaacagcagcagaagaagcgaaaagtccaagataaacagaaatcggtatcagtcagcactgtacactagagggttccatgagattattgtagactcatgatgctgctatctcaaccagatgcccaggacaggtgctctagccattaggaccacaaatggacatgtcagttattgctctgtctaaacaacattcccagtagttgctatattcttcatacaagcatagttaacaacaaagagccaaaagatcaaagaagggatactttcagatggttgtcttgtgtgcttctctgcatttttaaaagacaagacattcttgtacatattatcaataggctataagatgtaacaacgaaatgatgacatctggagaagaaacatcttttccttataaaaatgtgttttcaagctgttgttttaagaagcaaaagatagttctgcaaattcaaagatacagtatcccttcaaaacaaataggagttcagggaagagaaacatccttcaaaggacagtgttgttttgaccgggagatctagagagtgctcagaattagggcctggcatttggaatcacaggatttatcatcacagaaacaactgttttaagattagttccatcactctcatcctgtatttttataagaaacacaagagtgcataccagaattgaatataccatatgggattggagaaagacaaatgtggaagaaatcatagagctggagactacttttgtgctttacaaaactgtgaaggattgtggtcacctggaacaggtctccaatctatgttagcactatgtggctcagcctctgttaccccttggattatatatcaacctgtaaacatgtgcctgtaacttacttccaaaaacaaaatcatacttattagaagaaaattctgattttataaaaaaaaaaaaaaaaaaaaaaaaaaaaaa

SEQ ID NO: 3019 - DNA, 5266 bp, Homo sapiens
tcggtcctcagaggaggggcccgggcaccctccgtgcgggccgcagcacgccggtctttgagggacccttggactcccggatctgcatgcgagggatgcggtcgaagacgagatgagggagctgacgggaggggaaacggaggggcaggtgaacatggagagagcaggaacagggagagagtagggacagcgactgggagacgcgctccacagaaacccggactgagaggcagcgagaggacggagtcttgctctgttgcctaggctggagtagagtggtgttatcttggctcactgcaacctccgcctcccaggttcaagcgattctcctgcctcagcctcccaagtagttgggattacagacatctgaatgggactccgagtgccttacatccctgcagccccttcctcttcctacacccccagcagcaaatgaggcacacctgcagacagcagctatctctctgtggacagtggtggccgccgtgcaggctatagagaggaaggtggagatccacagccggcgactcctacacctggaaggtcggacagggacagcagagaagaaactagccagctgtgaaaagacagttaccgagcttgggaaccagctggagggcaagtgggccgtgctgggaaccctgctgcaggagtacgggctgctgcagaggcggctggagaacttggagaacctgctgcgcaacaggaacttctggatcctgcggctccctccaggtattaagggagatatcccaaaggtgcctgtggcatttgatgatgtctccatctacttttccactccagagtgggaaaaattagaagaatggcaaaaggaactttacaagaatatcatgaagggcaactacgagtctctcatctccatggattatgctataaatcaacctgatgtcttatctcagattcaaccagaaggggaacataatacagaggaccaggcagggccagaggaaagtgagattcccacagaccccagtgaagagcctggtatttcaacatcagatattctgtcttggattaaacaagaagaagagcctcaggttggggccccaccggagtccaaggagagtgacgtgtacaaaagcacttatgctgatgaagagcttgtcatcaaagctgaaggccttgctagatcctcgttgtgccctgaggttccagtccctttctcttctccaccagcagcagcaaaggatgctttttcagatgtggctttcaaaagccagcagtctacatccatgacaccttttggacgtccagccactgacctgcctgaagcctctgagggacaagtgacttttactcagttgggtagctatcccctcccacctccagttggcgagcaggtgttctcatgccaccactgtggcaagaatctcagccaagacatgttgctgacccaccaatgtagccatgctactgagcaccccttaccctgtgcccagtgccctaagcactttactccacaggcggacctcagcagcacctcccaggaccatgccagcgagacaccccccacctgcccacactgtgccaggacttttactcacccatcaagacttacctaccatcttcgggtccataacagcactgagcgtcctttcccctgtcctgattgccccaagcgctttgctgaccaggctcgactcaccagccaccggagagctcatgcaagcgaaaggcccttccgctgtgcccagtgcggcaggagcttcagcttgaaaatcagcctcctgctccaccagcggggtcatgcacaagagcgccctttctcctgccctcagtgtggcattgacttcaacggccactcggccctgatccgccaccagatgatccacacaggcgagcgtccttacccctgcactgactgcagtaagagcttcatgcgcaaggagcacctgctgaaccaccggcggctgcacacaggcgagcggcccttcagttgtcctcactgtggcaagagcttcatccgcaagcaccacctaatgaaacaccagcgcatccacaccggggagcggccctacccctgctcctactgtggcaggagcttccgctacaaacagacactcaaggaccacctccgttcaggccacaatggaggctgtgggggtgatagtgacccatcaggtcagccacccaacccaccaggtcccctcataactgggcttgaaacttctggcctgggtgtcaacactgaaggtctagagaccaaccagtggtatggggaagggagtggagggggagttttgtaaatccaaatctctgtggcttcatgcttgtatatgctcacagcagggcacaaaatccaagagaaggtctgtgagccccatccaacacccacagtaattattatctggcacatcaatgaatttggggtcctatacacttgactagagacatgcttgtgttttggaatttcacacccttacaagaataccacattttgaaacccagaaagacctggaaaggagcccagcatgtccatcttttcaaagatacaacaaaagcagaagttacaagaatattgcggagaggttggaaagcaggatttaacctctagttctcttgttctcagagaacagcaggttgatagtagattatgtctctaggtagagacagatacatgagaagagcctccaaaactggaagcccatcataaggcatgagaatgtttaactataaagccttttattagttctttgatagctaagatggttgttggagaaagtgcttaagccactgtttatgttgctgcctcctctctcaaaaccagccaagatctgttcacacacctctgtggctgtctttccctgaaacatggtaactcaagactgcctgcctaggtttcttagattaattattcacataaattttgtttaatattggttgaacaagaaatctgactttaaaagattattaaggagaatattccttaactatactggcttgatttgaaacaggctcttattgccatttaaactgccagaaatctttgccaaggtcctggttaaaaaaattggaaacggttttcttagccccagctttaaaagctagagatctcagagaaatagctggcttaacaatgacagaacagcttaaaatttgtgcctacaccatgttctgagagtcgttcacatcaaattcttatcttttccaagccagtaagttggcttctccattcctggtgtctgatattcttgacaatcatcagcaacaaagatcacagcactttccagaagcatggagcttcagaaagtgccagtgaactcttggtcctcagtagtgagatgataacagtgttataatgcagcttccttgagccatcagagagagtgtatgttcaccctatctggctgtatcccattggcagtggacagattgaggaaattcctagatcactgagagctaagcaccatgcatagacaacagtttgttcttgcctgtgttgcttttagggactttgactaccacatgttcttttcttggggtgatttaatcacctgggagcatctgagtctgctcctaagtggctttgcaactgggcctaagttctgtttcctttatggatctcaaattttcatctgcacaatgaggctgttgaaaggaaaaaaagtgagcctctaggaattattcaaaaaaagtctgtgatacattccttttcctgccaaagttctgtctctgtctttggcttctgtccaggcaaagctaaataagacagcaaagtcaaagcagataaattcttgttgaaacttgactaaaatttatttgatttgttgttttactcccacttggaatcctgaggtagaagacagaatgcagaagtcttacatcttgggcaggaaactggtttattcctatactcttgtttcctctgcttcttcctgaggtctagaacaaggtctggaaatgtttagacaggatattttcttgatgaagtgataaggaaaggacccatttttttgctcatcacctagcccatccttcactctctctagttatgcataacaacactagaagaaggtgttagcccagctaactttgcttctgggaaggctatgtctgaacatgttgctctgtaggataatcacacttagaaaacatctgctccatgacattcacaataccagggaccatgggagacacaagaaatgtgtgtctgctgtcataacttacagtgaaaaagcccaataatacagaacaagacatgatgggcaataccctagcatattgggattaagagctttctagccagaatctggacctataccatgggaaaatttaggggtgctgggaatcccaaagccaaggttctggcttcattggcaacccactaggaacttgaatgtgagattcagctctagtttgcaccttgatttccccagtgaaaagggagaagagccaaagtattgtctaggtgctgagttcccttttctgagtggatttcaagcatttgccagggtatgctggaggagggactcctaaagtaggtgagatgtgggactaggtaacactttaaatacttttttactcaaagatttgccaagaacacagcttattagtgaaagagacctgtggattgaaatggctgcagatagatcccgcagtcccttctgaaaggaactgtgtagccagcagggacctaaactttggcaaaaagtgaacacaattcaaatacgaatgaaggaagagccctcagatggaacgaaaggcgatgtgcaaggccatcccagagagacggaagcaggtgcgatactaagcctcagcccaagaataaaagagagttcaactgttactcttttctttcatcaatcccctatcagttagaactgcaggccagttccaaagagtgtttgcttaagattcaaaagtgggtaagtaaaatggatcagtgggaaggataaggtgtccaacagaaagtgtggaggagaaactcttggcctatcaagtgctcctgagagaaaccatgcaatttaacacttcagttaaagaaatacatgagaactgcttgtcatgaccagacaagataggaaaggggaaaccccagaaacgtgctcttcatctgtcagccttttggaccaagaagctgtcactatcacacataagcaccattcccttagagtggatccaggtgttgactataaccagatttactctttgcttactaggttttccattgtcaccattggatgaacctctggtttagccacagttgtgaaaataaatggaagttggttgattgtctagaaagtgc

SEQ ID NO: 3020 - DNA, 1838 bp, Homo sapiens
acagcccgcatcccgccggggaagcgagcccagtccagcgctgcccgtccagtcctcgcccaagatttaaagcccgcaagttttgttcttgagaccagcgactttagctccgatgcgggaaggaaagccgacctccgatttggacatttaaagagctgggcttgaacttcgtgagtttcgctctaaactgcccttgaaatgaagctggacttggaggtggcatggaatattcacatgggagagccgcatgaggccgcccaccacgcttcctgaaggatgcccgtgtggaagaattttgacgtgccagtgtcctcgttctacagggtgttccattcttccgcaatctcagaaaaatgggactaaaagaaactattttgtaaaataagaagacttccatttttaatgaccaacatgtattaagatggacacctactctacgaaacacgaagttctatggtctcgaagaagcccgtgcctgtttaaaactgatcctaactaaaaacagacttgagtggatatgagaatgttggttagtggcagaagagtcaaaaaatggcagttaattattcagttatttgctacttgttttttagcgagcctcatgtttttttgggaaccaatcgataatcacattgtgagccatatgaagtcatattcttacagatacctcataaatagctatgactttgtgaatgataccctgtctcttaagcacacctcagcggggcctcgctaccaatacttgattaaccacaaggaaaagtgtcaagctcaagacgtcctccttttactgtttgtaaaaactgctcctgaaaactatgatcgacgttccggaattagaaggacgtggggcaatgaaaattatgttcggtctcagctgaatgccaacatcaaaactctgtttgccttaggaactcctaatccactggagggagaagaactacaaagaaaactggcttgggaagatcaaaggtacaatgatataattcagcaagactttgttgattctttctacaatcttactctgaaattacttatgcagttcagttgggcaaatacctattgtccacatgccaaatttcttatgactgctgatgatgacatatttattcacatgccaaatctgattgagtaccttcaaagtttagaacaaattggtgttcaagacttttggattggtcgtgttcatcgtggtgcccctcccattagagataaaagcagcaaatactacgtgtcctatgaaatgtaccagtggccagcttaccctgactacacagccggagctgcctatgtaatctccggtgatgtagctgccaaagtctatgaggcatcacagacactaaattcaagtctttacatagacgatgtgttcatgggcctctgtgccaataaaatagggatagtaccgcaggaccatgtgtttttttctggagagggtaaaactccttatcatccctgcatctatgaaaaaatgatgacatctcatggacacttagaagatctccaggacctttggaagaatgctacagatcctaaagtaaaaaccatttccaaaggtttttttggtcaaatatactgcagattaatgaagataattctcctttgtaaaattagctatgtggacacatacccttgtagggctgcgtttatctaatagtacttgaatgttgtatgttttcactgtcactgagtcaaacctggatgaaaaaaacctttaaatgttcgtctataccctaagtaaaatgaggacgaaagacaaaaaaaaaaaaaaaaaaaaaaaaaaaaaaaaaaaaaaaaaaaaaaaaaaaaaaaaaaaaaaaaaaaaaaaaaaaaaaaaa

SEQ ID NO: 3021 - DNA, 4854 bp, Homo sapiens
tttgtgtctatttttttaaacattacatttgtcataatcattcatattgttgtgtgtagttgtagtttgttcattattattgctataaagaatttcattttatgaataaaatgcaatgtattcattcattatagtgttcacgaacattttgactgtttctattttgggtttatgaatattctagtaaatattttttagtaaattctcacttgttgttaagtacaatttatagaggataggaagtggcaacaacaatgagtgttccccttttgcctatgggaaaagagaggcaaagggagaattagtgttagtggcccaataaggcttctggtgcctgtttcctgattcttgggacagagcacattcttcctgctacaccattgaaaaaactggatccagatctctcttctgaaggaactagtaatacatgattagcagcacgggtgactttttaactatgcccttcaaaatccaatcattgaaaacttattgaattaaaaggaatcaggtaagttaaagaaactgggctaaatgggttttgctttctcagtcactcaacctggctcttgcctcttcagttttctggacacgtagaaagcccctttgttctctttcttctacaccagcagtttttatttgcctgtttcccagagtaatgtgggccatggagtcaggccacctcctctgggctctgctgttcatgcagtccttgtggcctcaactgactgatggagccactcgagtctactacctgggcatccgggatgtgcagtggaactatgctcccaagggaagaaatgtcatcacgaaccagcctctggacagtgacatagtggcttccagcttcttaaagtctgacaagaaccggatagggggaacctacaagaagaccatctataaagaatacaaggatgactcatacacagatgaagtggcccagcctgcctggttgggcttcctggggccagtgttgcaggctgaagtgggggatgtcattcttattcacctgaagaattttgccactcgtccctataccatccaccctcatggtgtcttctacgagaaggactctgaaggttccctatacccagatggctcctctgggccactgaaagctgatgactctgttcccccggggggcagccatatctacaactggaccattccagaaggccatgcacccaccgatgctgacccagcgtgcctcacctggatctaccattctcatgtagatgctccacgagacattgcaactggcctaattgggcctctcatcacctgtaaaagaggagccctggatgggaactcccctcctcaacgccaggatacagaccatgatttcttcctcctcttcagtgtggtagatgagaacctcagctggcatctcaatgagaacattgccacttactgctcagatcctgcttcagtggacaaagaagatgagacatttcaggagagcaataggatgcatgcaatcaatggctttgtttttgggaatttacctgagctgaacatgtgtgcacagaaacgtgtggcctggcacttgtttggcatgggcaatgaaattgatgtccacacagcatttttccatggacagatgctgactacccgtggacaccacactgatgtggctaacatctttccagccacctttgtgactgctgagatggtgccctgggaacctggtacctggttaattagctgccaagtgaacagtcactttcgagatggcatgcaggcactctacaaggtcaagtcttgctccatggcccctcctgtggacctgctcacaggcaaagttcgacagtacttcattgaggcccatgagattcaatgggactatggcccgatggggcatgatgggagtactgggaagaatttgagagagccaggcagtatctcagataagtttttccagaagagctccagccgaattgggggcacttactggaaagtgcgatatgaagcctttcaagatgagacattccaagagaagatgcatttggaggaagataggcatcttggaatcctggggccagtgatccgggctgaggtgggtgacaccattcaggtggtcttctacaaccgtgcctcccagccattcagcatgcagccccatggggtcttttatgagaaagactatgaaggcactgtgtacaatgatggctcatcttaccctggcttggttgccaagccctttgagaaagtaacataccgctggacagtcccccctcatgccggtcccactgctcaggatcctgcttgtctcacttggatgtacttctctgctgcagatcccataagagacacaaattctggcctggtgggcccgctgctggtgtgcagggctggtgccttgggtgcagatggcaagcagaaaggggtggataaagaattctttcttctcttcactgtgttggatgagaacaagagctggtacagcaatgccaatcaagcagctgctatgttggatttccgactgctttcagaggatattgagggcttccaagactccaatcggatgcatgccattaatgggtttctgttctctaacctgcccaggctggacatgtgcaagggtgacacagtggcctggcacctgctcggcctgggcacagagactgatgtgcatggagtcatgttccagggcaacactgtgcagcttcagggcatgaggaagggtgcagctatgctctttcctcatacctttgtcatggccatcatgcagcctgacaaccttgggacatttgagatttattgccaggcaggcagccatcgagaagcagggatgagggcaatctataatgtctcccagtgtcctggccaccaagccacccctcgccaacgctaccaagctgcaagaatctactatatcatggcagaagaagtagagtgggactattgccctgaccggagctgggaacgggaatggcacaaccagtctgagaaggacagttatggttacattttcctgagcaacaaggatgggctcctgggttccagatacaagaaagctgtattcagggaatacactgatggtacattcaggatccctcggccaaggactggaccagaagaacacttgggaatcttgggtccacttatcaaaggtgaagttggtgatatcctgactgtggtattcaagaataatgccagccgcccctactctgtgcatgctcatggagtgctagaatctactactgtctggccactggctgctgagcctggtgaggtggtcacttatcagtggaacatcccagagaggtctggccctgggcccaatgactctgcttgtgtttcctggatctattattctgcagtggatcccatcaaggacatgtatagtggcctggtggggcccttggctatctgccaaaagggcatcctggagccccatggaggacggagtgacatggatcgggaatttgcattgttgttcttgatttttgatgaaaataagtcttggtatttggaggaaaatgtggcaacccatgggtcccaggatccaggcagtattaacctacaggatgaaactttcttggagagcaataaaatgcatgcaatcaatgggaaactctatgccaaccttaggggtcttaccatgtaccaaggagaacgagtggcctggtacatgctggccatgggccaagatgtggatctacacaccatccactttcatgcagagagcttcctctatcggaatggcgagaactaccgggcagatgtggtggatctgttcccagggacttttgaggttgtggagatggtggccagcaaccctgggacatggctgatgcactgccatgtgactgaccatgtccatgctggcatggagaccctcttcactgttttttctcgaacagaacacttaagccctctcaccgtcatcaccaaagagactgaaaaagcagtgccccccagagacattgaagaaggcaatgtgaagatgctgggcatgcagatccccataaagaatgttgagatgctggcctctgttttggttgccattagtgtcacccttctgctcgttgttctggctcttggtggagtggtttggtaccaacatcgacagagaaagctacgacgcaataggaggtccatcctggatgacagcttcaagcttctgtctttcaaacagtaacatctggagcctggagatatcctcaggaagcacatctgtagtgcactcccagcaggccatggactagtcactaaccccacactcaaaggggcatgggtggtggagaagcagaaggagcaatcaagcttatctggatatttctttctttatttattttacatggaaataatatgatttcactttttctttagtttctttgctctacgtgggcacctggcactaagggagtaccttattatcctacatcgcaaatttcaacagctacattatatttccttctgacacttggaaggtattgaaatttctagaaatgtatccttctcacaaagtagagaccaagagaaaaactcattgattgggtttctacttctttcaaggactcaggaaatttcactttgaactgaggccaagtgagctgttaagataacccacacttaaactaaaggctaagaatataggcttgatgggaaattgaaggtaggctgagtattgggaatccaaattgaattttgattctccttggcagtgaactactttgaagaagtggtcaatgggttgttgctgccatgagcatgtacaacctctggagctagaagctcctcaggaaagccagttctccaagttcttaacctgtggcactgaaaggaatgttgagttacctcttcatgttttagacagcaaaccctatccattaaagtacttgttagaacact

SEQ ID NO: 3022 - DNA, 550 bp, Homo sapiens
ggggacactttgtatggcaagtggaaccactggcttggtggattttgctagatttttctgatttttaaactcctgaaaaatatcccagataactgtcatgaagctggtaactatcttcctgctggtgaccatcagcctttgtagttactctgctactgccttcctcatcaacaaagtgccccttcctgttgacaagttggcacctttacctctggacaacattcttccctttatggatccattaaagcttcttctgaaaactctgggcatttctgttgagcaccttgtggaggggctaaggaagtgtgtaaatgagctgggaccagaggcttctgaagctgtgaagaaactgctggaggcgctatcacacttggtgtgacatcaagataaagagcggaggtggatggggatggaagatgatgctcctatcctccctgcctgaaacctgttctaccaattatagatcaaatgccctaaaatgtagtgacccgtgaaaaggacaaataaagcaatgaatactaaaaaaaaaaaaaaaaaaaaaaaaaaaaaa

SEQ ID NO: 3023 - DNA, 1310 bp, Homo sapiens
ccgggactcgccgccccgggactcgcgcagcccgcagcgctccggctcctcctctcgcgaccgccctccgcagcgatggacggagacggtgacccagagagcgtgggccagcccgaggaggcaagcccggaggagcagccagaggaggcgagtgctgaggaggagcggccggaggaccagcaggaggaggaggcggcggccgccgccgcgtacctggacgagctgcccgagccgctgctgctgcgcgtgctggccgcactgccggccgccgagctggtgcaggcctgccgcctggtgtgcctgcgctggaaggagctggtggacggcgccccgctgtggctgctcaagtgccagcaggaggggctggtgcccgagggcggcgtggaggaggagcgcgaccactggcagcagttctacttcctgagcaagcggcgccgcaaccttctgcgtaacccgtgtggggaagaggacttggaaggctggtgtgacgtggagcatggtggggacggctggagggtggaggagctgcctggagacagtggggtggagttcacccacgatgagagcgtcaagaagtacttcgcctcctcctttgagtggtgtcgcaaagcacaggtcattgacctgcaggctgagggctactgggaggagctgctggacacgactcagccggccatcgtggtgaaggactggtactcgggccgcagcgacgctggttgcctctacgagctcaccgttaagctactgtccgagcacgagaacgtgctggctgagttcagcagcgggcaggtggcagtgccccaagacagtgacggcgggggctggatggagatctcccacaccttcaccgactacgggccgggcgtccgcttcgtccgcttcgagcacggggggcaggactccgtctactggaagggctggttcggggcccgggtgaccaacagcagcgtgtgggtagaaccctgagcgaccctgcctccgctctcccccagctgcctggaggggcaaaggtcgagggtagataggccttaacttagtccatagcgtcctcaccttccccaagccacacatcctcctcccatcccttgctccgatcccagcccctgagcagggagagagaagttttgttggcataggtttgcttaggtagccggcttctagaatgtagatccgtgagggcgtgagcttggactggacccactgctgattccctgcacctagcacagtgcttgccacaaagtgggctctcaataaatattatttgtccaaggaaggaatgaatgaaaaaatggaaaaaaaaaaaaaaaaaa

SEQ ID NO: 3024 - DNA, 3515 bp, Homo sapiens
gcagggctggagtgtctatttcgagctcagcggcagggctcgggcgcgagtcgagaccctgctcgctcctctcgcttctgaaaccgacgttcaggagcggctttttaaaaacgcaaggcacaaggacggtcacccgcgcgactatgtttgctgatttttcgccttgccctctttaaaagcggcctcccattctccaaaagacacttcccctcctccctttgaagtgcattagttgtgatttctgcctccttttcttttttctttcttttttgttttgctttttccccccttttgaattatgtgctgctgttaaacaacaacaaaaaaacaacaaaacacagcagctgcggacttgtccccggctggagcccagcgccccgcctggagtggatgagcctctccatgagagatccggtcattcctgggacaagcatggcctaccatccgttcctacctcaccgggcgccggacttcgccatgagcgcggtgctgggtcaccagccgccgttcttccccgcgctgacgctgcctcccaacggcgcggcggcgctctcgctgccgggcgccctggccaagccgatcatggatcaattggtgggggcggccgagaccggcatcccgttctcctccctggggccccaggcgcatctgaggcctttgaagaccatggagcccgaagaagaggtggaggacgaccccaaggtgcacctggaggctaaagaactttgggatcagtttcacaagcggggcaccgagatggtcattaccaagtcgggaaggcgaatgtttcctccatttaaagtgagatgttctgggctggataaaaaagccaaatacattttattgatggacattatagctgctgatgactgtcgttataaatttcacaattctcggtggatggtggctggtaaggccgaccccgaaatgccaaagaggatgtacattcacccggacagccccgctactggggaacagtggatgtccaaagtcgtcactttccacaaactgaaactcaccaacaacatttcagacaaacatggatttactttggccttcccaagtgatcacgctacgtggcaggggaattatagttttggtactcagactatattgaactccatgcacaaataccagccccggttccacattgtaagagccaatgacatcttgaaactcccttatagtacatttcggacatacttgttccccgaaactgaattcatcgctgtgactgcataccagaatgataagataacccagttaaaaatagacaacaacccttttgcaaaaggtttccgggacactggaaatggccgaagagaaaaaagaaaacagctcaccctgcagtccatgagggtgtttgatgaaagacacaaaaaggagaatgggacctctgatgagtcctccagtgaacaagcagctttcaactgcttcgcccaggcttcttctccagccgcctccactgtagggacatcgaacctcaaagatttatgtcccagcgagggtgagagcgacgccgaggccgagagcaaagaggagcatggccccgaggcctgcgacgcggccaagatctccaccaccacgtcggaggagccctgccgtgacaagggcagccccgcggtcaaggctcaccttttcgctgctgagcggccccgggacagcgggcggctggacaaagcgtcgcccgactcacgccatagccccgccaccatctcgtccagcactcgcggcctgggcgcggaggagcgcaggagcccggttcgcgagggcacagcgccggccaaggtggaagaggcgcgcgcgctcccgggcaaggaggccttcgcgccgctcacggtgcagacggacgcggccgccgcgcacctggcccagggccccctgcctggcctcggcttcgccccgggcctggcgggccaacagttcttcaacgggcacccgctcttcctgcaccccagccagtttgccatggggggcgccttctccagcatggcggccgctggcatgggtcccctcctggccacggtttctggggcctccaccggtgtctcgggcctggattccacggccatggcctctgccgctgcggcgcagggactgtccggggcgtccgcggccaccctgcccttccacctccagcagcacgtcctggcctctcagggcctggccatgtcccctttcggaagcctgttcccttacccctacacgtacatggccgcagcggcggccgcctcctctgcggcagcctccagctcggtgcaccgccaccccttcctcaatctgaacaccatgcgcccgcggctgcgctacagcccctactccatcccggtgccggtcccggacggcagcagtctgctcaccaccgccctgccctccatggcggcggccgcggggcccctggacggcaaagtcgccgccctggccgccagcccggcctcggtggcagtggactcgggctctgaactcaacagccgctcctccacgctctcctccagctccatgtccttgtcgcccaaactctgcgcggagaaagaggcggccaccagcgaactgcagagcatccagcggttggttagcggcttggaagccaagccggacaggtcccgcagcgcgtccccgtagacccgtcccagacacgtcttttcattccagtccagttcaggctgccgtgcactttgtcggatataaaataaaccacgggcccgccatggcgttagcccttccttttgcagttgcgtctgggaaggggccccggactccctcgagagaatgtgctagagacagcccctgtcttcttggcgtggtttatatgtccgggatctggatcagattctgggggctcagaaacgtcggttgcattgagctactgggggtaggagttccaacatttatgtccagagcaacttccagcaaggctggtctgggtctctgcccaccaggcggggaggtgttcaaagacatctccctcagtgcggatttatatatatatttttccttcactgtgtcaagtggaaacaaaaacaaaatctttcaaaaaaaaaatccggacaagtgaacacattaacatgattctgtttgtgcagattaaaaactttatagggacttgcattatcggttctcaataaattactgagcagctttgtttggggagggaagtccctaccatccttgtttagtctatattaagaaaatctgtgtctttttaatattcttgtgatgttttcagagccgctgtaggtctcttcttgcatgtccacagtaatgtatttgtggtttttattttgaacgcttgcttttagagagaaaacaatatagccccctacccttttcccaatcctttgccctcaaatcagtgacccaagggagggggggatttaaagggaaggagtgggcaaaacacataaaatgaatttattatatctaagctctgtagcaggattcatgtcgttctttgacagttctttctctttcctgtatatgcaataacaaggttttaaaaaaaaaaaaaaaaaaaa

SEQ ID NO: 3025 - DNA, 724 bp, Homo sapiens
gcacgagggacttctgttccagagcaaaggtcattcagccgcttgaatcagccttttccccccacccggtccccaactttgtttacccgataaggaaggtcagcattcaaagtcaagaagcgccatttatcttcccgtgcgctctacaaatagttccgtgagaaagatggccgggaactcgatcctgctggctgctgtctctattctctcggcctgtcagcaaagttattttgctttgcaagttggaaaggcaagattaaaatacaaagttacgcccccagcagtcactgggtcaccagagtttgagagagtatttcgggcacaacaaaactgtgtggagttttatcctatattcataattacattgtggatggctgggtggtatttcaaccaagtttttgctacttgtctgggtctggtgtacatatatggccgtcacctatacttctggggatattcagaagctgctaaaaaacggatcaccggtttccgactgagtctggggattttggccttgttgaccctcctaggtgccctgggaattgcaaacagctttctggatgaatatctggacctcaatattgccaagaaactgaggcggcaattctaactttttctcttccctttaatgcttgcagaagctgttcccaccatgaaggtaatatggtatcatttgttaaataaaaataaagtctttattctgttaaaaaaaaaaaaaaaaaaa

SEQ ID NO: 3026 - DNA, 2472 bp, Homo sapiens
ctggaccccaggtctggagcgaattccagcctgcagggctgataagcgaggcattagtgagattgagagagactttaccccgccgtggtggttggagggcgcgcagtagagcagcagcacaggcgcgggtcccgggaggccggctctgctcgcgccgagatgtggaatctccttcacgaaaccgactcggctgtggccaccgcgcgccgcccgcgctggctgtgcgctggggcgctggtgctggcgggtggcttctttctcctcggcttcctcttcgggtggtttataaaatcctccaatgaagctactaacattactccaaagcataatatgaaagcatttttggatgaattgaaagctgagaacatcaagaagttcttatataattttacacagataccacatttagcaggaacagaacaaaactttcagcttgcaaagcaaattcaatcccagtggaaagaatttggcctggattctgttgagctagcacattatgatgtcctgttgtcctacccaaataagactcatcccaactacatctcaataattaatgaagatggaaatgagattttcaacacatcattatttgaaccacctcctccaggatatgaaaatgtttcggatattgtaccacctttcagtgctttctctcctcaaggaatgccagagggcgatctagtgtatgttaactatgcacgaactgaagacttctttaaattggaacgggacatgaaaatcaattgctctgggaaaattgtaattgccagatatgggaaagttttcagaggaaataaggttaaaaatgcccagctggcaggggccaaaggagtcattctctactccgaccctgctgactactttgctcctggggtgaagtcctatccagatggttggaatcttcctggaggtggtgtccagcgtggaaatatcctaaatctgaatggtgcaggagaccctctcacaccaggttacccagcaaatgaatatgcttataggcgtggaattgcagaggctgttggtcttccaagtattcctgttcatccaattggatactatgatgcacagaagctcctagaaaaaatgggtggctcagcaccaccagatagcagctggagaggaagtctcaaagtgccctacaatgttggacctggctttactggaaacttttctacacaaaaagtcaagatgcacatccactctaccaatgaagtgacaagaatttacaatgtgataggtactctcagaggagcagtggaaccagacagatatgtcattctgggaggtcaccgggactcatgggtgtttggtggtattgaccctcagagtggagcagctgttgttcatgaaattgtgaggagctttggaacactgaaaaaggaagggtggagacctagaagaacaattttgtttgcaagctgggatgcagaagaatttggtcttcttggttctactgagtgggcagaggagaattcaagactccttcaagagcgtggcgtggcttatattaatgctgactcatctatagaaggaaactacactctgagagttgattgtacaccgctgatgtacagcttggtacacaacctaacaaaagagctgaaaagccctgatgaaggctttgaaggcaaatctctttatgaaagttggactaaaaaaagtccttccccagagttcagtggcatgcccaggataagcaaattgggatctggaaatgattttgaggtgttcttccaacgacttggaattgcttcaggcagagcacggtatactaaaaattgggaaacaaacaaattcagcggctatccactgtatcacagtgtctatgaaacatatgagttggtggaaaagttttatgatccaatgtttaaatatcacctcactgtggcccaggttcgaggagggatggtgtttgagctagccaattccatagtgctcccttttgattgtcgagattatgctgtagttttaagaaagtatgctgacaaaatctacagtatttctatgaaacatccacaggaaatgaagacatacagtgtatcatttgattcacttttttctgcagtaaagaattttacagaaattgcttccaagttcagtgagagactccaggactttgacaaaagcaagcatgtcatctatgctccaagcagccacaacaagtatgcaggggagtcattcccaggaatttatgatgctctgtttgatattgaaagcaaagtggacccttccaaggcctggggagaagtgaagagacagatttatgttgcagccttcacagtgcaggcagctgcagagactttgagtgaagtagcctaagaggattctttagagaatccgtattgaatttgtgtggtatgtcactcagaaagaatcgtaatgggtatattgataaattttaaaattggtatatttgaaataaagttgaatattatatataaaaaaaaaaaaaaaaaaaaaaaaaaaaaaaaa

SEQ ID NO: 3027 - DNA, 2673 bp, Homo sapiens
gccaccactgcggccaccgccaatgaaacgcctcccgctcctagtggttttttccactttgttgaattgttcctatactcaaaattgcaccaagacaccttgtctcccaaatgcaaaatgtgaaatacgcaatggaattgaagcctgctattgcaacatgggattttcaggaaatggtgtcacaatttgtgaagatgataatgaatgtggaaatttaactcagtcctgtggcgaaaatgctaattgcactaacacagaaggaagttattattgtatgtgtgtacctggcttcagatccagcagtaaccaagacaggtttatcactaatgatggaaccgtctgtatagaaaatgtgaatgcaaactgccatttagataatgtctgtatagctgcaaatattaataaaactttaacaaaaatcagatccataaaagaacctgtggctttgctacaagaagtctatagaaattctgtgacagatctttcaccaacagatataattacatatatagaaatattagctgaatcatcttcattactaggttacaagaacaacactatctcagccaaggacaccctttctaactcaactcttactgaatttgtaaaaaccgtgaataattttgttcaaagggatacatttgtagtttgggacaagttatctgtgaatcataggagaacacatcttacaaaactcatgcacactgttgaacaagctactttaaggatatcccagagcttccaaaagaccacagagtttgatacaaattcaacggatatagctctcaaagttttcttttttgattcatataacatgaaacatattcatcctcatatgaatatggatggagactacataaatatatttccaaagagaaaagctgcatatgattcaaatggcaatgttgcagttgcatttttatattataagagtattggtcctttgctttcatcatctgacaacttcttattgaaacctcaaaattatgataattctgaagaggaggaaagagtcatatcttcagtaatttcagtctcaatgagctcaaacccacccacattatatgaacttgaaaaaataacatttacattaagtcatcgaaaggtcacagataggtataggagtctatgtgcattttggaattactcacctgataccatgaatggcagctggtcttcagagggctgtgagctgacatactcaaatgagacccacacctcatgccgctgtaatcacctgacacattttgcaattttgatgtcctctggtccttccattggtattaaagattataatattcttacaaggatcactcaactaggaataattatttcactgatttgtcttgccatatgcatttttaccttctggttcttcagtgaaattcaaagcaccaggacaacaattcacaaaaatctttgctgtagcctatttcttgctgaacttgtttttcttgttgggatcaatacaaatactaataagctcttctgttcaatcattgctggactgctacactacttctttttagctgcttttgcatggatgtgcattgaaggcatacatctctatctcattgttgtgggtgtcatctacaacaagggatttttgcacaagaatttttatatctttggctatctaagcccagccgtggtagttggattttcggcagcactaggatacagatattatggcacaaccaaagtatgttggcttagcaccgaaaacaactttatttggagttttataggaccagcatgcctaatcattcttgttaatctcttggcttttggagtcatcatatacaaagtttttcgtcacactgcagggttgaaaccagaagttagttgctttgagaacataaggtcttgtgcaagaggagccctcgctcttctgttccttctcggcaccacctggatctttggggttctccatgttgtgcacgcatcagtggttacagcttacctcttcacagtcagcaatgctttccaggggatgttcatttttttattcctgtgtgttttatctagaaagattcaagaagaatattacagattgttcaaaaatgtcccctgttgttttggatgtttaaggtaaacatagagaatggtggataattacaactgcacaaaaataaaaattccaagctgtggatgaccaatgtataaaaatgactcatcaaattatccaattattaactactagacaaaaagtattttaaatcagtttttctgtttatgctataggaactgtagataataaggtaaaattatgtatcatatagatatactatgtttttctatgtgaaatagttctgtcaaaaatagtattgcagatatttggaaagtaattggtttctcaggagtgatatcactgcacccaaggaaagattttctttctaacacgagaagtatatgaatgtcctgaaggaaaccactggcttgatatttctgtgactcgtgttgcctttgaaactagtcccctaccacctcggtaatgagctccattacagaaagtggaacataagagaatgaaggggcagaatatcaaacagtgaaaagggaatgataagatgtattttgaatgaactgttttttctgtagactagctgagaaattgttgacataaaataaagaattgaagaaacacaaaaaaaaaaaaaaaaaaaaaaaaaa

SEQ ID NO: 3028 - DNA, 1535 bp, Homo sapiens
ccgtgcaccgtgtgtgcgcgcggcgttgaaatgccctgcacgtcggggcagcgggacagatcccagggtgcccagggagtctccaagtgcctcactcctcccgccgcaaacatgacagagaactccgacaaagttcccattgccctggtgggacctgatgacgtggaattctgcagccccccggcgtacgctacgctgacggtgaagccctccagccccgcgcggctgctcaaggtgggagccgtggtcctcatttcgggagctgtgctgctgctctttggggccatcggggccttctacttctggaaggggagcgacagtcacatttacaatgtccattacaccatgagtatcaatgggaaattacaagatgggtcaatggaaatagacgctgggaacaacttggagacctttaaaatgggaagtggagctgaagaagcaattgcagttaatgatttccagaatggcatcacaggaattcgttttgctggaggagagaagtgctacattaaagcgcaagtgaaggctcgtattcctgaggtgggcgccgtgaccaaacagagcatctcctccaaactggaaggcaagatcatgccagtcaaatatgaagaaaattctcttatctgggtggctgtagatcagcctgtgaaggacaacagcttcttgagttctaaggtgttagaactctgcggtgaccttcctattttctggcttaaaccaacctatccaaaagaaatccagagggaaagaagagaagtggtaagaaaaattgttccaactaccacaaaaagaccacacagtggaccacggagcaacccaggcgctggaagactgaataatgaaaccagacccagtgttcaagaggactcacaagccttcaatcctgataatccttatcatcaggaaggggaaagcatgacattcgaccctagactggatcacgaaggaatctgttgtatagaatgtaggcggagctacacccactgccagaagatctgtgaacccctggggggctattacccatggccttataattatcaaggctgccgttcggcctgcagagtcatcatgccatgtagctggtgggtggcccgtatcttgggcatggtgtgaaatcacttcatatatcatgtgctgtaaaataagaactagctgaagagacaaccaaagaagcattaaggcaggttgatgctgatgggaccataaaatatttttacactcaacctgagcggttattcttgacactcttaacagaattttttcaattgttttccagaactttagtatatgcaaatgtactgaaagggtagttcaagtctaaaatgccataacccctttattatttgttattttttatttgcattgctttgccataagtcttcccttgcttgtatcttccaaagctattttgaaataaacatgaaaatttacagtttgccaaaaaaaaaaaaaaaaaaaaaaaaaaaaaaaaaaaaaaaaaaaaaaaaaaaaaaaaaaaaaaaaaaaaaaaaaaaaaaaaaaaaaaaaaaaaaaaa

SEQ ID NO: 3029 - DNA, 707 bp, Homo sapiens
gggcaggtgggaagcaaacccggacgcatcgcagcagcagcagcagcagcagaagcagcagcagcagcctccgcagtccctccagagacatggatccccagacagcaccttcccgggcgctcctgctcctgctcttcttgcatctggctttcctgggaggtcgttcccacccgctgggcagccccggttcagcctcggacttggaaacgtccgggttacaggagcagcgcaaccatttgcagggcaaactgtcggagctgcaggtggagcagacatccctggagcccctccaggagagcccccgtcccacaggtgtctggaagtcccgggaggtagccaccgagggcatccgtgggcaccgcaaaatggtcctctacaccctgcgggcaccacgaagccccaagatggtgcaagggtctggctgctttgggaggaagatggaccggatcagctcctccagtggcctgggctgcaaagtgctgaggcggcattaagaggaagtcctggctgcagacacctgcttctgattccacaaggggctttttcctcaaccctgtggccgcctttgaagtgactcatttttttaatgtatttatgtatttatttgattgttttatataagatggtttcttacctttgagcacaaaatttccacggtgaaataaagtcaacattataagctttaaaaaaaaaaaaaaaaaaaaaaa

SEQ ID NO: 3030 - DNA, 1258 bp, Homo sapiens
ggggcggggcgggcgcagccggcgctgagcttgcagggccgctcccctcacccgcccccttcgagtccccgggcttcgccccacccggcccgtgggggagtatctgtcctgccgccttcgcccacgccctgcactccgggaccgtccctgcgcgctctgggcgcaccatggcccgcggggctgcgctggcgctgctgctcttcggcctgctgggtgttctggtcgccgccccggatggtggtttcgatttatctgatgcccttcctgacaatgaaaacaagaaacccactgcaatccccaagaaacccagtgctggggatgactttgacttaggagatgctgttgttgatggagaaaatgacgacccacgaccaccgaacccacccaaaccgatgccaaatccaaaccccaaccaccctagttcctccggtagcttttcagatgctgaccttgcggatggcgtttcaggtggagaaggaaaaggaggcagtgatggtggaggcagccacaggaaagaaggggaagaggccgacgccccaggcgtgatccccgggattgtgggggctgtcgtggtcgccgtggctggagccatctctagcttcattgcttaccagaaaaagaagctatgcttcaaagaaaatgcagaacaaggggaggtggacatggagagccaccggaatgccaacgcagagccagctgttcagcgtactcttttagagaaatagaagattgtcggcagaaacagcccaggcgttggcagcagggttagaacagctgcctgaggctcctccctgaaggacacctgcctgagagcagagatggaggccttctgttcacggcggattctttgttttaatcttgcgatgtgctttgcttgttgctgggcggatgatgtttactaacgatgaattttacatccaaagggggataggcacttggacccccattctccaaggcccgggggggcggtttcccatgggatgtgaaaggctggccattattaagtccctgtaactcaaatgtcaaccccaccgaggcacccccccgtcccccagaatcttggctgtttacaaatcacgtgtccatcgagcacgtctgaaacccctggtagccccgacttctttttaattaaaataaggtaagcccttcaatttgtttcttcaatatttctttcatttgtagggatatttgtttttcatatcagactaataaaaagaaattagaaaccaaaaaaaaaaaaaaaaaaaaaaaaaaaaaa

SEQ ID NO: 3031 - DNA, 3234 bp, Homo sapiens
aggttttatttatttattgttcctggtcactgtctctttgaggattggtatctctgttccagaaaagatggcagcctctttcttctctgattttggtcttatgtggtatctggaggagctcaaaaaggaggagttcaggaaatttaaagaacatctcaagcaaatgactttgcagcttgaactcaagtagattccctggactgaggtcaaaaaagcatcccgggaagaacctgcaaacctcttgatcaagcactatgaagaacaacaagcttggaacataaccttaagaatctttcaaaagatggatagaaaggatctctgcatgaaggtcatgagggagagaacaggatacacaaagacccatcaagctcatgcaaagcagaaattcagccgcttatggtccagcaagtctgtcactgagattcacctatactttgaggaggaagtcaagcaagaagaatgtgaccatttggaccgcctttttgctcccaaggaaactgggaaacagccacgtacagtgattattcaaggaccacaaggaattggaaaaacgacactcctgatgaagctgatgatggcctggtcggacaacaagacctttcgggataggttcctgtacacgttctatttctgctgcagagaactgagggagttgccgccaacgagtttggctgacttgatttccagagagcggcctgaccccgctgctcctataacagagatcgtgtctcaaccggagagactcttgttcgtcatcgacagcttcgaagagctgcagggcggcttgaacgaacccgattcggatctgtgtggtgacttgatggagaagcggccggtgcaggtgcttctgagcagtttgctgaggaagaagatgctcccggaggcctccctgctcatcgccatcaaacccgtgtgcccgaaggagctccgggatcaggtgacgatctcagaagtctaccagccccggggattcaacgagagtgataggttagtgtatttctgctgcttcttcaaagacccgaaaagagccatggaagccttcaatcttgtaagagaaagtgaacagctgttttccatatgccaaatcccgctcctctgctggatcctgtgtaccagtctgaagcaagagatgcagaaaggaaaagacctggccctgacctgccagagcactacctctgtgtactcctctttcgtctttaacctgttcacacctgagggtgccgagggcccgactccgcaaacccagcaccagctgaaggccctgtgctccctggctgcagagggtatgtggacagacacatttgagttttgtgaagacgacctccggagaaatggggttgttgacgctgacatccctgcgctgctgggcaccaagatacttctgaagtacggggagcgtgagagctcctacgtgttcctccacgtgtgtatccaggagttctgtgccgccttgttctatttgctcaagagccaccttgatcatcctcacccagctgtgagatgtgtacaggaattgctagttgccaattttgaaaaagcaaggagagcacattggatttttttggggtgttttctaactggccttttaaataaaaaggaacaagaaaaactggatgcgttttttggcttccaactgtcccaagagataaagcagcaaattcaccagtgcctgaagagcttaggggagcgtggcaatcctcagggacaggtggattccttggcgatattttactgtctctttgaaatgcaggatcctgcctttgtgaagcaggcagtgaacctcctccaagaagctaactttcatattattgacaacgtggacttggtggtttctgcctactgcttaaaatactgctccagcttgaggaaactctgtttttccgttcaaaatgtctttaagaaagaggatgaacacagctctacgtcggattacagcctcatctgttggcatcacatctgctctgtgctcaccaccagcgggcacctcagagagctccaggtgcaggacagcaccctcagcgagtcgacctttgtgacctggtgtaaccagctgaggcatcccagctgtcgccttcagaagcttggaataaataacgtttccttttctggccagagtgttctgctctttgaggtgctcttttatcagccagacttgaaatacttgagcttcaccctcacgaaactctctcgtgatgacatcaggtccctctgtgatgccttgaactgcccagcaggcaacgtcaaagagctagcgctggtaaattgtcacctctcacccattgattgtgaagtccttgctggccttctaaccaacaacaagaagctgacgtatctgaatgtatcctgcaaccagttagacacaggcgtgccccttttgtgtgaagccctgtgcagcccagacacggtcctggtatacctgatgttggctttctgccacctcagcgagcagtgctgcgaatacatctctgaaatgcttctgcgtaacaagagcgtgcgctatctagacctcagtgccaatgtcctgaaggacgaaggactgaaaactctctgcgaggccttgaaacatccggactgctgcctggattcactgtgtttggtaaaatgttttatcactgctgctggctgtgaagacctcgcctctgctctcatcagcaatcaaaacctgaagattctgcaaattgggtgcaatgaaatcggagatgtgggtgtgcagctgttgtgtcgggctctgacgcatacggattgccgcttagagattcttgggttggaagaatgtgggttaacgagcacctgctgtaaggatctcgcgtctgttctcacctgcagtaagaccctgcagcagctcaacctgaccttgaacaccttggaccacacaggggtggttgtactctgtgaggccctgagacacccagagtgtgccctgcaggtgctcgggccgagaaaaactgattttgatgaggaaacccaggcactactgacggctgaggaagagagaaatcctaacctgaccatcacagacgactgtgacacaatcacaagggtagagatctgattgcgaggaacctgggctctggctcgaacacctgcaaaggacagggactgggaccgttacttacatgacactgcacccaggagatacaaatcattgacactctgagttgtgagatttctggcaccccattcatagatttgatatgatacacgtggtttttatgtgctctggggccttggatg

SEQ ID NO: 3032 - DNA, 3057 bp, Homo sapiens; identical to SEQ ID NO: 2533

SEQ ID NO: 3033 - DNA, 782 bp, Homo sapiens; identical to SEQ ID NO: 601

SEQ ID NO: 3034 - DNA, 694 bp, Homo sapiens; identical to SEQ ID NO: 1857

SEQ ID NO: 3035 - DNA, 2918 bp, Homo sapiens
gccgagcctctgccagccctgagctgggaagaagcagctacctcggaggcagggcgcgcaggcgggcggcgatgagagggggcgcagccgcagccccgcgctggggagcccaccgctaaccctgcaccccacccacccctgcacaaaagagctggcgggcgctggccacgtcgccctgggtgaccttcctcggatgcagaatccgcccctgcgagcatcctcttcctcctaggctctgaaggcccggggagcgtgagcgatgcccagctgcacccgggcagggctcgcctttgtttgccagtaaggaggagaggctgtctcagctgcagaggggtcatccctgcttcaagccagtgcctcttcccagctcccatggggaccaccgaagccacgctccggatggaaaacgtggacgtgaaggaggaatggcaggacgaagatcttcccaggccactcccagaagagacgggggtggaactgcttggcagcccggtggaagacacatcctctcctcccaacacgctaaatttcaacggagcgcatcgtaagaggaagacgctggtggccccagagatcaacatttctctggatcagagtgaggggtccctgctgtccgatgacttcttggatacccctgatgacctggatattaacgtggatgacatcgagacccccgatgagaccgactcgctggagttcctggggaatggcaacgaactggagtgggaagacgacacccccgtggccaccgccaagaacatgcccggggacagcgcggatctatttggggacggcacgacggaggacggcagcgccgccaacgggcgcctgtggcggacagtgatcatcggggagcaagagcaccgtatagacctgcacatgatccggccttacatgaaagtggtcacccacggagggtactacggcgaaggcctcaacgccatcatcgtcttcgcagcctgcttccttccagacagcagcctccccgactaccactacatcatggagaacctcttcctgtacgtcatcagcagcttagagctcctggtggctgaggactacatgatcgtgtacctgaacggtgccacgccccggcggaggatgcctggaatcggctggctgaagaagtgctaccagatgatcgaccggaggttgcggaaaaacctgaagtccttgatcatcgtccacccctcgtggttcattcggactgtgctggccatctctcgccctttcatcagcgtcaagttcatcaacaagatccagtacgtgcacagcttggaagacctggagcaactcatccctatggaacacgtccagatcccagactgcgtcctgcaatacgaagaggaaagactgaaggccaggagggagagcgcgaggccccagccggagtttgtgctgcccaggtctgaagagaagccagaggtggcaccagtggaaaacaggtctgctctggtctcagaagatcaggaaacaagcatgtcctgaggcgacgtgagcataacaaaggacatggaagaagattccagatgccagaaaacctctgtcagacgcccactggccccagatctcatcctgcctcatcctgagtcccaatcttccaagggtgccagcccctccgttcatctctgaaacccagcatccttttcagctgcttgaaaacattgtattttttttttttaacgatgcagtatttgtgcgttccagaaaagggcccagctctgagcccctcacccttccacactcacgaactctcagccgaggaaggcaagaagcgcagggggtggcccgcgtggcgtcggtggcctccgctcctgctcgcagcccctgtggtcagagctggatacaagattcaagacccttctcttgcttgtcacccgctccaggttggagccacagacacccaccgccaccccggctgggtctgcgtcctttcctgtgcctttccctccagaatgcggcctcagacctagaagctcaacccccctatgagggccacgtcctggggtagctcctgacctccgaccttatgtccaaatttcacacccatggtttttcatttgacccgcccccttctcgctcataatgacacccagctcctttgagaggatcagagcccattgcacaagaagagccgctgccaaccatccttgtcctccgattgcaaaatgacaccccagtaatctagaacattctcaagcccctttaactcagatgtcaagccaccgggcaaaccccgtcaatacctcccaccaaggaatgagatatgtggacctcactgctcccccaacccagcgtcaggctgggacacgccaacgctgttccgggttggaacagcagaggctcagaaactggctctgaaataggcagacctagcaagaggaagatacagggtatcgggcgtttgagtgtttcagaagtcattcgggaagataaatccagtgcgctggccgcagccacctgcattcaaagcttggaccagcgggttcttgttcgggaggcaaatttccctaggaaaaagaagacagacttttctaatgtggtccaaatgcggatcactggtcagatggactctagaagcactgagctccctgtctctggaagtatttaagaaaaggctgggccaggcacgatggctcacgcctgtaatcccagactttgggaggccgaggcaggcggatcacctgaggtgaggagtttgagaacagcctggccaacatggtgaaacctcatctctactaaaaatacaaaaattagccaggcgtggtggcaggtgcctgtaatcccagctacttgggaggctgaggcatgagaatcacttaaacctgagaggcagaggttacagtgagccaagatcgtgccactgcattccagcctgggcgacagagcaagactctgtctcaaaaaaaaaaaaaaaa

SEQ ID NO: 3036 - DNA, 2292 bp, Homo sapiens
atcaaaatccatttctggtcattctggtgacctcccacccttcagatgtgaaagccaggcaggccattagagttacttggggtgaaaaaaagtcttggtggggatatgaggttcttacatttttcttattaggccaagaggctgaaaaggaagacaaaatgttggcattgtccttagaggatgaacaccttctttatggtgacataatccgacaagattttttagacacatataataacctgaccttgaaaaccattatggcattcaggtgggtaactgagttttgccccaatgccaagtacgtaatgaagacagacactgatgttttcatcaatactggcaatttagtgaagtatcttttaaacctaaaccactcagagaagtttttcacaggttatcctctaattgataattattcctatagaggattttaccaaaaaacccatatttcttaccaggagtatcctttcaaggtgttccctccatactgcagtgggttgggttatataatgtccagagatttggtgccaaggatctatgaaatgatgggtcacgtaaaacccatcaagtttgaagatgtttatgtcgggatctgtttgaatttattaaaagtgaacattcatattccagaagacacaaatcttttctttctatatagaatccatttggatgtctgtcaactgagacgtgtgattgcagcccatggcttttcttccaaggagatcatcactttttggcaggtcatgctaaggaacaccacatgccattattaacttcacattctacaaaaagcctagaaggacaggatactttgtggaaagtgttaaataaagtaggtactgtggaaaattcatggggaggtcagtgtgctggcttacactgaactgaaactcatgaaaaacccagactggagactggagggttacacttgtgatttattagtcaggcccttcaaagatgatatgtggaggaattaaatataaaggaattggaggtttttgctaaagaaattaataggaccaaacaatttggacatgtcattctgtagactagaatttcttaaaagggtgttactgagttataagctcactaggctgtaaaaacaaaacaatgtagagttttatttattgaacaatgtagtcacttgaaggttttgtgtatatcttatgtggattaccaatttaaaaatatatgtagttctgtgtcaaaaaacttcttcactgaagttatactgaacaaaattttacctgtttttggtcatttataaagtacttcaagatgttgcagtatttcacagttattattatttaaaattacttcaactttgtgtttttaaatgttttgacgatttcaatacaagataaaaaggatagtgaatcattctttacatgcaaacattttccagttacttaactgatcagtttattattgatacatcactccattaatgtaaagtcataggtcattattgcatatcagtaatctcttggactttgttaaatattttactgtggtaatatagagaagaattaaagcaagaaaatctgaagtattgtcttgtttttaaaaaatacagttcctagtgtttttagaagtcacttaatttgtctcatttttccacctggaaattaggaataatgtagaatgcaaggcagtaatttccttttggaaaggactctgaaggcagaaaagaagggagagaacctcatgggcagaatattataaaaagagtgtcatattccagcatttgaattggaaagagaagagtgaagatccaagttgcattattaatctgccctgtgttttttccttttaacaatcagtttgagctgctgctgttatgagtttctcatcaagatgaaagccctaatatgtaaagtcaaatccgatttaaattttgtgcttttatagaaagaaatttcttcatagacgtggtgatatatcatttgttggacctgctaatagtaggtcaaaggggagcactccttgccccctgttcctgggtttatgcagttttctttttagagtttatatagggcaagtggttctttttctctgaattacaggatggaaaaaggtcatatcctttgtcaggaaatataaacttgaaagtatgtagtcagctcttgtaatactcatatttatgattgtcctatatgaaaaacaacttcagttaaaactataatgtgtgattctgtataacaaggtgatgtctgtttcccagggctcagacctaatccagttataataaaatcaattaaatgaaatattctatagaaaaaaaaaaaaaaa

SEQ ID NO: 3037 - DNA, 1392 bp, Homo sapiens
ggcgcggtgggtgtctgcgggggtctcgcggggcggctgcggtgtttcaccgggaaaggctcgaggagagcgcggctcacgagagataacccagctgtgctccctggaaccttcaatttcaaggcctccctgcctctactaggcgccttagctcactatggggaaccacttgactgagatggcgcccactgcctcctccttcttgccccacttccaagccctgcatgtcgtggtcattgggctggactctgctggaaagacctccctcctttaccgcctcaagttcaaggagtttgtccagagtgtccccaccaaaggcttcaacaccgagaagatccgggtgcccctcgggggatcgcgtggcatcaccttccaagtgtgggacgtcggggggcaggagaagctgcgaccactgtggcgctcttatacccgccggacagacggtctagtgtttgtggtggacgctgcggaggctgagcggctggaggaagccaaggtggagttgcaccgaatcagccgggcctcggacaaccagggcgtgccagtgctggtgctggccaacaagcaggaccagcccggggcactgagcgctgctgaggtggagaagaggctggcagtccgagagctagcagccgccactctcactcatgtgcaaggctgcagcgctgtggacggtctgggcctgcagcagggccttgagcgcctctatgagatgatcctcaagaggaagaaggcagctcggggtggcaagaagagacggtgacccaagccccccctccctttcctcccacctagtaggggtctgcacacttggacagcagggtgggaccagcctgtgacctctcagtcagactggggtgcaggacctgtccacctcaatgaaggagagaggagcatggggtgtcccgttttggtgccacactggggtggggatgggagatgggatgtctttgcatatctctctcatcctctctggagaagtgggcgctgcaggactgtggagacgtaaatgtaaactgtgactctacctcgaccctgtttcttatttttcttctctggctaaaaatttttaattggatgtgtttgggggcggggggatggaagtgacttggagaatgtgtttgggatgaaataactatttccccttcctctgtcccccaactggggagtctccccaggctgcttttctaggaataccagtcacatagtttttatttttgtgtctgtgaaagtgccaagaacccctccccacatttgtagatccatgaccctttttataagctgtgtgtgtcctctgtattattgttattaactattttttagcatttgcctgtaagttattaaagactgataactgtagctcttaaaaaaaaaaaaaaaaaaaaaaaaaaa

SEQ ID NO: 3038 - DNA, 3497 bp, Homo sapiens
cactgctcctccggctcccgggaagccgcgagtttccgcagggaggcggcggcagctgcggcggggccggtctgtagcctttgctgagtcaacactactcacagtgaaagtgatgccttttctccatttgcacaacatgagtgtgacgtggttagccagaccaggagctcaacctcatgtagaatccagtccactgctctgatgccgaaggggaggcagaaagtgccacacttggatgcccccctgggcctgcccacctgcctctggctggaattagccgggctcttcttactggttccctgggtcatgggcctggcagggacaggtgggcctgatggccagggcacaggggggccgagctgggctgtgcacctggaaagcctggaaggtgacggggaggaagagactctggagcagcaggcggatgccttggcccaggcagcagggctggtgaatgctggacgcatcggagagcttcaggggcactacctctttgtccagcctgctgggcacaggccggccctggaggtggaggccatccggcagcaggtggaggctgtgttggctgggcatgaagctgtgcgctggcactcagagcagaggctgctaaggcgggccaagcgcagcgtccacttcaacgaccccaagtacccgcagcaatggcacctgaataaccgacggagcccgggcagggacatcaacgtgacgggtgtgtgggaacgcaatgtgactgggcgaggggtgacggtggtggtagtggatgacggagtggaacacaccatccaggacattgcacccaactatagccctgagggtagctatgacctcaactctaatgaccctgaccccatgccccacccggatgtggagaatggcaaccaccatggcacgcgatgtgcaggagagatcgcggctgtgcccaacaacagcttctgtgccgtgggcgtggcctacgggagccgcatcgcaggtatccgggtactggatggacctctcacagacagcatggaggcagtggcgttcaacaagcactatcagatcaatgacatctacagctgcagctggggaccagatgacgatgggaagacagtggatggcccccatcagcttggaaaggctgccttacaacatggggtgattgctggtcgccagggctttgggagcatctttgtggtagccagtggcaacggaggccaacacaacgacaactgcaactacgatggctacgccaactccatctacaccgtcaccataggagctgtggatgaggagggacgcatgcctttctatgcagaagaatgtgcctccatgctggcagtcaccttcagtggtggggacaagatgcttcggagcattgtgaccactgactgggaccttcagaagggcactggctgcactgagggccacacagggacctcagctgcagcgcctctggcagctggcatgatagccttaatgctgcaggtgcggccctgcctcacgtggcgtgacgtccagcacatcattgtcttcacagccacccggtatgaggatcgccgtgcagagtgggtcaccaacgaggcaggcttcagccatagccaccagcacggtttcggcctcctcaacgcctggaggctcgtgaatgcagccaagatctggacatctgtcccttacttagcatcctacgtcagtcccgtgttaaaagaaaacaaggcgattccgcagtccccccgttccctggaggtcctgtggaatgtcagcaggatggacctggagatgtcagggctgaagaccctggagcatgtggcagtgacagtctccatcactcacccacggcgcggcagcttggagctgaagctgttctgccccagtggcatgatgtccctcatcggcgccccccgcagcatggactcggatcccaacggcttcaatgactggaccttctccactgtgcgatgctggggggagagagcccgagggacctacaggcttgtcatcagggatgtcggggatgagtcattccaggtcggcatcctccggcaatggcagctgaccctatatggctctgtgtggagtgcagtagacatcagggacagacaaaggctgttagagagtgccatgagtggaaaatacctgcacgatgacttcgccctgccctgcccaccggggctgaaaattcctgaggaagatggttacaccatcacccccaacaccctcaagaccctggtgctggtaggctgtttcaccgtcttctggactgtttactacatgctggaagtatatttgagccagaggaatgtggcttccaatcaagtttgtaggagtggaccctgccactggccccatcggagccggaaagccaaggaggaagggacagagctagaatcagtgccactttgcagcagcaaggatccagacgaagtggaaacagagagcaggggccctcccaccacctctgacctccttgccccagacctgctggagcaaggggactggagcctgtcccagaacaagagcgccctggactgccctcatcagcacctagacgtaccgcacgggaaggaggagcagatctgctgacctcagggcctgacagtgtgggacaggctcttctttcccaaaattagggagctcttgacagaaagcagttctgatgcttacatctggaatctgaggcatcctctgactccactcaaagagggtgagggccttcttaagatacaaatggtggaggattgctgccagagaagtctggtcagagccacagggtctgcctccagccaaacgggagcttttggtgagaaggtgttggacaggggattggcgcccccctttggtttggcctccatcctcatctctcttgggccaagccagctgcctaggtcccccaagcatgggggaccccttcccacatataagttgagaaggtgcctgccatagccaggagcgcatctcaatggaaacatcactggggtcacttgggaagaggacttcggggtagaggctgggaggagcccctggacatgcctgtcctgaaagcggctgcctccattatccattcccaagatgcctgatcagaaaccaaccatgaatgaacccctggctccttcaccacccccacgattggtatgatgctgccggcacagctgggatacacacggctcccccaggcctgagctgcttcactagggaatcctgcggcaggactgcagagcagatggcagatgcacatgttggaggagagagccttgggagccactgccactccagtcctgccaccaccctgtcttcctctgcaagtgctcagggaaatggccttcccgccggaggccagctatctgcctgacaggctgtgactcttctctcaaccttggccttctcccctcttctgagctagttggttgaattttttttaatgcttaagatttgtttttctcttttcacagcaacattttcttgaatttttttctgcacagcttttccaaaataaaaaccttccaaacaaaaaaaaaaaaaaa

SEQ ID NO: 3039 - DNA, 1309 bp, Homo sapiens
ctctgctggagcaggacttcagagtgtttgttttcagcctgcttttaaagtgatttgaagagagcggctttgaagattatcgcggaacacctgcccattaatcttgaccctgttaaaacaataactgcctatccagatatgccacacttctgcctgctgttggcaaccctcctggactaggctgctcttgttaatcacatggatgttatataagagttcggaccgcccagcacacaaggtcagcatgctgctcctctgtcacgctctcgctatagctgttgtccagatcgttatcttctcagaaagctgggcatttgccaagaacatcaacttctataatgtgaggcctcctctcgaccctacaccatttccaaatagcttcaagtgctttacttgtgaaaacgcaggggataattataactgcaatcgatgggcagaagacaaatggtgtccacaaaatacacagtactgtttgacagttcatcacttcaccagccacggaagaagcacatccatcaccaaaaagtgtgcctccagaagtgaatgtcattttgtcggttgccaccacagccgagattctgaacatacggagtgtaggtcttgctgtgaaggaatgatctgcaatgtagaattacccaccaatcacactaatgcagtgtttgccgtaatgcacgctcagagaacatctggcagcagtgcccccacactctacctaccagtgcttgcctgggtctttgtgcttccattgctgtgatgccaccattcctaggagaggcagagaccagcctctaaagcacaagccaaaaactgtgtgaacggtgaactttggagtgaagatcaatcttgcacttggtgaagagtgcacattggacctcaaggcgaaagccagtggtttgcttggataaaatgttcccgcatgaggccacaggactgaggatgggaatttggcagggcctgagaagatggtctgacttccaggcttcctggtcaaagagagctacgtttgggcagttctgcagagaggatcctggcaactagtcccacctgaataggcctttagctgaaaggatttcttgacctccttgactgcctcagaggctgccaggtcaaaccctcttgtttatgtgattagctcagagcatctctatgaaatctaacccttcccctcatgagaaagcagttttccccaccaacagcatagtcaatgagaaaggcaactgtacgaagaaaacttccagtggaactaatatgaaatctatttgcaaattatggggggaaataaagcttttaaattatacaatgtaaaaaa

SEQ ID NO: 3040 - DNA, 735 bp, Homo sapiens
atgaaggagagaagagccagccagaaattatccagcaaatctatcatggatcctaatcagaacgtgaaatgcaagatagttgtggtgggagacagtcagtgtggaaaaactgcgctgctccatgtcttcgccaaggactgcttccccgagaattacgttcctacagtgtttgagaattacacggccagttttgaaatcgacacacaaagaatagagttgagcctgtgggacacttcgggttctccttactatgacaatgtccgccccctctcttaccctgattcggatgctgtgctgatttgctttgacatcagtagaccagagaccctggacagtgtcctcaaaaagtggaaaggtgaaatccaggaattttgtccaaataccaaaatgctcttggtcggctgcaagtctgatctgcggacagatgttagtacattagtagagctctccaatcacaggcagacgccagtgtcctatgaccagggggcaaatatggccaaacagattggagcagctacttatatcgaatgctcagctttacagtcggaaaatagcgtcagagacatttttcacgttgccaccttggcatgtgtaaataagacaaataaaaacgttaagcggaacaaatcacagagagccacaaagcggatttcacacatgcctagcagaccagaactctcggcagttgctacggacttacgaaaggacaaagcgaagagctgcactgtgatgtga

SEQ ID NO: 3041 - DNA, 2098 bp, Homo sapiens
ccactgccaataacaaaataactagcaaccatgaagtgggtggaatcaatttttttaattttcctactaaattttactgaatccagaacactgcatagaaatgaatatggaatagcttccatattggattcttaccaatgtactgcagagataagtttagctgacctggctaccatattttttgcccagtttgttcaagaagccacttacaaggaagtaagcaaaatggtgaaagatgcattgactgcaattgagaaacccactggagatgaacagtcttcagggtgtttagaaaaccagctacctgcctttctggaagaactttgccatgagaaagaaattttggagaagtacggacattcagactgctgcagccaaagtgaagagggaagacataactgttttcttgcacacaaaaagcccactccagcatcgatcccacttttccaagttccagaacctgtcacaagctgtgaagcatatgaagaagacagggagacattcatgaacaaattcatttatgagatagcaagaaggcatcccttcctgtatgcacctacaattcttctttgggctgctcgctatgacaaaataattccatcttgctgcaaagctgaaaatgcagttgaatgcttccaaacaaaggcagcaacagttacaaaagaattaagagaaagcagcttgttaaatcaacatgcatgtgcagtaatgaaaaattttgggacccgaactttccaagccataactgttactaaactgagtcagaagtttaccaaagttaattttactgaaatccagaaactagtcctggatgtggcccatgtacatgagcactgttgcagaggagatgtgctggattgtctgcaggatggggaaaaaatcatgtcctacatatgttctcaacaagacactctgtcaaacaaaataacagaatgctgcaaactgaccacgctggaacgtggtcaatgtataattcatgcagaaaatgatgaaaaacctgaaggtctatctccaaatctaaacaggtttttaggagatagagattttaaccaattttcttcaggggaaaaaaatatcttcttggcaagttttgttcatgaatattcaagaagacatcctcagcttgctgtctcagtaattctaagagttgctaaaggataccaggagttattggagaagtgtttccagactgaaaaccctcttgaatgccaagataaaggagaagaagaattacagaaatacatccaggagagccaagcattggcaaagcgaagctgcggcctcttccagaaactaggagaatattacttacaaaatgcgtttctcgttgcttacacaaagaaagccccccagctgacctcgtcggagctgatggccatcaccagaaaaatggcagccacagcagccacttgttgccaactcagtgaggacaaactattggcctgtggcgagggagcggctgacattattatcggacacttatgtatcagacatgaaatgactccagtaaaccctggtgttggccagtgctgcacttcttcatatgccaacaggaggccatgcttcagcagcttggtggtggatgaaacatatgtccctcctgcattctctgatgacaagttcattttccataaggatctgtgccaagctcagggtgtagcgctgcaaacgatgaagcaagagtttctcattaaccttgtgaagcaaaagccacaaataacagaggaacaacttgaggctgtcattgcagatttctcaggcctgttggagaaatgctgccaaggccaggaacaggaagtctgctttgctgaagagggacaaaaactgatttcaaaaactcgtgctgctttgggagtttaaattacttcaggggaagagaagacaaaacgagtctttcattcggtgtgaacttttctctttaattttaactgatttaacactttttgtgaattaatgaaatgataaagacttttatgtgagatttccttatcacagaaataaaatatctccaaatgttaaaaaaaaaaaaaaaaaaaaaaaaaaaaaaaaaaaaaaaaaaaaaaaaaaaaaaaaaaaaaaaaaaaaaaaaaaaaaaaaa

SEQ ID NO: 3042 - DNA, 3902 bp, Homo sapiens
ccacgcgtccggacgggcccggtgctgaagggcagggaacaacttgatggtgctactttgaactgcttttcttttctcctttttgcacaaagagtctcatgtctgatatttagacatgatgagctttgtgcaaaaggggagctggctacttctcgctctgcttcatcccactattattttggcacaacaggaagctgttgaaggaggatgttcccatcttggtcagtcctatgcggatagagatgtctggaagccagaaccatgccaaatatgtgtctgtgactcaggatccgttctctgcgatgacataatatgtgacgatcaagaattagactgccccaacccagaaattccatttggagaatgttgtgcagtttgcccacagcctccaactgctcctactcgccctcctaatggtcaaggacctcaaggccccaagggagatccaggccctcctggtattcctgggagaaatggtgaccctggtattccaggacaaccagggtcccctggttctcctggcccccctggaatctgtgaatcatgccctactggtcctcagaactattctccccagtatgattcatatgatgtcaagtctggagtagcagtaggaggactcgcaggctatcctggaccagctggccccccaggccctcccggtccccctggtacatctggtcatcctggttcccctggatctccaggataccaaggaccccctggtgaacctgggcaagctggtccttcaggccctccaggacctcctggtgctataggtccatctggtcctgctggaaaagatggagaatcaggtagacccggacgacctggagagcgaggattgcctggacctccaggtatcaaaggtccagctgggatacctggattccctggtatgaaaggacacagaggcttcgatggacgaaatggagaaaagggtgaaacaggtgctcctggattaaagggtgaaaatggtcttccaggcgaaaatggagctcctggacccatgggtccaagaggggctcctggtgagcgaggacggccaggacttcctggggctgcaggtgctcggggtaatgacggtgctcgaggcagtgatggtcaaccaggccctcctggtcctcctggaactgccggattccctggatcccctggtgctaagggtgaagttggacctgcagggtctcctggttcaaatggtgcccctggacaaagaggagaacctggacctcagggacacgctggtgctcaaggtcctcctggccctcctgggattaatggtagtcctggtggtaaaggcgaaatgggtcccgctggcattcctggagctcctggactgatgggagcccggggtcctccaggaccagccggtgctaatggtgctcctggactgcgaggtggtgcaggtgagcctggtaagaatggtgccaaaggagagcccggaccacgtggtgaacgcggtgaggctggtattccaggtgttccaggagctaaaggcgaagatggcaaggatggatcacctggagaacctggtgcaaatgggcttccaggagctgcaggagaaaggggtgcccctgggttccgaggacctgctggaccaaatggcatcccaggagaaaagggtcctgctggagagcgtggtgctccaggccctgcagggcccagaggagctgctggagaacctggcagagatggcgtccctggaggtccaggaatgaggggcatgcccggaagtccaggaggaccaggaagtgatgggaaaccagggcctcccggaagtcaaggagaaagtggtcgaccaggtcctcctgggccatctggtccccgaggtcagcctggtgtcatgggcttccccggtcctaaaggaaatgatggtgctcctggtaagaatggagaacgaggtggccctggaggacctggccctcagggtcctcctggaaagaatggtgaaactggacctcagggacccccagggcctactgggcctggtggtgacaaaggagacacaggaccccctggtccacaaggattacaaggcttgcctggtacaggtggtcctccaggagaaaatggaaaacctggggaaccaggtccaaagggtgatgccggtgcacctggagctccaggaggcaagggtgatgctggtgcccctggtgaacgtggacctcctggattggcaggggccccaggacttagaggtggagctggtccccctggtcccgaaggaggaaagggtgctgctggtcctcctgggccacctggtgctgctggtactcctggtctgcaaggaatgcctggagaaagaggaggtcttggaagtcctggtccaaagggtgacaagggtgaaccaggcggtccaggtgctgatggtgtcccagggaaagatggcccaaggggtcctactggtcctattggtcctcctggcccagctggccagcctggagataagggtgaaggtggtgcccccggacttccaggtatagctggacctcgtggtagccctggtgagagaggtgaaactggccctccaggacctgctggtttccctggtgctcctggacagaatggtgaacctggtggtaaaggagaaagaggggctccgggtgagaaaggtgaaggaggccctcctggagttgcaggacctcctggcaaagatggaaccagtggacatccaggtcccattggaccaccagggcctcgaggtaacagaggtgaaagaggatctgagggctccccaggccacccagggcaaccaggccctcctggacctcctggtgcccctggtccttgctgtggtggtgttggagccgctgccattgctgggattggaggtgaaaaagctggcggttttgccccgtattatggagatgaaccaatggatttcaaaatcaacaccgatgagattatgacttcactcaagtctgttaatggacaaatagaaagcctcattagtcctgatggttctcgtaaaaaccccgctagaaactgcagagacctgaaattctgccatcctgaactcaagagtggagaatactgggttgaccctaaccaaggatgcaaattggatgctatcaaggtattctgtaatatggaaactggggaaacatgcataagtgccaatcctttgaatgttccacggaaacactggtggacagattctagtgctgagaagaaacacgtttggtttggagagtccatggatggtggttttcagtttagctacggcaatcctgaacttcctgaagatgtccttgatgtgcagctggcattccttcgacttctctccagccgagcttcccagaacatcacatatcactgcaaaaatagcattgcatacatggatcaggccagtggaaatgtaaagaaggccctgaagctgatggggtcaaatgaaggtgaattcaaggctgaaggaaatagcaaattcacctacacagttctggaggatggttgcacgaaacacactggggaatggagcaaaacagtctttgaatatcgaacacgcaaggctgtgagactacctattgtagatattgcaccctatgacattggtggtcctgatcaagaatttggtgtggacgttggccctgtttgctttttataaaccaaactctatctgaaatcccaacaaaaaaaatttaactccatatgtgttcctcttgttctaatcttgtcaaccagtgcaagtgaccgacaaaattccagttatttatttccaaaatgtttggaaacagtataatttgacaaagaaaaatgatacttctctttttttgctgttccaccaaatacaattcaaatgctttttgttttatttttttaccaattccaatttcaaaatgtctcaatggtgctataataaataaacttcaacactctttatgataaaaaaaaaaaaaaaa

SEQ ID NO: 3043 - DNA, 645 bp, Homo sapiens
cagagagaatggccagcaggaaggcggggacccggggcaaggtggcagccaccaagcaggcccaacgtggttcttccaacgtcttttccatgtttgaacaagcccagatacaggagttcaaagaagccttcagctgtatcgaccagaatcgtgatggcatcatctgcaaggcagacctgagggagacctactcccagctggggaaggtgagtgtcccagaggaggagctggacgccatgctgcaagagggcaagggccccatcaacttcaccgtcttcctcacgctctttggggagaagctcaatgggacagaccccgaggaagccatcctgagtgccttccgcatgtttgaccccagcggcaaaggggtggtgaacaaggatgagttcaagcagcttctcctgacccaggcagacaagttctctccagctgaggtggagcagatgttcgccctgacacccatggacctggcggggaacatcgactacaagtcactgtgctacatcatcacccatggagacgagaaagaggaatgaggggcagggccaggcccacgggggggcacctcaataaactctgttgcaaaattggaaaaaaaaaaaaaaaaaaaaaaaaaaaaaaaaaaaaaaaaaaaaaaaaaaaaaa

SEQ ID NO: 3044 - DNA, 2733 bp, Homo sapiens; identical to SEQ ID NO: 158

SEQ ID NO: 3045 - DNA, 1849 bp, Homo sapiens; identical to SEQ ID NO: 222

SEQ ID NO: 3046 - DNA, 3052 bp, Homo sapiens; identical to SEQ ID NO: 793

SEQ ID NO: 3047 - DNA, 3407 bp, Homo sapiens; identical to SEQ ID NO: 1984

SEQ ID NO: 3048 - DNA, 1156 bp, Homo sapiens
gagcagtcgtgcattcccagcctcgcctcgggtgtagggattgcatagaaaagcaaaactacacagtcttgactgtgtagttttgtttttaggattagaggctcaccgattcatgtcggagatggtcagaaaaaccaactctccataggacgtcgtttcagaagcaaccttgggcttagtcccaccctttttaggcactcttgagaaatcagagtgcctagaaagatgacaactcaagcaccgacgtttacgcagccgttacaaagcgttgcggtactggagggtagtaccgcaacctttgaggctcacattagtggttttccagttcctgaggtgagctggtttagggatggccaggtgatttccacttccactctgcccggcgtgcagatctcctttagcgatggccgcgctaaactgacgatccccgccgtgactaaagccaacagtggacgatattccctgaaagccaccaatggatctggacaagcgactagtactgctgagcttctcgtgaaagctgagacagcaccacccaacttcgttcaacgactgcagagcatgaccgtgagacaaggaagccaagtgagactccaagtgagagtgactggaatccctacacctgtggtgaagttctaccgggatggagccgaaatccagagctcccttgatttccaaatttcacaagaaggcgacctctacagcttactgattgcagaagcataccctgaggactcagggacctattcagtaaatgccaccaatagcgttggaagagctacttcgactgctgaattactggttcaaggtgaagaagaagtacctgctaaaaagacaaagacaattgtttcgactgctcagatctcagaatcaagacaaacccgaattgaaaagaagattgaagcccactttgatgccagatcaattgcaacagttgagatggtcatagatggtgccgctgggcaacagctgccacataaaacacctcccaggattcctccgaagccaaagtcaagatcccccccccaccacaaacacagcacttcggctcctctaacctgtgccacaggtgaccaccaataaaatcctctgctgagaaaaaaaaaaaaaaaaaaaaaaaaaaaccaaaaaaaaaaaaaaaaaaaaaaaaaaaaaa

SEQ ID NO: 3049 - DNA, 2817 bp, Homo sapiens
ggaatcggggtttctgggtgacggtgatctcggggtgggcaggactccaaaggcccgtcgacccggtggtggactccttgcactgggattggacatatgcaagcgggagatttggggccggcgctcaaaatcggggggcgggggtggactcgggtttggaccccaggatccgatcagcggacccttgattcaacgtgaggtcccgaattgacgtccttccctcaaaacctccgggtctacaaaccaggaccctcaagacccttcagggctccagcgtgacatggctgaagcgcaccaggccgtgggcttccgaccctcgctgacctcggacggggctgaagtggaactcagtgcccctgtgctgcaggagatctacctctctggcctgcgctcctggaaaaggcatctctcacgtttctggaatgactttctcaccggtgtgtttcctgccagccccctcagttggcttttcctcttcagtgccatccagcttgcctggttcctccagctggatccttccttaggactgatggagaagatcaaagagttgctgcctgactggggtggacaacaccacgggctccggggggtcctggcagccgcgctgtttgcctcgtgtttgtggggagccctgatcttcacactgcacgtggccctgaggctgcttctgtcctaccacggctggcttcttgagccccacggagccatgtcctcccccaccaagacctggctggccctggtccgcatcttctctggccgccacccgatgctgttcagttaccagcgctccctgccacgccagcccgtgccctctgtgcaggacaccgtgcgcaagtacctggagtcggtccggcccatcctctccgacgaggacttcgactggaccgcggtcctggcgcaggaattcctgaggctgcaggcgtcgctgctgcagtggtacctgcggctcaagtcctggtgggcgtccaattatgtcagtgactggtgggaggaatttgtgtacctgcgctcccgaaatccgctgatggtgaacagcaactattacatgatggcagctcgcgctgggaatgccgtccatgccctcctcctgtaccgccaccgcctgaaccgccaggagatacccccgactttgctgatgggaatgcgccccttatgctctgcccagtacgagaagatcttcaacaccacgcggattccaggggtccaaaaagactacatccgccacctccatgacagccaacacgtggctgtcttccaccggggccgattcttccgcatggggacccactcccgaaacagcctgctttccccgagagccctggagcagcagtttcagagaatcctggatgatccctcaccggcctgcccccacgaggaacatctggcagctctgacagctgctcccaggggcacgtgggcccaggtgcggacatccctgaagacccaggcagcggaggccctggaggcggtggaaggggccgctttctttgtgtcactggatgctgagcccgcggggctcaccagggaggacccggcagcgtcgttggatgcctacgcccatgctctgctggccggccggggccatgatcgctggtttgacaaatccttcaccctaatcgtcttctctaacgggaagctgggcctcagcgtggagcactcctgggccgactgccccatctcaggacacatgtgggagttcactctggctacagaatgctttcagctgggctactcaacagacggccactgcaaggggcacccggaccccacactaccccagccccagcggctgcaatgggaccttccagaccagatccactcctccatctctctagccctgaggggagccaagatcttgtctgaaaatgtcgactgccatgtcgttccattctccctatttggcaagagcttcatccgacgctgccacctctcttcagacagcttcatccagatcgccttgcaactggcccacttccgggacaggggtcaattctgcctgacttatgagtcggccatgactcgcttattcctggaaggccggacggagacggtgcggtcttgcacgagggaggcctgcaactttgtcagggccatggaggacaaagagaagacggacccacagtgcctcgccctgttccgcgtggcagtggacaagcaccaggctctgctgaaggcagccatgagcgggcagggagttgaccgccacctgtttgcgctgtacatcgtgtcccgattcctccacctgcagtcgcccttcctgacccaggtccattcggagcagtggcagctgtccaccagccagatccctgttcagcaaatgcatctgtttgacgtccacaattacccggactatgtttcctcaggcggtggattcgggcctgctgatgaccatggttatggtgtttcttatatcttcatgggggatggcatgatcaccttccacatctccagcaaaaaatcaagcacaaaaacggattcccacaggctggggcagcacattgaggacgcactgctggatgtggcctccctgttccaggcgggacagcattttaagcgccggttcagagggtcagggaaggagaactccaggcacaggtgtggatttctctcccgccagactggggcctccaaggcctcaatgacatccaccgacttctgactccttccagcaggcagctggcctctccaaggaataagggtgaaattgccacagctggctgacacaggacaggggcaactggtttggcaaccccacatccaggccaataaagatgtgtgagctgggaaaaaaaaaaaaaaaaaaaaaaaaaaaaaaaa

SEQ ID NO: 3050 - DNA, 1675 bp, Homo sapiens
accagccacagacgggtcatgagcccggtattactgctggccctcctggggttcatcctcccactgccaggagtgcaggcgctgctctgccagtttgggacagttcagcatgtgtggaaggtgtccgacctgccccggcaatggacccctaagaacaccagctgcgacagcggcttggggtgccaggacacgttgatgctcattgagagcggaccccaagtgagcctggtgctctccaagggctgcacggaggccaaggaccaggagccccgcgtcactgagcaccggatgggccccggcctctccctgatctcctacaccttcgtgtgccgccaggaggacttctgcaacaacctcgttaactccctcccgctttgggccccacagcccccagcagacccaggatccttgaggtgcccagtctgcttgtctatggaaggctgtctggaggggacaacagaagagatctgccccaaggggaccacacactgttatgatggcctcctcaggctcaggggaggaggcatcttctccaatctgagagtccagggatgcatgccccagccaggttgcaacctgctcaatgggacacaggaaattgggcccgtgggtatgactgagaactgcaataggaaagattttctgacctgtcatcgggggaccaccattatgacacacggaaacttggctcaagaacccactgattggaccacatcgaataccgagatgtgcgaggtggggcaggtgtgtcaggagacgctgctgctcctagatgtaggactcacatcaaccctggtggggacaaaaggctgcagcactgttggggctcaaaattcccagaagaccaccatccactcagcccctcctggggtgcttgtggcctcctatacccacttctgctcctcggacctgtgcaatagtgccagcagcagcagcgttctgctgaactccctccctcctcaagctgcccctgtcccaggagaccggcagtgtcctacctgtgtgcagccccttggaacctgttcaagtggctccccccgaatgacctgccccaggggcaccactcattgttatgatgggtacattcatctctcaggaggtgggctgtccaccaaaatgagcattcagggctgcgtggcccaaccttccagcttcttgttgaaccacaccagacaaatcgggatcttctctgcgcgtgagaagcgtgatgtgcagcctcctgcctctcagcatgagggaggtggggctgagggcctggagtctctcacttggggggtggggctggcactggccccagcgctgtggtggggagtggtttgcccttcctgctaactctattacccccacgattcttcaccgctgctgaccacccacactcaacctccctctgacctcataacctaatggccttggacaccagattctttcccattctgtccatgaatcatcttccccacacacaatcattcatatctactcacctaacagcaacactggggagagcctggagcagccggacttgccctatgggagaggggacgctggaggagtggctgcatgtatctgataatacagaccctgtcctttctcccaaaaaaaaaaaaaaaaaaaaaaaaaaaaaaaaaaaaaaaaaaaaaaaaaaaaaaaaaaaaaaaaaaaaaaaaaaaaaaaaaaa

SEQ ID NO: 3051 - DNA, 468 bp, Homo sapiens
gccccctcccctgactatcaaagcagcggccggctgttggggtccaccacgccttccacctgccccactgcttcttcgcttctctcttggaaagtccagtctctcctcggcttgcaatggaccccaactgctcctgcgccgctggtgtctcctgcacctgcgctggttcctgcaagtgcaaagagtgcaaatgcacctcctgcaagaagagctgctgctcctgctgccccgtgggctgtagcaagtgtgcccagggctgtgtttgcaaaggggcgtcagagaagtgcagctgctgcgactgatgccaggacaacctttctcccagatgtaaacagagagacatgtacaaacctggatttttttttataccaccttgacccatttgctacattccttttcctgtgaaatatgtgagtgataattaaacactttagacccaaaaaaaaaaaaaaaaaaaaaaaaaaaaaa

SEQ ID NO: 3052 - DNA, 1430 bp, Homo sapiens
gtgagcagcccctaacaggctgttacttcactacaactgacgatatgatcatcttaatttacttatttctcttgctatgggaagacactcaaggatggggattcaaggatggaatttttcataactccatatggcttgaacgagcagccggtgtgtaccacagagaagcacggtctggcaaatacaagctcacctacgcagaagctaaggcggtgtgtgaatttgaaggcggccatctcgcaacttacaagcagctagaggcagccagaaaaattggatttcatgtctgtgctgctggatggatggctaagggcagagttggataccccattgtgaagccagggcccaactgtggatttggaaaaactggcattattgattatggaatccgtctcaataggagtgaaagatgggatgcctattgctacaacccacacgcaaaggagtgtggtggcgtctttacagatccaaagcaaatttttaaatctccaggcttcccaaatgagtacgaagataaccaaatctgctactggcacattagactcaagtatggtcagcgtattcacctgagttttttagattttgaccttgaagatgacccaggttgcttggctgattatgttgaaatatatgacagttacgatgatgtccatggctttgtgggaagatactgtggagatgagcttccagatgacatcatcagtacaggaaatgtcatgaccttgaagtttctaagtgatgcttcagtgacagctggaggtttccaaatcaaatatgttgcaatggatcctgtatccaaatccagtcaaggaaaaaatacaagtactacttctactggaaataaaaactttttagctggaagatttagccacttataaaaaaaaaaaaaggatgatcaaaacacacagtgtttatgttggaatcttttggaactcctttgatctcactgttattattaacatttatttattatttttctaaatgtgaaagcaatacataatttagggaaaattggaaaatataggaaactttaaacgagaaaatgaaacctctcataatcccactgcatagaaataacaagcgttaacattttcatatttttttctttcagtcatttttctatttgtggtatatgtatatatgtacctatatgtatttgcatttgaaattttggaatcctgctctatgtacagttttgtattatactttttaaatcttgaactttataaacattttctgaaatcattgattattctacaaaaacatgattttaaacagctgtaaaatattctatgatatgaatgttttatgcattatttaagcctgtctctattgttggaatttcaggtcattttcataaatattgttgcaataaatatccttgaacacaaaaaaaaaaaaaaaaaaaaaaaaaaaaaaaaaaaaaaaaa

SEQ ID NO: 3053 - DNA, 870 bp, Homo sapiens
cagacgccacgtctctcggtttcttcttagatcactcctctgccaaagatcccaacaagacaacatggctcccaagaagcctgagcctaagaaggaggcagccaagccagctccagctccagctccagcccctgcaccagcccctgccccagctcctgaggctcccaaggaacctgcctttgaccccaagagtgtaaagatagacttcactgccgaccagattgaagagttcaaagaggccttttcattgtttgaccggaccccgactggagagatgaagatcacctacggccagtgcggggatgtactgcgggccctgggccagaaccctaccaatgccgaggtgctgcgtgtgctgggcaagcccaagcctgaagagatgaatgtcaagatgctggactttgagacgttcttgcccatcctgcagcacatttcccgcaacaaggagcagggcacctatgaggacttcgtggagggcctgcgtgtctttgacaaggagagcaatggcacggtcatgggtgctgagcttcggcacgtccttgccaccctgggagagaagatgactgaggctgaagtggagcagctgttagctgggcaagaggatgccaatggctgcatcaattatgaagcctttgtcaagcacatcatgtcagggtgaagcagagtcttccaggtgcctggcccttggctttagccataccagggtgagttaaagagaggccccggctgggtgagctgagatggagtcctcgacttatcaccacaccactgccccaaggaccttacaggccctccctgttaataaacagctctaacacggccaggctgggctctgggattctgaaaaaaaaaaaaaaaaaaaaaaaaaaa

SEQ ID NO: 3054 - DNA, 764 bp, Homo sapiens
gtgagccgccagcatggatgacatctacaaggctgcggtagagcagctgacagaagagcagaaaaatgagttcaaggcagccttcgacatcttcgtgctgggcgctgaggatggctgcatcagcaccaaggagctgggcaaggtgatgaggatgctgggccagaaccccacccctgaggagctgcaggagatgatcgatgaggtggacgaggacggcagcggcacggtggactttgatgagttcctggtcatgatggttcggtgcatgaaggacgacagcaaagggaaatctgaggaggagctgtctgacctcttccgcatgtttgacaaaaatgctgatggctacatcgacctggatgagctgaagataatgctgcaggctacaggcgagaccatcacggaggacgacatcgaggagctcatgaaggacggagacaagaacaacgacggccgcatcgactatgatgagttcctggagttcatgaagggtgtggagtagatgctgaccttcacccagagctgcctatgcccagcctccaactccagctgagtcctggggttggggagggggtcggggtcccaggacctgagcctggccatgtcctcaaccccaaatcccccgactccctccccagatctgtcctgggggatgcaaataaagcctgctctcccaaaaaaaaaaaaaaaaaaaaaaaaaaaaaaaaaaaaaaaaaaaaaaaaaaaaaaaaaaaaaaaaaaaaaaaaaaaaaaaaaaaaaaaaaaaa

SEQ ID NO: 3055 - DNA, 765 bp, Homo sapiens
ccacgcgtccgggacccggcccgcgccttctgcccctgctgccggccgcgccatgcggtgagcgccccaggccgccagagcccacccgacccggcccgacgcccggacctgccgcccagacccgccaccgcacccggaccccgacgctccgaacccgggcgcagccgcagctcaagatggcccgaggcagcgccctccttctcgcctccctcctcctcgccgcggccctttctgcctctgcggggctctggtcgccggccaaggaaaaacgaggctggaccctgaacagcgcgggctacctgctgggcccacatgccgttggcaaccacaggtcattcagcgacaagaatggcctcaccagcaagcgggagctgcggcccgaagatgacatgaaaccaggaagctttgacaggtccatacctgaaaacaatatcatgcgcacaatcattgagtttctgtctttcttgcatctcaaagaggccggtgccctcgaccgcctcctggatctccccgccgcagcctcctcagaagacatcgagcggtcctgagagcctcctgggcatgtttgtctgtgtgctgtaacctgaagtcaaaccttaagataatggataatcttcggccaatttatgcagagtcagccattcctgttctctttgccttgatgttgtgttgttatcatttaagattttttttttttggtaattattttgagtggcaaaataaagaatagcaattaaaaaaaaaaaaacaaaaaaaaaaaaaaaa

SEQ ID NO: 3056 - DNA, 875 bp, Homo sapiens
catgaatctacttctgatccttacctttgttgcagctgctgttgctgccccctttgatgatgatgacaagatcgttgggggctacatctgtgaggagaattctgtcccctaccaggtgtccttgaattctggctaccacttctgcggtggctccctcatcagcgaacagtgggtggtgtcagcaggtcactgctacaagtcccgcatccaggtgagactgggagagcacaacatcgaagtcctggaggggaatgaacagttcatcaatgcggccaagatcatccgccaccccaaatacaacagccggactctggacaatgacatcctgctgatcaagctctcctcacctgccgtcatcaattcccgcgtgtccgccatctctctgcccactgcccctccagctgctggcaccgagtccctcatctccggctggggcaacactctgagttctggtgccgactacccagacgagctgcagtgcctggatgctcctgtgctgagccaggctgagtgtgaagcctcctaccctggaaagattaccaacaacatgttctgtgtgggcttcctcgagggaggcaaggattcctgccagggtgattctggtggccctgtggtctccaatggagagctccaaggaattgtctcctggggctatggctgtgcccagaagaacaggcctggagtctacaccaaggtctacaactatgtggactggatttaggacaccatagctgccaacagctaaagcccctggtccctctgcagtctctataccaataaagtgaccctgctctcaaaaaaaaaaaaaaaaaaaaaaaaaaaaaaaaaaaaaaaaaaaataaaaaaaaaaaaaaaaaaaaaaaaaaaaaaaaaaa

SEQ ID NO: 3057 - DNA, 802 bp, Homo sapiens; identical to SEQ ID NO: 605

SEQ ID NO: 3058 - DNA, 4231 bp, Homo sapiens
ggaaaagagggcacccagcccttccccctccctcatcctcccatcccagtaaaccctgccaaattggaatcctggacttaatttaggagaaaggccctgtaaccaagatactgactgaacatggctggcggactcaggctggggtctgcagtgcagcattaatgggccgctgacatgaatatggagtagttttctctagcaaagagtggcttccagcttcttaaagtctgacaagaaccggatagggggaacctacaagaagaccatctataaagaatacaaggatgactcatacacagatgaagtggcccagcctgcctggttgggcttcctggggccagtgttgcaggctgaagtgggggatgtcattcttattcacctgaagaattttgccactcgtccctataccatccaccctcatggtgtcttctacgagaaggactctgaaggttccctatacccagatggctcctctgggccactgaaagctgatgactctgttcccccggggggcagccatatctacaactggaccattccagaaggccatgcacccaccgatgctgacccagcgtgcctcacctggatctaccattctcatgtagatgctccacgagacattgcaactggcctaattgggcctctcatcacctgtaaaagaggagccctggatgggaactcccctcctcaacgccaggatgtagaccatgatttcttcctcctcttcagtgtggtagatgagaacctcagctggcatctcaatgagaacattgccacttactgctcagatcctgcttcagtggacaaagaagatgagacatttcaggagagcaataggatgcatgcaatcaatggctttgtttttgggaatttacctgagctgaacatgtgtgcacagaaacgtgtggcctggcacttgtttggcatgggcaatgaaattgatgtccacacagcatttttccatggacagatgctgactacccgtggacaccacactgatgtggctaacatctttccagccacctttgtgactgctgagatggtgccctgggaacctggtacctggttaattagctgccaagtgaacagtcactttcgagatggcatgcaggcactctacaaggtcaagtcttgctccatggcccctcctgtggacctgctcacaggcaaagttcgacagtacttcattgaggcccatgagattcaatgggactatggcccgatggggcatgatgggagtactgggaagaatttgagagagccaggcagtatctcagataagtttttccagaagagctccagccgaattgggggcacttactggaaagtgcgatatgaagcctttcaagatgagacattccaagagaagatgcatttggaggaagataggcatcttggaatcctggggccagtgatccgggctgaggtgggtgacaccattcaggtggtcttctacaaccgtgcctcccagccattcagcatgcagccccatggggtcttttatgagaaagactatgaaggcactgtgtacaatgatggctcatcttaccctggcttggttgccaagccctttgagaaagtaacataccgctggacagtcccccctcatgccggtcccactgctcaggatcctgcttgtctcacttggatgtacttctctgctgcagatcccataagagacacaaattctggcctggtgggcccgctgctggtgtgcagggctggtgccttgggtgcagatggcaagcagaaaggggtggataaagaattctttcttctcttcactgtgttggatgagaacaagagctggtacagcaatgccaatcaagcagctgctatgttggatttccgactgctttcagaggatattgagggcttccaagactccaatcggatgcatgccattaatgggtttctgttctctaacctgcccaggctggacatgtgcaagggtgacacagtggcctggcacctgctcggcctgggcacagagactgatgtgcatggagtcatgttccagggcaacactgtgcagcttcagggcatgaggaagggtgcagctatgctctttcctcatacctttgtcatggccatcatgcagcctgacaaccttgggacatttgagatttattgccaggcaggcagccatcgagaagcagggatgagggcaatctataatgtctcccagtgtcctggccaccaagccacccctcgccaacgctaccaagctgcaagaatctactatatcatggcagaagaagtagagtgggactattgccctgaccggagctgggaacgggaatggcacaaccagtctgagaaggacagttatggttacattttcctgagcaacaaggatgggctcctgggttccagatacaagaaagctgtattcagggaatacactgatggtacattcaggatccctcggccaaggactggaccagaagaacacttgggaatcttgggtccacttatcaaaggtgaagttggtgatatcctgactgtggtattcaagaataatgccagccgcccctactctgtgcatgctcatggagtgctagaatctactactgtctggccactggctgctgagcctggtgaggtggtcacttatcagtggaacatcccagagaggtctggccctgggcccaatgactctgcttgtgtttcctggatctattattctgcagtggatcccatcaaggacatgtatagtggcctggtggggcccttggctatctgccaaaagggcatcctggagccccatggaggacggagtgacatggatcgggaatttgcattgttgttcttgatttttgatgaaaataagtcttggtatttggaggaaaatgtggcaacccatgggtcccaggatccaggcagtattaacctacaggatgaaactttcttggagagcaataaaatgcatgcaatcaatgggaaactctatgccaaccttaggggtcttaccatgtaccaaggagaacgagtggcctggtacatgctggccatgggccaagatgtggatctacacaccatccactttcatgcagagagcttcctctatcggaatggcgagaactaccgggcagatgtggtggatctgttcccagggacttttgaggttgtggagatggtggccagcaaccctgggacatggctgatgcactgccatgtgactgaccatgtccatgctggcatggagaccctcttcactgttttttctcgaacagaacacttaagccctctcaccgtcatcaccaaagagactgaaaaagcagtgccccccagagacattgaagaaggcaatgtgaagatgctgggcatgcagatccccataaagaatgttgagatgctggcctctgttttggttgccattagtgtcacccttctgctcgttgttctggctcttggtggagtggtttggtaccaacatcgacagagaaagctacgacgcaataggaggtccatcctggatgacagcttcaagcttctgtctttcaaacagtaacatctggagcctggagatatcctcaggaagcacatctgtagtgcactcccagcaggccatggactagtcactaaccccacactcaaaggggcatgggtggtggagaagcagaaggagcaatcaagcttatctggatatttctttctttatttattttacatggaaataatatgatttcactttttctttagtttctttgctctacgtgggcacctggcactaagggagtaccttattatcctacatcgcaaatttcaacagctacattatatttccttctgacacttggaaggtattgaaatttctagaaatgtatccttctcacaaagtagagaccaagagaaaaactcattgattgggtttctacttctttcaaggactcaggaaatttcactttgaactgaggccaagtgagctgttaagataacccacacttaaactaaaggctaagaatataggcttgatgggaaattgaaggtaggctgagtattgggaatccaaattgaattttgattctccttggcagtgaactactttgaagaagtggtcaatgggttgttgctgccatgagcatgtacaacctctggagctagaagctcctcaggaaagccagttctccaagttcttaacctgtggcactgaaaggaatgttgagttacctcttcatgttttagacagcaaaccctatccattaaagtacttgttagaacactgaaa

SEQ ID NO: 3059 - DNA, 368 bp, Homo sapiens; identical to SEQ ID NO: 716

SEQ ID NO: 3060 - DNA, 2253 bp, Homo sapiens
atgtggaatctccttcacgaaaccgactcggctgtggccaccgcgcgccgcccgcgctggctgtgcgctggggcgctggtgctggcgggtggcttctttctcctcggcttcctcttcgggtggtttataaaatcctccaatgaagctactaacattactccaaagcataatatgaaagcatttttggatgaattgaaagctgagaacatcaagaagttcttatataattttacacagataccacatttagcaggaacagaacaaaactttcagcttgcaaagcaaattcaatcccagtggaaagaatttggcctggattctgttgagctagcacattatgatgtcctgttgtcctacccaaataagactcatcccaactacatctcaataattaatgaagatggaaatgagattttcaacacatcattatttgaaccacctcctccaggatatgaaaatgtttcggatattgtaccacctttcagtgctttctctcctcaaggaatgccagagggcgatctagtgtatgttaactatgcacgaactgaagacttctttaaattggaacgggacatgaaaatcaattgctctgggaaaattgtaattgccagatatgggaaagttttcagaggaaataaggttaaaaatgcccagctggcaggggccaaaggagtcattctctactccgaccctgctgactactttgctcctggggtgaagtcctatccagatggttggaatcttcctggaggtggtgtccagcgtggaaatatcctaaatctgaatggtgcaggagaccctctcacaccaggttacccagcaaatgaatatgcttataggcgtggaattgcagaggctgttggtcttccaagtattcctgttcatccaattggatactatgatgcacagaagctcctagaaaaaatgggtggctcagcaccaccagatagcagctggagaggaagtctcaaagtgccctacaatgttggacctggctttactggaaacttttctacacaaaaagtcaagatgcacatccactctaccaatgaagtgacaagaatttacaatgtgataggtactctcagaggagcagtggaaccagacagatatgtcattctgggaggtcaccgggactcatgggtgtttggtggtattgaccctcagagtggagcagctgttgttcatgaaattgtgaggagctttggaacactgaaaaaggaagggtggagacctagaagaacaattttgtttgcaagctgggatgcagaagaatttggtcttcttggttctactgagtgggcagaggagaattcaagactccttcaagagcgtggcgtggcttatattaatgctgactcatctatagaaggaaactacactctgagagttgattgtacaccgctgatgtacagcttggtacacaacctaacaaaagagctgaaaagccctgatgaaggctttgaaggcaaatctctttatgaaagttggactaaaaaaagtccttccccagagttcagtggcatgcccaggataagcaaattgggatctggaaatgattttgaggtgttcttccaacgactcggaattgcttcaggcagagcacggtatactaaaaattgggaaacaaacaaattcagcggctatccactgtatcacagtgtctatgaaacatatgagttggtggaaaagttttatgatccaatgtttaaatatcacctcactgtggcccaggttcgaggagggatggtgtttgagctagccaattccatagtgctcccttttgattgtcgagattatgctgtagttttaagaaagtatgctgacaaaatctacagtatttctatgaaacatccacaggaaatgaagacatacagtgtatcatttgattcacttttttctgcagtaaagaattttacagaaattgcttccaagttcagtgagagactccaggactttgacaaaagcaacccaatagtattaagaatgatgaatgatcaactcatgtttctggaaagagcatttattgatccattagggttaccagacaggcctttttataggcatgtcatctatgctccaagcagccacaacaagtatgcaggggagtcattcccaggaatttatgatgctctgtttgatattgaaagcaaagtggacccttccaaggcctggggagaagtgaagagacagatttatgttgcagccttcacagtgcaggcagctgcagagactttgagtgaagtagcctaa

SEQ ID NO: 3061 - DNA, 3042 bp, Homo sapiens
agcggggacgggacggcttccgggatttggcggggcctttgtctctagctgctgcgggagctccaggtctagtctttactgctctgtgtattctgctcctagaggcccagcctctgtgactccgttatctgcaggtattgggagatgcacagctaagatgccaggaccacctggaagcctagaaatgggaccactgacatttagggatgtggccatagaattctctctggaggagtggcaatgcctggacactgcacaacggaatttatataggaaagtgatgtttgagaactacagaaacctggtcttcctgggtattgctgtctctaagcctcacctgataacctgtttggagcaaggaaaagagccctggaataggaagagacaggagatggtagccaaacccccagttatatattctcatttcactgaagacctttggccagagcatagcataaaagattcttttcaaaaagtgatactgagaggatatggaaaatgtggacatgagaatttacaattaagaataagttgtaaaagtgtggatgagtctaaggtgttcaaagaaggttataatgaacttaaccaatgtttgagaactacccagagcaaaatatttcaatgtgataaatacgtgaaagtctttcataaattttcaaattcaaacagtcataagaaaagaaatactggaaagaaggttttcaaatgtaaagaatgtggcaaatcattttgcatgctttcacatctaacacaacatataagaattcacactagagagaattcttacaaatgtgaggaatgtggcaaagttcttaactggttctcagagcttattaaacataagggaattcatatgggagagaaaccctacaaatgtgaggaatgtggcaaagcctttaaccaatcctcaacccttattaaacataagaaaattcatattgaagagaaacccttcaaatgtgaagaatgtggcaaagcctttagtttattctcaatccttagtaaacataagataattcatactggagacaaaccttacaaatgtgatgaatgtcacaaagcctttaactggtttgcaacccttactaaccataagagaattcatactggagagaaacccttcaaatgtgaagaatgtggcaaaggctttaaccagttttcaaaccttactaaacataagaaaattcatactggagagaaaccctacaaatgtgaagaatgtggcaaagcttttaaccagtttgcaaaccttactagacataagaaaattcatactggagagaaatcctacaaatgtgaagaatgcggcaaagcttttatacagtcctcaaaccttactgaacatatgagaattcatactggagagaaaccctacaaatgtgaagaatgtggcaaagcttttaatgggtgctccagccttactcgacataagagaattcacactagagagaatacctacaaatgtgaagaatgtggcaaaggctttactttattttcaacccttactaaccataaagtaattcatactggagagaaatcctacaaatgtgatgaatgtggcaatgtttttaactggcctgcaactcttgctaatcataagagaattcatgctagagagaaaccctacaaatgtgaagaatgtggcaaagcttttaaccggtcctcacaccttactagacataagaaaattcatactggtgagaaactctacaaacctgaaaaatgcgacgataattttgataacacctaaaacttttctaaacataaaagacaccatcctgttgagaaaccctaaaaatgtgaagaatttgacaaagccttccaatgattgttacacttgcttgtaggtaagataatttatattggagaaaactttataagtgtaaagaatgtgacaaaacttaaccaatactcacatcttattgcacaggaaagcatttttacttgagaaagattgtacaagtataaagaatgtgaaaaagtcattgatatcttttcacatcttactcaacaccagagtttatacttattaaaagcattataaatgcaattactgtcaaaagaaatttcagaaaacataacactttaaagtgaagaagcatgtttattttgaagacaaacataacaaatataaggagcataggagggttgtagtacctttacttgtattacaaatcttattgtacgcattttgtactagagaaaaacactgaagcagttgctcaaactttgttcaacatcagggaatttatattggagaaaaatcctgcaaatgtaatgaatttggaaaaacattttttttcaaaaactacggcgtagaaaacatgaatttatattgaaatgtgtttttgcagatgcagtaagtatgaaaaatatttaatccaaaattgagtctatgtaaatattaaataatttacagtagaaataactaaggcactgacactttagacattacactaaaacagagtgttgagtataaaaaaatctataagttgttagattatttgtaaataactttaaaaggagtagaagattctttggagagttataattacattgaaagtatactttttttcttgaaaaaattatggcttatttgaaaagtaaataatgatgaaattcaactctcaaattactttatttcattcctattgtattcacatgtgaaagcatgtgataaattgttgctgtgtcagatataggagagattcttttttattagatgggcattatttatggttttttctgtggaagagtatgggcattaaaatgtaaggtttatgatgaaaatctaagtggagaggccctgttagtttacttttcatattgagtgatgcatgaggtaggtgtttggagtaatattctgcatcatagagaaaagcatttttaattttactttaaattaaatgtaattaaattactagtgaatcattttactaattgtacttttatgctataaatgcagtacatttgaaaatttttagattatgtataagcttaattttataattaaacatttctttaacaaaaaaaaaaaaaaaa

SEQ ID NO: 3062 - DNA, 2660 bp, Homo sapiens
agcggggggcggggggccggggtgagcgctaagatggccgccccggctcgggctgttttcagatgcttcaagtgttgtgaacagagacttgtttggattatgcatttctcagctagactaaataaatgctagcaatggatacgtgcaaacatgttgggcagctgcagcttgctcaagaccattccagcctcaaccctcagaaatggcactgtgtggactgcaacacgaccgagtccatttgggcttgccttagctgctcccatgttgcctgtggaagatatattgaagagcatgcactcaagcactttcaagaaagcagtcatcctgttgcattggaggtgaatgagatgtacgttttttgttacctttgtgatgattatgttctgaatgataacgcaactggagacctgaagttactacgacgtacattaagtgccatcaaaagtcaaaattatcactgcacaactcgtagtgggaggtttttacggtccatgggtacaggtgatgattcttatttcttacatgacggtgcccaatctctgcttcaaagtgaagatcaactgtatactgctctttggcacaggagaaggatactaatgggtaaaatctttcgaacatggtttgaacaatcacccattggaagaaaaaagcaagaagaaccatttcaggaaaaaatagtagtaaaaagagaagtaaagaaaagacggcaggaattggagtatcaagttaaagcagaattggaaagtatgcctccaagaaagagtttacgtttacaagggctcgctcagtcgaccataatagaaatagtttctgttcaggtgccagcacaaacgccagcatcaccagcaaaagataaagtactctctacctcagaaaatgaaatatctcaaaaagtcagtgactcctcagttaaacgaaggccaatagtaactcctggtgtaacaggattgagaaatttgggaaatacttgctatatgaattctgttcttcaggtattgagtcatttacttatttttcgacaatgttttttaaagcttgatctgaaccaatggctggctatgactgctagcgagaagacaagatcttgtaagcatccaccagtcacagatacagtagtatatcaaatgaatgaatgtcaggaaaaagatacaggttttgtttgctccagacaatcaagtctgtcatcaggactaagtggtggagcatcaaaaggtagaaagatggaacttattcagccaaaggagccaacttcacagtacatttctctttgtcatgaattgcatactttgttccaagtcatgtggtctggaaagtgggcgttggtctcaccatttgctatgctacactcagtgtggagactcattcctgcctttcgtggttacgcccaacaagacgctcaggaatttctttgtgaacttttagataaaatacaacgtgaattagagacaactggtaccagtttaccagctcttatccccacttctcaaaggaaactcatcaaacaagttctgaatgttgtaaataacatttttcatggacaacttcttagtcaggttacatgtcttgcatgtgacaacaaatcaaataccatagaacctttctgggacttgtcattggagtttccagaaaggtatcaatgcagtggaaaagatattgcttcccagccatgtctggttactgaaatgttggccaaatttacagaaactgaagctttagaaggaaaaatctacgtatgtgaccagtgtaactcaaagcgtagaaggttttcctccaaaccagttgtactcacagaagcccagaaacaacttatgatatgccacctacctcaggttctcagactgcacctcaaacgattcaggtggtcaggacgtaataaccgagagaagattggtgttcatgttggctttgaggaaatcttaaacatggagccctattgctgcagggagaccctgaaatccctcagaccagaatgctttatctatgacttgtccgcggtggtgatgcaccatgggaaaggatttggctcagggcactacactgcctactgctataattctgaaggagggttctgggtacactgcaatgattccaaactaagcatgtgcactatggacgaagtatgcaaggctcaagcttatatcttgttttatacccaacgagttactgagaatggacattctaaacttttgcctccagagctcctgttggggagccaacatcccaatgaagacgctgatacctcgtctaatgaaatccttagctgatccaaagacaatggggttttcttcctgtgatttatatatatactttttaaaagactgatgtaccattttaaacttcattttttcttgtgaatcagtgtatactacatttatacattttatatctaacaatttttttttttacaaagtataaatgtatatatcaactgaaggtaactacttttttcatatttggagttttaaacttttggtgtttacctcagactgatgttacctcttttatatttttatgtcttaattggctcggatgatgaacttgtgcaatcttctaccaacaaagttcaagtggcatcattttatatacatgtatctttttcaggtattttctatacaaattcttaatagatggaaaattagactccaaaaaaaaaaaaaaaa

SEQ ID NO: 3063 - DNA, 1660 bp, Homo sapiens; identical to SEQ ID NO: 2523

SEQ ID NO: 3064 - DNA, 1511 bp, Homo sapiens
atgagcccggtattactgctggccctcctggggttcatcctcccactgccaggagtgcaggcgctgctctgccagtttgggacagttcagcatgtgtggaaggtgtccgacctgccccggcaatggacccctaagaacaccagctgcgacagcggcttggggtgccaggacacgttgatgctcattgagagcggaccccaagtgagcctggtgctctccaagggctgcacggaggccaaggaccaggagccccgcgtcactgagcaccggatgggccccggcctctccctgatctcctacaccttcgtgtgccgccaggaggacttctgcaacaacctcgttaactccctcccgctttgggccccacagcccccagcagatcccatgatgggagctgcagaaggcccctttgggaaggctgagcaggttgactcttgaggccagcaaaagtggggtgcagagaaggtatctgatcaaatccagtgccctctcagtgccccctcactctgtctgtcactttcctagacccaggatccttgaggtgcccagtctgcttgtctatggaaggctgtctggaggggacaacagaagagatctgccccaaggggaccacacactgttatgatggcctcctcaggctcaggggaggaggcatcttctccaatctgagagtccagggatgcatgccccagccaggttgcaacctgctcaatggacacaggaaattgggcccgtgggtatgactgagaactgcaataggaaagaatttctgacctgtcatcgggggaccaccattatgacacacggaaacttggctcaagaacccactgattggaccacatcgaataccgagatgtgcgaggtgggccaggtgtgtcaggagacgctgctgctcatagatgtaggactcacatcaaccctggtggggacaaaaggctgcagcactgttggggctcaaaattcccagaagaccaccatccactcagcccctcctggggtgcttgtggcctcctatacccacttctgctcctcggacctgtgcaatagtgccagcagcagcagcgttctgctgaactccctccctcctcaagctgcccctgtcccaggagaccggcagtgtcctacctgtgtgcagccccttggaacctgttcaagtggctccccccgaatgacctgccccaggggcgccactcattgttatgatgggtacattcatctctcaggaggtgggctgtccaccaaaatgagcattcagggctgcgtggcccaaccttccagcttcttgttgaaccacaccagacaaatcgggatcttctctgcgcgtgagaagcgtgatgtgcagcctcctgcctctcagcatgagggaggtggggctgagggcctggagtctctcacttggggggtggggctggcactggccccagcgctgtggtggggagtggtttgcccttcctgctaactctattacccccacgattcttcaccgctgctgaccacccacactcaacctc

SEQ ID NO: 3065 - DNA, 1017 bp, Homo sapiens
cggcgtctgcgcagctgccagcgcctttaagcccgggctcgcgctctcggaccgtgctttcgccgcctgggagccgtccggcgcagcagtttctaggtccccactgtccccgccgtcccgccccttcgcgtcccgggaaccggctggcttccgagccgcactcgccgatcctccaggcatgccccgctacgagctggctttaatcctgaaagccatgcagcggccagagactgctgctactttgaaacgtacgatagaggccctgatggacagaggagcaatagtgagggacttggaaaacctgggtgaacgagcgcttccttataggatctctgcccacagtcagcagcacaacagaggcgggtatttcttggtggatttttatgcacccaccgcagctgttgaaagcatggtggagcacttgtctcgagatatagatgtgattagagggaatattgtcaaacaccctctgacccaggaactaaaagaatgtgaagggattgtcccagtcccactcgcagaaaaattatattccacaaagaagaggaagaagtgagaagattcgccagattttagccttatatgtaattccttcacatttgggcagcatggacgagaaggaagaatttgcaagtttggcctttatataagcatgtgttgcaggtgctgtttgatttttctaaggtatttttagcccttgatcccctttgcttgcgagaggtggggaactgctcactgacagcttctctgtaacctgcagtaccagtggatcattcttgattttgttttcattagtgtcatttctttgtcattgaggacttttccccttacaacagtaacaccattttttgaagagcaaaacttataatacctcctgggattgtgagctagtcattcagcctgtgtaaccatgtggaaataaaaattgacgaccaatgtattatatggacaacttttgctttgagtaataaacttgattgtaggaatgtgaaaaaaaaaaaaaaaaaaaaaaaaaaa

SEQ ID NO: 3066 - DNA, 2761 bp, Homo sapiens
aggaggctaggtcaggaagggcaagcactggtggcctacccaggacttggcccaaccctctgggtcaggtcaccctcgtcggagtgagcggaccccgctggaattggagcccagtaaggtctatgagtttggtgttttgatcctggctacccatcccttccatcccaggggtggttcaccaggctgagtggagccttatactagggagagaggaagctgaagaactgggctccagcatgtctcagtggaatcaagtccaacagttagaaatcaagtttttggagcaggtggatcaattctatgatgacaactttcccatggaaattcggcatctgttggcccaatggattgaaaatcaagactgggaggcagcttctaacaatgaaaccatggcaacgattcttcttcaaaacttgttaatacaactggatgaacagttaggtcgtgtttccaaagagaaaaacctactcttgatacacaatctaaaaagaattaggaaggtccttcagggaaaatttcatggaaatccaatgcatgtagctgtggttatttcaaactgtttaagggaagagaggagaatattggctgcagccaacatgcctgtccaggggcctctagagaaatccttacaaagttcttcagtttcagaaagacagaggaatgtggagcacaaagtggctgccattaaaaacagtgtgcagatgacagaacaagataccaaatacttagaagatctgcaagacgaatttgactacaggtataaaacaattcagacaatggatcagagtgacaagaatagtgccatggtgaatcaggaagttttgacactgcaggaaatgcttaacagcctcgatttcaagagaaaggaggctctcagtaaaatgacccaaatcatccatgagacagacctgttaatgaacaccatgctcatagaagagctgcaagactggaagcggcggcagcaaatcgcctgcatcgggggtccactccacaatgggctcgaccagcttcagaactgctttacactattggcagaaagtcttttccaactgagaaggcaattggagaaactagaggagcaatctaccaaaatgacatatgaaggtgatcccattccaatgcaaagaactcacatgctagaaagagtcaccttcttgatctacaaccttttcaagaactcatttgtggttgagcgacagccatgtatgccaacccaccctcagaggccgttggtacttaaaaccctaattcagttcactgtaaaactaaggctactaataaaattgccagaactaaactatcaggtaaaggttaaggcatcaattgacaagaatgtttcaactctaagcaaccgaagatttgtactttgtggaactaatgtcaaagccatgtctattgaagaatcttccaatgggagtctctcagtagaatttcgacatttgcaaccaaaggaaatgaagtccagtgctggaggtaaaggaaatgagggctgtcacatggtgactgaagaacttcattccataacgtttgaaacacagatctgcctctatggcctgaccatagatttggagaccagctcattgcctgtggtgatgatttccaatgtcagtcagttacctaatgcttgggcatccatcatttggtacaacgtgtcaaccaacgattcccagaacttggttttctttaataatcctccacctgccacattgagtcaactactggaggtgatgagctggcagttttcatcgtacgttggtcgtggtcttaactcagatcaactccatatgctggcagagaagcttacagtccaatctagctacagtgatggtcacctcacctgggccaagttctgcaaggaacatttacctggtaaatcatttaccttttggacatggcttgaagcaatattggatctaattaagaaacacattcttcccctttggattgatgggtatgtcatgggctttgttagcaaagagaaggaacggctgttgctaaaggataaaatgcctggcacctttttattaagattcagtgaaagccatctcggaggaataactttcacctgggtggaccattctgaaagtggggaagtgagattccactctgtagaaccctacaataaaggccggttgtctgctctgccattcgctgacatcctgcgagactacaaagttattatggctgaaaacattcctgaaaaccctctgaagtacctatatcctgacattcccaaagacaaagccttcggtaaacactacagctctcagccttgcgaagtttcaagaccaacagaaaggggtgacaaaggttatgttccttctgtttttatccccatctcaacaatccgaagtgattcaacagagccacattctccatcagaccttcttcccatgtctccaagtgtgtatgcggtgttgagagaaaacctgagtcccacaacaattgaaactgcaatgaagtctccttattctgctgaatgacaggataaactctgacgcaccaagaaaggaagcaaatgaaaaagtttaaagactgttctttgcccaataaccacattttatttcttcagctttgtaaataccaggttctaggaaatgtttgacatctgaagctctcttcacactcccgtggcactcctcaattgggagtgttgtgactgaaatgcttgaaaccaaagcttcagataaacttgcaagataagacaactttaagaaaccagtgttaataacaatattaacagaagaaaaaaaaaaaaaaa

SEQ ID NO: 3067 - DNA, 2292 bp, Homo sapiens
cccagcctctgccaggttcggtccgccatcctcgtcccgtcctccgccggcccctgccccgcgcccagggatcctccagctcctttcgcccgcgccctccgttcgctccggacaccatggacaagttttggtggcacgcagcctggggactctgcctcgtgccgctgagcctggcgcagatcgatttgaatataacctgccgctttgcaggtgtattccacgtggagaaaaatggtcgctacagcatctctcggacggaggccgctgacctctgcaaggctttcaatagcaccttgcccacaatggcccagatggagaaagctctgagcatcggatttgagacctgcaggtatgggttcatagaagggcatgtggtgattccccggatccaccccaactccatctgtgcagcaaacaacacaggggtgtacatcctcacatccaacacctcccagtatgacacatattgcttcaatgcttcagctccacctgaagaagattgtacatcagtcacagacctgcccaatgcctttgatggaccaattaccataactattgttaaccgtgatggcacccgctatgtccagaaaggagaatacagaacgaatcctgaagacatctaccccagcaaccctactgatgatgacgtgagcagcggctcctccagtgaaaggagcagcacttcaggaggttacatcttttacaccttttctactgtacaccccatcccagacgaagacagtccctggatcaccgacagcacagacagaatccctgctaccaatatggactccagtcatagtacaacgcttcagcctactgcaaatccaaacacaggtttggtggaagatttggacaggacaggacctctttcaatgacaacgcagcagagtaattctcagagcttctctacatcacatgaaggcttggaagaagataaagaccatccaacaacttctactctgacatcaagcaataggaatgatgtcacaggtggaagaagagacccaaatcattctgaaggctcaactactttactggaaggttatacctctcattacccacacacgaaggaaagcaggaccttcatcccagtgacctcagctaagactgggtcctttggagttactgcagttactgttggagattccaactctaatgtcaatcgttccttatcaggagaccaagacacattccaccccagtggggggtcccataccactcatggatctgaatcagatggacactcacatgggagtcaagaaggtggagcaaacacaacctctggtcctataaggacaccccaaattccagaatggctgatcatcttggcatccctcttggccttggctttgattcttgcagtttgcattgcagtcaacagtcgaagaaggtgtgggcagaagaaaaagctagtgatcaacagtggcaatggagctgtggaggacagaaagccaagtggactcaacggagaggccagcaagtctcaggaaatggtgcatttggtgaacaaggagtcgtcagaaactccagaccagtttatgacagctgatgagacaaggaacctgcagaatgtggacatgaagattggggtgtaacacctacaccattatcttggaaagaaacaaccgttggaaacataaccattacagggagctgggacacttaacagatgcaatgtgctactgattgtttcattgcgaatcttttttagcataaaattttctactctttttgttttttgtgttttgttctttaaagtcaggtccaatttgtaaaaacagcattgctttctgaaattagggcccaattaataatcagcaagaatttgatcgttccagttcccacttggaggcctttcatccctcgggtgtgctatggatggcttctaacaaaaactacacatatgtattcctgatcgccaacctttcccccaccagctaaggacatttcccagggttaatagggcctggtccctgggaggaaatttgaatgggtccattttgcccttccatagcctaatccctgggcattgctttccactgaggttgggggttggggtgtactagttacacatcttcaacagaccccctctagaaatttttcagatgcttctgggagacacccaaagggtgaagctatttatctgtagtaaactatttatctgtgtttttgaaatattaaaccctggatcagtcctttgatcagtataattttttaaagttactttgtcagaggcacaaaagggtttaaactgattcataataaatatctgtacttcttcgatcttca

SEQ ID NO: 3068 - DNA, 1339 bp, Homo sapiens
ccccagcctctgccaggttcggtccgccatcctcgtcccgtcctccgccggcccctgccccgcgcccagggatcctccagctcctttcgcccgcgccctccgttcgctccggacaccatggacaagttttggtggcacgcagcctggggactctgcctcgtgccgctgagcctggcgcagatcgatttgaatataacctgccgctttgcaggtgtattccacgtggagaaaaatggtcgctacagcatctctcggacggaggccgctgacctctgcaaggctttcaatagcaccttgcccacaatggcccagatggagaaagctctgagcatcggatttgagacctgcaggtatgggttcatagaagggcacgtggtgattccccggatccaccccaactccatctgtgcagcaaacaacacaggggtgtacatcctcacatccaacacctcccagtatgacacatattgcttcaatgcttcagctccacctgaagaagattgtacatcagtcacagacctgcccaatgcctttgatggaccaattaccataactattgttaaccgtgatggcacccgctatgtccagaaaggagaatacagaacgaatcctgaagacatctaccccagcaaccctactgatgatgacgtgagcagcggctcctccagtgaaaggagcagcacttcaggaggttacatcttttacaccttttctactgtacaccccatcccagacgaagacagtccctggatcaccgacagcacagacagaatccctgctaccagagaccaagacacattccaccccagtggggggtcccataccactcatggatctgaatcagatggacactcacatgggagtcaagaaggtggagcaaacacaacctctggtcctataaggacaccccaaattccagaatggctgatcatcttggcatccctcttggccttggctttgattcttgcagtttgcattgcagtcaacagtcgaagaaggtgtgggcagaagaaaaagctagtgatcaacagtggcaatggagctgtggaggacagaaagccaattggactcaacggagaggccagcaagtctcaggaaatggtgcatttggtgaacaaggagtcgtcagaaactccagaccagtttatgacagctgatgagacaaggaacctgcagaatgtggacatgaagattggggtgtaacacctacaccattatcttggaaagaaacaaccgttggaaacataaccattacagggagctgggacacttaacagatgcaatgtgctactgattgtttcattgcgaatcttttttagcataaaattttctactctta

SEQ ID NO: 3069 - DNA, 1865 bp, Homo sapiens
agcgggtgcgcgtcgggcacagcgcgtgcagcctcgtgcagctcttctggtctccggcgcccgcccctcagacgtaatgttgaattaaagaaaatactttatcagaagaagatggccactgcccagttgcagaggactcccatgagtgcactggtatttcccaataagatatcaactgaacaccagtctttggtgttagtgaagaggcttctagcagtttcagtatcctgtatcacgtatttgaggggaatattcccagaatgcgcttatggaacaagatatctagatggatgctaggatgttatgatgcttacagaaaaaatatctaaggatggttgttctagctacaatttcagaatgttaccaattcaaattcaaatacaccaataatggaccactcatggacttcataagtaaaaaccaaagcaacgaatctagcatgttgtctactgacaccaagaaagcaagcattctcctcattcgcaagatttatatcctaatgcaaaatctggggcctttacctaatgatgtttgtttgaccatgaaacttttttactatgatgaagttacacccccagattaccagcctcccggttttaaggatggtgattgtgaaggagttatatttgaaggggaacctatgtatttaaatgtgggagaagtctcaacaccttttcacatcttcaaagtagaagtgaccactgagagagaacgaatggaaaatattgactcaactatactatcaccaaaacaaataaaaacaccatttcaaaaaatcctgagggacaaagatgtagaagatgaacaggagcattatataagtgatgatttggacattgaaactaaaatggaagaacaggaaaaaaaccctgcatcttctgaactcgaagaaccaagtttagtttgtgaggaagatgaaattatgaggtctaaagaaagtccagatctttctatttctcattctcaggttgagcagttagtcaataaaacatctgaacttgatatgtctgaaagcaaaacaagaagtggaaaagtctttcagaataaaatggcaaatggaaatcaaccagtaaaatcttccaaagaaaatcggaagagaagtcaacatgaatctgggagaatagtcctccatcactttgattcttctagtcaagagtcagtgccaaaaaggagaaagtttagtgaaccaaaggaacatatataaaaattatttttgttctgcaggcttgcagagttcttctcaccatttaaactgaaggaccctatattatatttccctaactctgaagatgtatatgtagtttaaagcagtttgtacactaaaactaagtttttggctgactgtcatattgtggtccttaatcttgagataaatccaatagaacttttgaataaaagcaaaagtacaaatgtcataattgattcggtaataagtaaaatttcaaaattgattttgttcattacctacttaatatttcctttaaatatatactaactgttaaggccctctaatgccatttttctaaacagtaatgtttactttggtattaaaatttggtatggattcactttttacttatgttaaaattataccatttaactggctcttttgtcattgtgctgttattaaaacaatgttcttcaatattttgacataatgtattaacattttaatatataatgtacaatttaagaattggtgctttacctttactatgcttttttttacaggacaaaaagactgatttttaaagtatggcattttttgcagcataaataaaatattgttcagtacgtaaaaaaaaaaaaaaaaaaaaaaaaaaaaaaaaaaaaaaaaaaaaaaaaaaaagaaaaaaaaaaaaaaa

SEQ ID NO: 3070 - DNA, 3533 bp, Homo sapiens
agcggaggagccgggcgcgcctgccacgcaaaactaccgggctggcagggcggcgggcgcggtgcgcgatcccgggtggcggcggcaacggcggtggtgacggcggcgactgcagcggccggctctcacctctcccctgtgcacccgcatctcgccgcgccgccgagcagccagcagtccccgggtcgcccagcccacgcgcgcacggccgagcccagcgcacaatagcggcgacagccatggggaaaccggcgaggaaaggatgcgagtggaagcgcttcctgaagaataactgggtgttgctgtccaccgtggccgcggtggtgctaggcattaccacaggagtcttggttcgagaacacagcaacctctcaactctagagaaattctactttgcttttcctggagaaattctaatgcggatgctgaaactcatcattttgccattaattatatccagcatgattacaggtgttgctgcactggattccaacgtatccggaaaaattggtgtgcgcgctgtcgtgtattatttctgtaccactctcattgctgttattctaggtattgtgctggtggtgagcatcaagcctggtgtcacccagaaagtgggtgaaattgcgaggacaggcagcacccctgaagtcagtacggtggatgccatgttagatctcatcaggaatatgttccctgagaatcttgtccaggcctgttttcagcagtacaaaactaagcgtgaagaagtgaagcctcccagcgatccagagatgaacatgacagaagagtccttcacagctgtcatgacaactgcaatttccaagaacaaaacaaaggaatacaaaattgttggcatgtattcagatggcataaacgtcctgggcttgattgtcttttgccttgtctttggacttgtcattggaaaaatgggagaaaagggacaaattctggtggatttcttcaatgctttgagtgatgcaaccatgaaaatcgttcagatcatcatgtgttatatgccactaggtattttgttcctgattgctgggaagatcatagaagttgaagactgggaaatattccgcaagctgggcctttacatggccacagtcctgactgggcttgcaatccactccattgtaattctcccgctgatatatttcatagtcgtacgaaagaaccctttccgatttgccatgggaatggcccaggctctcctgacagctctcatgatctcttccagttcagcaacactgcctgtcaccttccgctgtgctgaagaaaataaccaggtggacaagaggatcactcgattcgtgttacccgttggtgcaacaatcaacatggatgggactgcgctctatgaagcagtggcagcggtgtttattgcacagttgaatgacctggacttgggcattgggcagatcatcaccatcagtatcacggccacatctgccagcatcggagctgctggcgtgccccaggctggcctggtgaccatggtgattgtgctgagtgccgtgggcctgcccgccgaggatgtcaccctgatcattgctgtcgactggctcctggaccggttcaggaccatggtcaacgtccttggtgatgcttttgggacgggcattgtggaaaagctctccaagaaggagctggagcagatggatgtttcatctgaagtcaacattgtgaatccctttgccttggaatccacaatccttgacaacgaagactcagacaccaagaagtcttatgtcaatggaggctttgcagtagacaagtctgacaccatctcattcacccagacctcacagttctagggcccctggctgcagatgactggaaacaaggaaggacatttccgtgagagtcatctcaaacactgcttaaggaaaagagaaacactaatggccaagtgtacatttgatttgatatacagacctccagattattttctatatttggattcacagcctttgcgctctgggttttgggatttgggtgtggggtaagttgaagggaaatcaatttaaaggaaagttctattatctgggttttagaaattctataagagacaaagtttggaagtacataaagtaataactgttagaattaggtaatggatatgaaagagaaaatgctttctcatgcatagacaagtgttttgggtttttaaaaaaaatattctgtcattggttacaaatttttactcaggctttctattggcatggatttcctttgacctctcacttttttataaattataatgcatctaaaccacctgtccccagttaatgtgccaaaatgtcaatttttaacttatctccagccaatttcaaagaaaacagaccagcatagttctgcaataacagttttaagatgggcatagggtttggaagaaagagagaaggattcttttttcaatgtactgtattgggacgctggtaactgttaacccagtgttcagcatagagctatatatatatatatatgtatatatttattattttcatataatttgccagacagagatcagaattgaaccgtcaatgtgaaataaagagttctccttgtacttgaataataaccacgattccaacccaggtctgctttggggcttatcagaactcctttctaaggagcactagaatgagaaatcatgttgttcgatcgtttcacatctgtatatcagctctaaagcagagatgtattatggtgatactccaaggtggcatagccattcatttacaacttccagatttgagctgcctggagggaatccatatcagctctgcataagattatatacaaagctgtcactcacaaaaggctggatgtgctttcatccaactggaaggctttattcttccaagttcattcatactcaaagaggccagtactttgccatccttgcactttctgttatcagggcccaaataacagtggcaagctaccaactaagttgtattttaataaagattccatgggttgaacaagccacgttgcagaaaaagagcttcccctaacctgggttgttgcagagtaaatcccacgacataagctggtatcactggttcgggggaaatagttccattctatgactcttgtctcctcctccaggaggactgttctaactagtaatcttggccctattcattacatcctctgcttgtcattctgctaatttatgaagatagtttattatagtctgtacttcagttctcatcttgtaaataatgcttaacataaacttgtacttacactgaaatccaaaatagtcatgtttctgcagtattctgtagccaacttaaacctgtgctttcatgtttaagaaatgagaaattgtgccaaagatagcagaagagtagataagtgctcagtattgacgacctacatctgaaatctacaacataatgatactgaattgttatgtaaacatcataaatagtaaataatgattcaatgtgaattttaaaatgcaaatattgctattgtttataggaaataaatctaaatataaacgaaaaaaaaaaaaaaaa

SEQ ID NO: 3071 - DNA, 3245 bp, Homo sapiens
ccacgcgtccgccaccgactcctgcccgcctcaacacaatgccttacctgtgaagcttgaggccactcaagttccaaatttgtgacaaatcccccagggctcactggagtggcagatatagacctgcagctaactggatttgatttataagagagaaatctgcagtcaatgcccactcttgccacactgctaatatggaaaacagaatgttcaataggatatggtctgataaatagtgatgattgaagatgctgctccaatacatgtgaaatcaatgggagatatctgctgtccgaagatctttcagagcttttctcgacaagctcccctgtaagaaatcggaggtatattctaccattatacagtctttctcaagtggatataaatacgtttgcctcactgtaaccagacaactagacaactaatgtgggaccatggcactgcccagatgcacgtggccaaattatgtttggagagcagtgatggcatgcttggtacaccggggattgggtgccccattgactctctgtatgttgggatgtttgcttcaggctggccatgtgctatcacaaaaattggatgatgtggacccactggtggctaccaactttggaaagataagagggattaagaaggaactcaataatgaaattttggggcctgttattcaatttcttggggttccatatgcagccccaccaacaggggaacgtcgttttcagcctccagaaccaccatctccctggtcagatatcagaaatgccactcaatttgctcctgtgtgtccccagaatatcattgatggcagattgccagaagtcatgcttcctgtgtggtttactaataacttggatgtggtttcatcatatgtgcaagaccagagcgaagactgcctatatttaaatatatatgtcccgactgaggatgatattcgggacagtgggggtcccaaaccagtgatggtgtatatccatggtggctcatatatggaaggtactggaaatttatatgatggaagtgtcttggcaagttatggcaatgtgatcgtcatcacagtcaactatcgacttggagtactcggtttcttgagtacaggcgatcaggctgcaaaggggaactatggactccttgatctcatacaagctttaagatggactagtgaaaacattggattctttggtggtgaccccttaagaatcactgtttttggatctggtgctgggggttcatgtgtcaacctgctgactttatcccattattctgaaggtaaccgttggagcaattcaaccaaaggactttttcaacgagcaatagctcaaagtggaacagccctttccagctgggctgttagttttcaacctgcaaaatatgctagaatgttggccacaaaagttggttgcaatgtttcagatacagtagagttagtggaatgcctacagaagaagccttacaaagaacttgttgaccaagatattcaaccagctcgataccacatagcctttggacctgtgattgatggtgatgtaataccagacgacccccagatattgatggagcaaggagagtttctcaactatgatataatgttaggagtgaaccaaggggaagggttaaaatttgttgaaaatatagtagatagcgatgatggtatatcagctagtgattttgactttgctgtttcaaattttgttgataatttatatggatatcctgaaggcaaagatgttttgagagaaaccattaagttcatgtatactgactgggctgaccgtcataaccctgaaaccagaagaaagacattactggctttgtttacggaccatcagtgggtggcaccagctgtagccacagcggatcttcactcaaactttggttcacctacgtacttctatgccttttaccatcattgccaaacagatcaggttccagcttgggctgatgcagcccacggagacgaggttccctatgtactgggaatccccatgattggccctacagagttatttccttgcaatttctccaaaaatgatgtgatgctgagtgcagttgtaatgacatactggacaaattttgctaaaactggtgacccaaatcaaccagtccctcaagacacgaaattcattcataccaaacccaaccgttttgaagaagtagcatggaccagatattcccagaaagaccaactttatctccatattggattaaaaccaagagttaaagaacattacagagccaataaggtgaacctctggttggagttggtacctcatctgcataatctcaatgacatttctcagtatacctctacaacaactaaagtgccatcaactgacatcactttcagacctacgagaaaaaattctgtacctgtcacgtcagcctttcccactgccaagcaggatgatcccaaacaacaaccaagtccattttcagtggatcaaagggactactcaacagagctgagtgtcactattgcagttggagcatcactgctgtttctgaacatcttggcctttgcagccctgtactacaaaaaggataagaggagacatgatgttcacaggagatgcagccctcagcgcactactaccaatgatctaacccatgcacaagaagaggaaatcatgtccctccaaatgaagcacactgatttggatcatgaatgtgagtccattcatccacatgaggtggttcttcggaccgcctgtcccccagattacacactagctatgaggaggtcacctgatgatgttcccttaatgacacccaacaccattacaatgattcccaacactataccagggattcagcccttacacacattcaatacatttactggaggacagaacaatactctgccccatccccatccccacccccattcacattcaacaaccagggtatagccagataagagaaacaaactattttttttgatggattgcagtaaacgatcactgaagattccttggctttcaacctacaagacttactatttaaataaggaggaatattatgtgaatatacatatcaagaactttgggggttttgaaaaaaatgaattgtatatatacaaatcaactttaaaaacaaatttcaattgcttgaagcaattgttctgaatgatactttttcattcacattcaagaattaattttttgaagatttaagttacataatggaattaggcatgtggaacaccaaacaggaaagaactatgtctgaaatataaaaaaaaaaaaaaa

SEQ ID NO: 3072 - DNA, 3714 bp, Homo sapiens; identical to SEQ ID NO: 1417

SEQ ID NO: 3073 - DNA, 2220 bp, Homo sapiens
ccacgcgtccggagagcgggaccggcctcagctccaacacagcctccactgtgattaaaaataaaaattgctagagcagccctcactcgccacatctactttgatagctggctatttggaatttaaaggatatttgactttttctaacctcccatgaggctgtaagttccactgctccaaacccacccaccaaggactctgaacctgtccaccccgggcgcatcaagatcttccagctgggtacccccgatttgggccgactttgcacctccaaacaaccttagcatgatgtcttatcttaagcaaccgccttacgcagtcaatgggctgagtctgaccacttcgggtatggacttgctgcacccctccgtgggctacccggggccctgggcttcttgtcccgcagccaccccccggaaacagcgccgggagaggacgacgttcactcgggcgcagctagatgtgctggaagcactgtttgccaagacccggtacccagacatcttcatgcgagaggaggtggcactgaaaatcaacttgcccgagtcgagggtgcaggtatggtttaagaatcgaagagctaagtgccgccaacaacagcaacaacagcagaatggaggtcaaaacaaagtgagacctgccaaaaagaagacatctccagctcgggaagtgagttcagagagtggaacaagtggccaattcactcccccctctagcacctcagtcccgaccattgccagcagcagtgctcctgtgtctatctggagcccagcttccatctccccactgtcagatcccttgtccacctcctcttcctgcatgcagaggtcctatcccatgacctatactcaggcttcaggttatagtcaaggatatgctggctcaacttcctactttgggggcatggactgtggatcatatttgacccctatgcatcaccagcttcccggaccaggggccacactcagtcccatgggtaccaatgcagtcaccagccatctcaatcagtccccagcttctctttccacccagggatatggagcttcaagcttgggttttaactcaaccactgattgcttggattataaggaccaaactgcctcctggaagcttaacttcaatgctgactgcttggattataaagatcagacatcctcgtggaaattccaggttttgtgaagacctgtagaacctctttttgtgggtgatttttaaatatactgggctggacattccagttttagccaggcattggttaaaagagttagatgggatgatgctcagactcatctgatcaaagttccgagaggcatagaaggaaaaacgaagggccttagaggggcctacaaaccagcaacatgaaatggacaaaccaatctgcttaagatcctgtcatagttttagatcattggttatcctgatttgcaaagtgatcaaaagcattctagccatgtgcaaccaaacaccaccaaaaataaaatcaaacaaaactaagttgtgaaggaagggagggaaggtcatagccttcttaagcagaggtgttccattgttttagccaatccttggttgaatcttaggaatgaacagtgtctcaagctcattcacgtttcatgaccaactggtagttggcactgaaaaaacttttcagggctgtgtgaattgtgtgactgattgtcctagatgcactactttatttaaaaaataatgttcataaggagtcaatatgtagtttaagagacaatcagtgtgtgtcttataaatggtacatctgtggtttttaatctgtgctagacttcaaaactgtgatctcctgttattgtatgcaaccttgaactccacctctgcaggggttcttctgtgattaaataggttataattataagcaaaattcagagcaactgagtactgatctaaaaagattacctttggctggaggtgagctgcactgaaactttacgacaaaatgtctctggacaaagagagtcagagaagagaagcaaaaggacactaattcatctgtaatttactgttggtaagcctagcagtaaagagacattggtcaattgctctgaccctgatgaattattaaactgagatcattgtcgtttatgcttgcagatgttaaatggaaaagttatatatgcataaaccttttcttcctggatttggcagatatgtataattatattaaaatggttctagcacaaaaaaaaaaaaaaa

SEQ ID NO: 3074 - DNA, 1289 bp, Homo sapiens
ccgagctctactgactcccaacagagcgcccaagaagaaaatggccataagtggagtccctgtgctaggatttttcatcatagctgtgctgatgagcgctcaggaatcatgggctatcaaagaagaacatgtgatcatccaggccgagttctatctgaatcctgaccaatcaggcgagtttatgtttgactttgatggtgatgagattttccatgtggatatggcaaagaaggagacggtctggcggcttgaagaatttggacgatttgccagctttgaggctcaaggtgcattggccaacatagctgtggacaaagccaacctggaaatcatgacaaagcgctccaactatactccgatcaccaatgtacctccagaggtaactgtgctcacgaacagccctgtggaactgagagagcccaacgtcctcatctgtttcatagacaagttcaccccaccagtggtcaatgtcacgtggcttcgaaatggaaaacctgtcaccacaggagtgtcagagacagtcttcctgcccagggaagaccaccttttccgcaagttccactatctccccttcctgccctcaactgaggacgtttacgactgcagggtggagcactggggcttggatgagcctcttctcaagcactgggagtttgatgctccaagccctctcccagagactacagagaacgtggtgtgtgccctgggcctgactgtgggtctggtgggcatcattattgggaccatcttcatcatcaagggattgcgcaaaagcaatgcagcagaacgcagggggcctctgtaaggcacatggaggtgatggtgtttcttagagagaagatcactgaagaaacttctgctttaatggctttacaaagctggcaatattacaatccttgacctcagtgaaagcagtcatcttcagcattttccagccctatagccaccccaagtgtggatatgcctcttcgattgctccgtactctaacatctagctggcttccctgtctattgccttttcctgtatctattttcctctatttcctatcattttattatcaccatgcaatgcctctggaataaaacatacaggagtctgtctctgctatggaatgccccatggggcatctcttgtgtacttattgtttaaggtttcctcaaactgtgatttttctgaacacaataaactattttgatgaaaaaaaaaaaaaaaaaaaaaaaaaaaaaaaaaaaaaaaaaaaaaaaaaaaaaaaaaaaaaaaaaaaaaaaaaaaaaaaaaaaaaaaaaaa

SEQ ID NO: 3075 - DNA, 3609 bp, Homo sapiens
ccacgcgtccggactgatatgatcaaaggcatgctggaaacaaacctattaaagatcagcttggatcaagctttcattcacatctgcctgaactgcatatattgcagagcaaagggaaaattgatagtcaagatgagaagtctgtcaatgatgcttcctcagtttcagcatcccaaagaatttcttgtattcctaaaacccatatttctaataagtatgggaataatttcctccaggaagcacacatgagagaaaaatctttccaatgtaatgagagtggcaaagcctttaattgtagctcactgttaaaaaaatgtcagataatccatttaggagagaaaaaatataaatgtgatatatgtggcaaggtctttaatcagaagcgataccttgcataccatcatagatgtcacactggtgagaaaccttacaagtgtaatcagtgtggcaagaccttcagttacaagtcatcccttgtaattcacaaggcaattcatactggagagaaacctcacaagtgtaatgaatgtggcaaggtttttaatcaaaaagcatatcttgcaagtcatcatagacttcatactggagagaaaccttacaaatgtgaagaatgtgacaaagtttttagtcgctaatcacaccttgaaagacataggagaattcatactggagagaaaccgtacaaatgtaaggtttgtgacaaggctttcagacgtgattcacacctggcacaacatattgtaattcacactggagagaaaccttacaagtgtaatgagtgtggcaagacctttgttcaaaattcatctcttgtaatgcataaggtcattcatactggagagaaatgttacaagtgtaatgaatgtggcaaggtttttaatcacaaatcaaaccttgcatgtcatcatagacttcatactggagagaaaccttacaagtgtaatgaatgtggcaaggtttttaattgaaaatcaaaccttgaacatcatcatagagttcatatcggagaaaaaccttacaaatgtgaagaatgtgacaaagttttcaatttcaattcacgccttgaaatacataggagagttcatactggagagaaaccatagaaatgtaaggtttgtgacaaggcattcgggtgtgattcacacctggcacaacatactagaattcacactggagagaaaccgtgcaagtgtgatgagtgtgacagagccttcagtggtcagtcaacacttattcaccatcaagcaatccatgtcatagggaaactttactaatgtaatgattgtcacaaagtcctcagtaatgctacaaccattgcaaattattggagaatgcataatgaagtgagaacttacaagtgttataaatgtggcaaatttttcagacttcgttcataccttgcagtttatcagcgaactcatactggagagaaaccttacaaatgtgatgattgtggcaaggtcttcagtcaagcttcatcttatgcaaaacacaggtgaattcatacaagaaagaaacctcacaagggtgatgattgtgtcaaagcctttatttcaggttcatgcctcattacacatcagagaatccatactagacagagatcttacaaaagtcatatgtgtggcaagatctttagtctgaggtcactccttgcaggacatcaggaaattcatttttgaggtaataatttcaaatgcaatgagtatagcaaaccatcaagcacaattgatgttagattcaaatcagcattgagttcagtttgagttgacttaacattgagttcaagtatttgttgagattaaagtgtttatgttaagaggattaggccaggtgcggtggctcacacctgtaatcccagcactttgggaggccaagacaggtagatcacttgagatcaggagtttgagagcagcctggccaacagaggtgagcacctttcccagtctgttttttgtttcttcaacaaaaactgatagagatttttatgggtattgtgttgaatcaaaatcacattgggttatgtaatcatttaacagtattaatttttccaaaacatcaatatgggttatatctttatatatgtttttaatcattttgatcaatgtttgtagatttcaatgtatgaatttctcacttctttccatttattcctatttcttactttaagttctctagcaaatggaagtgtttttaaattttcatttaaaattgtttattgttaatgtatgaaaattcaacgaatttttggtgctgatattgtattgtgcaaatctactgatgtgtttattagtcacagtagtattttggttgactctttgtgattttctacacagaagatcatgtcatctacaaaaaatataattttactttttctgattttgaggcatttcatttcttttgctagttcattgctctggctaggacttccagtatttattgaatagaaaaagtgagaacgttcttgcatcatgtgagatcctacgggaaaaggattctattttccctgcttggttatctccacattggtcatttcatcaatggtctttctattggtgaggtaaatttccttctccatctattttgtttaagatttctatgatgatcagatgctgaattttgtgaaatgatttttctccatctgttgagatgatgtggttttcatctttcattctgttcaagtggtatatcacattgatttgcttgaatatgttgaaccatccttgcatgccagaagtaaatggcacttgcatatctacaatccttttatatatcctcttgaatacagttttctagtacaagtggtcttcaagaagctcatggaaaaatacatattatggaaaaattgtgcatgaatttcacagtttttgcaccaaaataaactgatacaaatctgttataacatgtctgaacaggctctagtttgaggcactgagaaggataagacatgagtttgaaaagagactgtatcaaaggaatacaaattctgctaaaattgaaacaagaagaaacataaaatttatgatgagaacagttgcagtgtctcaggtctgtaattccagtaatttcagaggccaagacaggtgggtcacgtgagcccaggcattcaggaccagcctgggcaacatggtgaaaaccccttctatacaaaaaatacagaaattcactgggcagggtggcacctgactgcagggccagctactgtggagtctgtagcatgaggatggcatgagcctgggaggtcgaggctgcagtgagctgtgatcttgccactgcactccagcatgtctcaaaaaaagaatacttatggtaaagtttgggtagatgaattatgatatcattgatgctttatgaaaaggttatggggacgatgcccaaaagaaatcaacagtttgtaaatggataactaattttgagttgggagaagacaatgttgaaggttacacgtggagcagcaggcagaccatccacatcagtttcagagaaaaacaataatcttgtttgtgccgtgatgaagaggactgacagctaacagcagaaacaatagtcaggaggttgagaacaggctggttaacatggtgaaatgccatctctattaaaaaaaaaaaaaaa

SEQ ID NO: 3076 - DNA, 961 bp, Homo sapiens
ccacgcgtccgaagctgacagcattcgggccgagatgtctcgctccgtggccttagctgtgctcgcgctactctctctttctggcctggaggctatccagcgtactccaaagattcaggtttactcacgtcatccagcagagaatggaaagtcaaatttcctgaattgctatgtgtctgggtttcatccatccgacattgaagttgacttactgaagaatggagagagaattgaaaaagtggagcattcagacttgtctttcagcaaggactggtctttctatctcttgtactacactgaattcacccccactgaaaaagatgagtatgcctgccgtgtgaaccatgtgactttgtcacagcccaagatagttaagtgggatcgagacatgtaagcagcatcatggaggtttgaagatgccgcatttggattggatgaattccaaattctgcttgcttgctttttaatattgatatgcttatacacttacactttatgcacaaaatgtagggttataataatgttaacatggacatgatcttctttataattctactttgagtgctgtctccatgtttgatgtatctgagcaggttgctccacaggtagctctaggagggctggcaacttagaggtggggagcagagaattctcttatccaacatcaacatcttggtcagatttgaactcttcaatctcttgcactcaaagcttgttaagatagttaagcgtgcataagttaacttccaatttacatactctgcttagaatttgggggaaaatttagaaatataattgacaggattattggaaatttgttataatgaatgaaacattttgtcatataagattcatatttacttcttatacatttgataaagtaaggcatggttgtggttaatctggtttatttttgttccacaagttaaataaatcataaaacttgaaaaaaaaaaaaaaa

SEQ ID NO: 3077 - DNA, 1810 bp, Homo sapiens
ggaaggcagaagcaatctctgccgagagagtcagccgagcggccgcgcggagaggaggggcgggcggtccccaggcgggcgggtgcagggcgcagggcgccgacctgctggagagggggcccgggcacgaggcggagtcccggcgcgcagccaggctggtggaggcccccggcaggctgcagattccctccggctccgggagccgcagcaggaccggccaggaggcgccatggaggggagccccatcccggtgctgacagtgcccaccgcgccctacgaggaccagcggccggccggcggcgggggtctgcggcgacccaccggcctcttcgagggccagcgcaactacctgcccaactttatccagagcgtgctgtcgtccatcgacctgcgcgaccgtcagggctgcaccatggtggtgggcagcgacggcaggtactttagcaggacggccatcgagatcgtggtgcagatggccgcggccaacgggattggacgactgattattggacagaatggcatcttgtcgacacctgcggtctcctgcattatcaggaagatcaaggcagctggtggaatcattctaacagccagccactgccctggaggaccagggggagagtttggagtgaagtttaatgttgccaatggaggtcctgcacccgatgttgtctcagacaaaatctaccaaatcagcaaaacgattgaggaatatgctatatgtcctgatctccgaatcgacctatctcgactaggaagacaagaatttgacctagaaaacaaattcaaaccattcagagtggagatagtggacccagtggatatctatcttaacctccttcggaccatctttgactttcatgccatcaagggtttgctgactggacccagccaactgaagattcgcattgacgcaatgcacggagttatgggaccttatgtgagaaaagttctgtgtgatgagctgggggccccagccaattctgcaataaactgtgttcccctggaagactttggagggcagcaccctgacccaaacctgacatatgcaacgactcttctggaagcaatgaaaggaggagaatatggatttggagctgcatttgatgctgatggggaccgttatatgatcctaggccaaaatggcttctttgtgagcccttctgactccctggccatcattgctgccaacctctcttgcattccatatttccgtcagatgggggtccgcgggtttgggaggagtatgccaaccagcatggccctggacagagtggccaaatcaatgaaggtccctgtatatgagaccccagctggatggagattcttctcaaatctgatggactcaggacgttgcaatctgtgtggggaagagagctttggcactgtttagatcgtctctattggaacatctttaagttcactgattctttccttagctgtgtccaatctgctgatgagcctgttgaaggaattcttcttctccgatactgtgtgtttttttttttttttttagcatttctctttgactcttttaaaatagtttttagttctctgaaattccccatctgtttatgtaattgtttatctttttcattagatcatttaacatattagacatggttgttttaaacaccctgtctgatagttccaatctctggttcatctctgactttggttcagctgattgctttatctcttgacaatggtttgggttttcctgttttttgtagatctcataaatttttattgaatgctgaataatatgtggataagaacagtaaaaaaaaaaaaaaaaaaaaaaaaaaaa

SEQ ID NO: 3078 - DNA, 2290 bp, Homo sapiens; identical to SEQ ID NO: 129

SEQ ID NO: 3079 - DNA, 5886 bp, Homo sapiens
gcggccgcttcccaccgtccctctccccttactggcagagcgcgctgcgggcggactcccgggcccggagcagcccaccggccaccccaccgcccacccggctcccggtgtctcctcccggccgctctacccagcaactttccgtgctttgttccccgactggaaatgctttacggaagcgtcttggacagggtctccgccaggcgacaagagctcggtgctgagatgtgttacgttctcatctccccatcaattatggatggaaacaaataaggaagagtcaattttgctgagccccttctccggcaacgagaggcgttctgcagccgggagggagccgccgctcgcgccggcagccgctggcaggggcatggtgaggaggaaggtagctcagtggcatttctgagcaggggccaccctgacttcaccttggcccaccatgagggtcttcctgctttgtgcctacatactgctgctgatggtttcccagttgagggcagtcagctttcctgaagatgatgaaccccttaatactgtcgactatcactattcaaggcaatatccggtttttagaggacgcccttcaggcaatgaatcgcagcacaggctggactttcagctgatgttgaaaattcgagacacactttatattgctggcagggatcaagtttatacagtaaacttaaatgaaatgcccaaaacagaagtaatacccaacaagaaactgacatggcgatcaagacaacaggatcgagaaaactgtgctatgaaaggcaagcataaagatgaatgccacaactttatcaaagtatttgttccaagaaacgatgagatggtttttgtttgtggtaccaatgcattcaatcccatgtgtagatactacaggttgagtaccttagaatatgatggggaagaaattagtggcctggcaagatgcccatttgatgccagacaaaccaatgttgccctctttgctgatgggaagctgtattctgccacagtggctgacttcttggccagcgatgccgttatttatcgaagcatgggtgatggatctgcccttcgcacaataaaatatgattccaaatggataaaagagccacactttcttcatgccatagaatatggaaactatgtctatttcttctttcgagaaatcgctgtcgaacataataatttaggcaaggctgtgtattcccgcgtggcccgcatatgtaaaaacgacatgggtggttcccagcgggtcctggagaaacactggacttcatttctaaaggctcggctgaactgttctgtccctggagattcgtttttctactttgatgttctgcagtctattacagacataatacaaatcaatggcatccccactgtggtcggggtgtttaccacgcagctcaatagcatccctggttctgctgtctgtgcatttagcatggatgacattgaaaaagtattcaaaggacggtttaaggaacagaaaactccagattctgtttggacagcagttcccgaagacaaagtgccaaagccaaggcctggctgttgtgcaaaacacggccttgccgaagcttataaaacctccatcgatttcccggatgaaactctgtcattcatcaaatctcatcccctgatggactctgccgttccacccattgccgatgagccctggttcacaaagactcgggtcaggtacagactgacggccatctcagtggaccattcagccggaccctaccagaactacacagtcatctttgttggctctgaagctggcatggtacttaaagttctggcaaagaccagtcctttctctttgaacgacagcgtattactggaagagattgaagcctacaaccatgcaaagtgcagtgctgagaatgaggaagacaaaaaggtcatctcattacagttggataaagatcaccacgctttatatgtggcgttctctagctgcattatccgcatccccctcagtcgctgtgagcgttatggatcatgtaaaaagtcttgtattgcatctcgtgacccgtattgtggctggttaagccagggatcctgtggtagagtgaccccagggatgcttgctgaaggatatgaacaagacacagaattcggcaacacagctcatctaggggactgccatggtgtacgatgggaagtccagtctggagagtccaaccagatggtccacatgaatgtcctcatcacctgtgtctttgctgcttttgttttgggggcattcattgcaggtgtggcagtatactgctatcgagacatgtttgttcggaaaaacagaaagatccataaagatgcagagtccgcccagtcatgcacagactccagtggaagttttgccaaactgaatggtctctttgacagccctgtcaaggaataccaacagaatattgattctcctaaactgtatagtaacctgctaaccagtcggaaagagctaccacccaatggagatactaaatccatggtaatggaccatcgagggcaacctccagagttggctgctcttcctactcctgagtctacacccgtgcttcaccagaagaccctgcaggccatgaagagccactcagaaaaggcccatggccatggagcttcaaggaaagaaacccctcagttttttccgtctagtccgccacctcattccccattaagtcatgggcatatccccagtgccattgttcttccaaatgctacccatgactacaacacgtctttctcaaactccaatgctcacaaagctgaaaagaagcttcaaaacattgatcaccctctcacaaagtcatccagtaagagagatcaccggcgttctgttgattccagaaataccctcaatgatctcctgaagcatctgaatgacccaaatagtaaccccaaagccatcatgggagacatccagatggcacaccagaacttaatgctggatcccatgggatcgatgtctgaggtcccacctaaagtccctaaccgggaggcatcgctatactcccctccttcaactctccccagaaatagcccaaccaagcgagtggatgtccccaccactcctggagtcccaatgacttctctggaaagacaaagaggttatcacaaaaattcctcccagaggcactctatatctgctatgcctaaaaacttaaactcaccaaatggtgttttgttatccagacagcctagtatgaaccgtggaggatatatgcccacccccactggggcgaaggtggactatattcagggaacaccagtgagtgttcatctgcagccttccctctccagacagagcagctacaccagtaatggcactcttcctaggacgggactaaagaggacgccgtccttaaaacctgacgtgccaccaaagccttcctttgttcctcaaaccccatctgtcagaccactgaacaaatacacatactaggcctcaagtgtgctattcccatgtggctttatcctgtccgtgttgttgagaggatgatgttgtaagggtaccttaaaacaagagactcgcttgtattttaagagaaccaagtggccaaagaaactctttctaactttggcaacatcagaacttgccacatgtagctactgcagcaaggcttctgtgtacttgcctgaaaacaaaggaaggtgctggtcattccatttcttttgtttgaagctaaagagatgtgtagctcacaggggctaccttaccagtataaagagctgataacagtactcagaagaatctgtgaacaaatacttgaaaatgggttcaatgtagactgccattatgtgtggtcttcccattaaatgtgaacattttaatatgtatgcattcaccttgcctcttgcacaaatgtcaaaaaaaagatggtaatatctcaaagaaatgaacttgtagattaccaagcagtttgctaaaaattcaatctttgacccaagctgtagcatttttttttcatgtgtggcatctttttcatgccaccaacaaacttgttgtgtgtgtgcgtgtgtgtgtgtgtgtgtgtgtgtgtgtgtgtgtgttctgtacccactaggatttgtttaggtgcccattgcatctttttgtgctatggagttgtttacattaagcatgaccgaacgagagacaatactatttcccacaggagtccattgggttcagctttgaaagaggaatagaatcgaggctcctttgaccatcaaaatgatgaactttacttatgtggtacccaatgccagaatgtaagagttgcaagtgattttgtgctgctattcattaaaacttgtattccagtcttgccagcttaaggagatcaagatattaagaggtatccttgatttattttccagtattcagtagtaaaattttcctgtccactgtgaatcaaagcctgagtcactctatttaaccttggacacactaataaggttttattttgattgtgttcgtttccccccccccaatagtaaaatttctcctcctttaactcctcctaccccccaaggtaagaaacaaaaaacaaacaaacaaacaaaaatagaagacaaaagaaagacatatgaaaggaattgtaattggcttaacagaaacagtctgtaaaaacctaacagtggtgcaatcatgttgtctgtgttgtgttatgtgagaattttctcctaagtcatgcaggtaatgacaatatactgtaaataccacatgtgagtttacctgaatctgtgcattttgtgccttattcatgagaatgatagaagtactaaaatctgtcaagtgttttcagtatagcacattatttactgagtgccagttgtaaatgtttttcaaccagcacctaaaaagactcttttcaaaaaatcacagaaacaacctaggacaattatttgttacataatccgacctcatagcagcattacattctttgccgtgataaacattccactcctgctttcctaaggatgaaacagtgataatgtgaactcaaatgaggtttcctgggtaatgtgacacctgcagaaactatagagcgtcatttatacgtagtttggcagaaaccacttacggctgatgatgcgcaaccctgctgactgtttcagttaatatgctgcacaccacacacttgtttagtgaaccaaatctagaaagtaccaaggcagaggtatgctcctgctgtaatcaggcaaatgagttcaactggatttcttttgacaatactgttggtacctattacttgggggaggacatgttgcagaagaccagatcatttttatacagaatgtgaaatactgatacagttattcttttttttaaagaacattgttttataaagaacgtgatttccagtgatctctggaagcgctaaagctaaaatttctgttcttgaaacacttcagctttgcaactaaaatattacagattaataataaattaaaccaaccaatgataaacactactcagtccaccaacaacaaacgtgtttgaattcaccttaccaatattaatcccagcgtgtgtaaaacagaacagtaactctatgtgaccccagataacattttgtaacattgtgcttccttgtagtttgtaatgtgagttcaatcagtatttatgttgaaatttctaacattaaatctagtctctatcctgttaatttaatttttaaatgctttatccatttgtgcaaaggtaaacgcagattgtatcttttttaatggtacggcataaaaagtaaccctcaagtgaagtgtctctatactgttttatagagtactttaacatgaatagataccttgtaaacttgtattgtggatgtgtaaataatatgtactttgggtttttaacaccgcatgtaaagtcaaaataaaatatacaaatcattataaaaaaaaaaa

SEQ ID NO: 3080 - DNA, 5943 bp, Homo sapiens
gcggccgcttcccaccgtccctctccccttactggcagagcgcgctgcgggcggactcccgggcccggagcagcccaccggccaccccaccgcccacccggctcccggtgtctcctcccggccgctctacccagcaactttccgtgctttgttccccgactggaaatgctttacggaagcgtcttggacagggtctccgccaggcgacaagagctcggtgctgagatgtgttacgttctcatctccccatcaattatggatggaaacaaataaggaagagtcaattttgctgagccccttctccggcaacgagaggcgttctgcagccgggagggagccgccgctcgcgccggcagccgctggcaggggcatggtgaggaggaaggtagctcagtggcatttctgagcaggggccaccctgacttcaccttggcccaccatgagggtcttcctgctttgtgcctacatactgctgctgatggtttcccagttgagggcagtcagctttcctgaagatgatgaaccccttaatactgtcgactatcactattcaaggcaatatccggtttttagaggacgcccttcaggcaatgaatcgcagcacaggctggactttcagctgatgttgaaaattcgagacacactttatattgctggcagggatcaagtttatacagtaaacttaaatgaaatgcccaaaacagaagtaatacccaacaagaaactgacatggcgatcaagacaacaggatcgagaaaactgtgctatgaaaggcaagcataaagatgaatgccacaactttatcaaagtatttgttccaagaaacgatgagatggtttttgtttgtggtaccaatgcattcaatcccatgtgtagatactacaggttgagtaccttagaatatgatggggaagaaattagtggcctggcaagatgcccatttgatgccagacaaaccaatgttgccctctttgctgatgggaagctgtattctgccacagtggctgacttcttggccagcgatgccgttatttatcgaagcatgggtgatggatctgcccttcgcacaataaaatatgattccaaatggataaaagagccacactttcttcatgccatagaatatggaaactatgtctatttcttctttcgagaaatcgctgtcgaacataataatttaggcaaggctgtgtattcccgcgtggcccgcatatgtaaaaacgacatgggtggttcccagcgggtcctggagaaacactggacttcatttctaaaggctcggctgaactgttctgtccctggagattcgtttttctactttgatgttctgcagtctattacagacataatacaaatcaatggcatccccactgtggtcggggtgtttaccacgcagctcaatagcatccctggttctgctgtctgtgcatttagcatggatgacattgaaaaagtattcaaaggacggtttaaggaacagaaaactccagattctgtttggacagcagttcccgaagacaaagtgccaaagccaaggcctggctgttgtgcaaaacacggccttgccgaagcttataaaacctccatcgatttcccggatgaaactctgtcattcatcaaatctcatcccctgatggactctgccgttccacccattgccgatgagccctggttcacaaagactcgggtcaggtacagactgacggccatctcagtggaccattcagccggaccctaccagaactacacagtcatctttgttggctctgaagctggcatggtacttaaagttctggcaaagaccagtcctttctctttgaacgacagcgtattactggaagagattgaagcctacaaccatgcaaagtgcagtgctgagaatgaggaagacaaaaaggtcatctcattacagttggataaagatcaccacgctttatatgtggcgttctctagctgcattatccgcatccccctcagtcgctgtgagcgttatggatcatgtaaaaagtcttgtattgcatctcgtgacccgtattgtggctggttaagccagggatcctgtggtagagtgaccccagggatgcttgctgaaggatatgaacaagacacagaattcggcaacacagctcatctaggggactgccatgaaattttgcctacttcaactacaccagattacaaaatatttggcggtccaacatctggtgtacgatgggaagtccagtctggagagtccaaccagatggtccacatgaatgtcctcatcacctgtgtctttgctgcttttgttttgggggcattcattgcaggtgtggcagtatactgctatcgagacatgtttgttcggaaaaacagaaagatccataaagatgcagagtccgcccagtcatgcacagactccagtggaagttttgccaaactgaatggtctctttgacagccctgtcaaggaataccaacagaatattgattctcctaaactgtatagtaacctgctaaccagtcggaaagagctaccacccaatggagatactaaatccatggtaatggaccatcgagggcaacctccagagttggctgctcttcctactcctgagtctacacccgtgcttcaccagaagaccctgcaggccatgaagagccactcagaaaaggcccatggccatggagcttcaaggaaagaaacccctcagttttttccgtctagtccgccacctcattccccattaagtcatgggcatatccccagtgccattgttcttccaaatgctacccatgactacaacacgtctttctcaaactccaatgctcacaaagctgaaaagaagcttcaaaacattgatcaccctctcacaaagtcatccagtaagagagatcaccggcgttctgttgattccagaaataccctcaatgatctcctgaagcatctgaatgacccaaatagtaaccccaaagccatcatgggagacatccagatggcacaccagaacttaatgctggatcccatgggatcgatgtctgaggtcccacctaaagtccctaaccgggaggcatcgctatactcccctccttcaactctccccagaaatagcccaaccaagcgagtggatgtccccaccactcctggagtcccaatgacttctctggaaagacaaagaggttatcacaaaaattcctcccagaggcactctatatctgctatgcctaaaaacttaaactcaccaaatggtgttttgttatccagacagcctagtatgaaccgtggaggatatatgcccacccccactggggcgaaggtggactatattcagggaacaccagtgagtgttcatctgcagccttccctctccagacagagcagctacaccagtaatggcactcttcctaggacgggactaaagaggacgccgtccttaaaacctgacgtgccaccaaagccttcctttgttcctcaaaccccatctgtcagaccactgaacaaatacacatactaggcctcaagtgtgctattcccatgtggctttatcctgtccgtgttgttgagaggatgatgttgtaagggtaccttaaaacaagagactcgcttgtattttaagagaaccaagtggccaaagaaactctttctaactttggcaacatcagaacttgccacatgtagctactgcagcaaggcttctgtgtacttgcctgaaaacaaaggaaggtgctggtcattccatttcttttgtttgaagctaaagagatgtgtagctcacaggggctaccttaccagtataaagagctgataacagtactcagaagaatctgtgaacaaatacttgaaaatgggttcaatgtagactgccattatgtgtggtcttcccattaaatgtgaacattttaatatgtatgcattcaccttgcctcttgcacaaatgtcaaaaaaaagatggtaatatctcaaagaaatgaacttgtagattaccaagcagtttgctaaaaattcaatctttgacccaagctgtagcatttttttttcatgtgtggcatctttttcatgccaccaacaaacttgttgtgtgtgtgcgtgtgtgtgtgtgtgtgtgtgtgtgtgtgtgtgtgttctgtacccactaggatttgtttaggtgcccattgcatctttttgtgctatggagttgtttacattaagcatgaccgaacgagagacaatactatttcccacaggagtccattgggttcagctttgaaagaggaatagaatcgaggctcctttgaccatcaaaatgatgaactttacttatgtggtacccaatgccagaatgtaagagttgcaagtgattttgtgctgctattcattaaaacttgtattccagtcttgccagcttaaggagatcaagatattaagaggtatccttgatttattttccagtattcagtagtaaaattttcctgtccactgtgaatcaaagcctgagtcactctatttaaccttggacacactaataaggttttattttgattgtgttcgtttccccccccccaatagtaaaatttctcctcctttaactcctcctaccccccaaggtaagaaacaaaaaacaaacaaacaaacaaaaatagaagacaaaagaaagacatatgaaaggaattgtaattggcttaacagaaacagtctgtaaaaacctaacagtggtgcaatcatgttgtctgtgttgtgttatgtgagaattttctcctaagtcatgcaggtaatgacaatatactgtaaataccacatgtgagtttacctgaatctgtgcattttgtgccttattcatgagaatgatagaagtactaaaatctgtcaagtgttttcagtatagcacattatttactgagtgccagttgtaaatgtttttcaaccagcacctaaaaagactcttttcaaaaaatcacagaaacaacctaggacaattatttgttacataatccgacctcatagcagcattacattctttgccgtgataaacattccactcctgctttcctaaggatgaaacagtgataatgtgaactcaaatgaggtttcctgggtaatgtgacacctgcagaaactatagagcgtcatttatacgtagtttggcagaaaccacttacggctgatgatgcgcaaccctgctgactgtttcagttaatatgctgcacaccacacacttgtttagtgaaccaaatctagaaagtaccaaggcagaggtatgctcctgctgtaatcaggcaaatgagttcaactggatttcttttgacaatactgttggtacctattacttgggggaggacatgttgcagaagaccagatcatttttatacagaatgtgaaatactgatacagttattcttttttttaaagaacattgttttataaagaacgtgatttccagtgatctctggaagcgctaaagctaaaatttctgttcttgaaacacttcagctttgcaactaaaatattacagattaataataaattaaaccaaccaatgataaacactactcagtccaccaacaacaaacgtgtttgaattcaccttaccaatattaatcccagcgtgtgtaaaacagaacagtaactctatgtgaccccagataacattttgtaacattgtgcttccttgtagtttgtaatgtgagttcaatcagtatttatgttgaaatttctaacattaaatctagtctctatcctgttaatttaatttttaaatgctttatccatttgtgcaaaggtaaacgcagattgtatcttttttaatggtacggcataaaaagtaaccctcaagtgaagtgtctctatactgttttatagagtactttaacatgaatagataccttgtaaacttgtattgtggatgtgtaaataatatgtactttgggtttttaacaccgcatgtaaagtcaaaataaaatatacaaatcattataaaaaaaaaaa

SEQ ID NO: 3081 - DNA, 6111 bp, Homo sapiens
gcggccgcttcccaccgtccctctccccttactggcagagcgcgctgcgggcggactcccgggcccggagcagcccaccggccaccccaccgcccacccggctcccggtgtctcctcccggccgctctacccagcaactttccgtgctttgttccccgactggaaatgctttacggaagcgtcttggacagggtctccgccaggcgacaagagctcggtgctgagatgtgttacgttctcatctccccatcaattatggatggaaacaaataaggaagagtcaattttgctgagccccttctccggcaacgagaggcgttctgcagccgggagggagccgccgctcgcgccggcagccgctggcaggggcatggtgaggaggaaggtagctcagtggcatttctgagcaggggccaccctgacttcaccttggcccaccatgagggtcttcctgctttgtgcctacatactgctgctgatggtttcccagttgagggcagtcagctttcctgaagatgatgaaccccttaatactgtcgactatcactattcaaggcaatatccggtttttagaggacgcccttcaggcaatgaatcgcagcacaggctggactttcagctgatgttgaaaattcgagacacactttatattgctggcagggatcaagtttatacagtaaacttaaatgaaatgcccaaaacagaagtaatacccaacaagaaactgacatggcgatcaagacaacaggatcgagaaaactgtgctatgaaaggcaagcataaagatgaatgccacaactttatcaaagtatttgttccaagaaacgatgagatggtttttgtttgtggtaccaatgcattcaatcccatgtgtagatactacaggttgagtaccttagaatatgatggggaagaaattagtggcctggcaagatgcccatttgatgccagacaaaccaatgttgccctctttgctgatgggaagctgtattctgccacagtggctgacttcttggccagcgatgccgttatttatcgaagcatgggtgatggatctgcccttcgcacaataaaatatgattccaaatggataaaagagccacactttcttcatgccatagaatatggaaactatgtctatttcttctttcgagaaatcgctgtcgaacataataatttaggcaaggctgtgtattcccgcgtggcccgcatatgtaaaaacgacatgggtggttcccagcgggtcctggagaaacactggacttcatttctaaaggctcggctgaactgttctgtccctggagattcgtttttctactttgatgttctgcagtctattacagacataatacaaatcaatggcatccccactgtggtcggggtgtttaccacgcagctcaatagcatccctggttctgctgtctgtgcatttagcatggatgacattgaaaaagtattcaaaggacggtttaaggaacagaaaactccagattctgtttggacagcagttcccgaagacaaagtgccaaagccaaggcctggctgttgtgcaaaacacggccttgccgaagcttataaaacctccatcgatttcccggatgaaactctgtcattcatcaaatctcatcccctgatggactctgccgttccacccattgccgatgagccctggttcacaaagactcgggtcaggtacagactgacggccatctcagtggaccattcagccggaccctaccagaactacacagtcatctttgttggctctgaagctggcatggtacttaaagttctggcaaagaccagtcctttctctttgaacgacagcgtattactggaagagattgaagcctacaaccatgcaaagtgcagtgctgagaatgaggaagacaaaaaggtcatctcattacagttggataaagatcaccacgctttatatgtggcgttctctagctgcattatccgcatccccctcagtcgctgtgagcgttatggatcatgtaaaaagtcttgtattgcatctcgtgacccgtattgtggctggttaagccagggatcctgtggtagagtgaccccagggatgcttgctgaaggatatgaacaagacacagaattcggcaacacagctcatctaggggactgccatgaaattttgcctacttcaactacaccagattacaaaatatttggcggtccaacatctgacatggaggtatcttcatcttctgttaccacaatggcaagtatcccagaaatcacacctaaagtgattgatacctggagacctaaactgacaagctctcggaaatttgtagttcaagatgatccaaacacttctgattttactgatcctttatcgggtatcccaaagggtgtacgatgggaagtccagtctggagagtccaaccagatggtccacatgaatgtcctcatcacctgtgtctttgctgcttttgttttgggggcattcattgcaggtgtggcagtatactgctatcgagacatgtttgttcggaaaaacagaaagatccataaagatgcagagtccgcccagtcatgcacagactccagtggaagttttgccaaactgaatggtctctttgacagccctgtcaaggaataccaacagaatattgattctcctaaactgtatagtaacctgctaaccagtcggaaagagctaccacccaatggagatactaaatccatggtaatggaccatcgagggcaacctccagagttggctgctcttcctactcctgagtctacacccgtgcttcaccagaagaccctgcaggccatgaagagccactcagaaaaggcccatggccatggagcttcaaggaaagaaacccctcagttttttccgtctagtccgccacctcattccccattaagtcatgggcatatccccagtgccattgttcttccaaatgctacccatgactacaacacgtctttctcaaactccaatgctcacaaagctgaaaagaagcttcaaaacattgatcaccctctcacaaagtcatccagtaagagagatcaccggcgttctgttgattccagaaataccctcaatgatctcctgaagcatctgaatgacccaaatagtaaccccaaagccatcatgggagacatccagatggcacaccagaacttaatgctggatcccatgggatcgatgtctgaggtcccacctaaagtccctaaccgggaggcatcgctatactcccctccttcaactctccccagaaatagcccaaccaagcgagtggatgtccccaccactcctggagtcccaatgacttctctggaaagacaaagaggttatcacaaaaattcctcccagaggcactctatatctgctatgcctaaaaacttaaactcaccaaatggtgttttgttatccagacagcctagtatgaaccgtggaggatatatgcccacccccactggggcgaaggtggactatattcagggaacaccagtgagtgttcatctgcagccttccctctccagacagagcagctacaccagtaatggcactcttcctaggacgggactaaagaggacgccgtccttaaaacctgacgtgccaccaaagccttcctttgttcctcaaaccccatctgtcagaccactgaacaaatacacatactaggcctcaagtgtgctattcccatgtggctttatcctgtccgtgttgttgagaggatgatgttgtaagggtaccttaaaacaagagactcgcttgtattttaagagaaccaagtggccaaagaaactctttctaactttggcaacatcagaacttgccacatgtagctactgcagcaaggcttctgtgtacttgcctgaaaacaaaggaaggtgctggtcattccatttcttttgtttgaagctaaagagatgtgtagctcacaggggctaccttaccagtataaagagctgataacagtactcagaagaatctgtgaacaaatacttgaaaatgggttcaatgtagactgccattatgtgtggtcttcccattaaatgtgaacattttaatatgtatgcattcaccttgcctcttgcacaaatgtcaaaaaaaagatggtaatatctcaaagaaatgaacttgtagattaccaagcagtttgctaaaaattcaatctttgacccaagctgtagcatttttttttcatgtgtggcatctttttcatgccaccaacaaacttgttgtgtgtgtgcgtgtgtgtgtgtgtgtgtgtgtgtgtgtgtgtgtgttctgtacccactaggatttgtttaggtgcccattgcatctttttgtgctatggagttgtttacattaagcatgaccgaacgagagacaatactatttcccacaggagtccattgggttcagctttgaaagaggaatagaatcgaggctcctttgaccatcaaaatgatgaactttacttatgtggtacccaatgccagaatgtaagagttgcaagtgattttgtgctgctattcattaaaacttgtattccagtcttgccagcttaaggagatcaagatattaagaggtatccttgatttattttccagtattcagtagtaaaattttcctgtccactgtgaatcaaagcctgagtcactctatttaaccttggacacactaataaggttttattttgattgtgttcgtttccccccccccaatagtaaaatttctcctcctttaactcctcctaccccccaaggtaagaaacaaaaaacaaacaaacaaacaaaaatagaagacaaaagaaagacatatgaaaggaattgtaattggcttaacagaaacagtctgtaaaaacctaacagtggtgcaatcatgttgtctgtgttgtgttatgtgagaattttctcctaagtcatgcaggtaatgacaatatactgtaaataccacatgtgagtttacctgaatctgtgcattttgtgccttattcatgagaatgatagaagtactaaaatctgtcaagtgttttcagtatagcacattatttactgagtgccagttgtaaatgtttttcaaccagcacctaaaaagactcttttcaaaaaatcacagaaacaacctaggacaattatttgttacataatccgacctcatagcagcattacattctttgccgtgataaacattccactcctgctttcctaaggatgaaacagtgataatgtgaactcaaatgaggtttcctgggtaatgtgacacctgcagaaactatagagcgtcatttatacgtagtttggcagaaaccacttacggctgatgatgcgcaaccctgctgactgtttcagttaatatgctgcacaccacacacttgtttagtgaaccaaatctagaaagtaccaaggcagaggtatgctcctgctgtaatcaggcaaatgagttcaactggatttcttttgacaatactgttggtacctattacttgggggaggacatgttgcagaagaccagatcatttttatacagaatgtgaaatactgatacagttattcttttttttaaagaacattgttttataaagaacgtgatttccagtgatctctggaagcgctaaagctaaaatttctgttcttgaaacacttcagctttgcaactaaaatattacagattaataataaattaaaccaaccaatgataaacactactcagtccaccaacaacaaacgtgtttgaattcaccttaccaatattaatcccagcgtgtgtaaaacagaacagtaactctatgtgaccccagataacattttgtaacattgtgcttccttgtagtttgtaatgtgagttcaatcagtatttatgttgaaatttctaacattaaatctagtctctatcctgttaatttaatttttaaatgctttatccatttgtgcaaaggtaaacgcagattgtatcttttttaatggtacggcataaaaagtaaccctcaagtgaagtgtctctatactgttttatagagtactttaacatgaatagataccttgtaaacttgtattgtggatgtgtaaataatatgtactttgggtttttaacaccgcatgtaaagtcaaaataaaatatacaaatcattataaaaaaaaaaa

SEQ ID NO: 3082 - DNA, 5925 bp, Homo sapiens
gcggccgcttcccaccgtccctctccccttactggcagagcgcgctgcgggcggactcccgggcccggagcagcccaccggccaccccaccgcccacccggctcccggtgtctcctcccggccgctctacccagcaactttccgtgctttgttccccgactggaaatgctttacggaagcgtcttggacagggtctccgccaggcgacaagagctcggtgctgagatgtgttacgttctcatctccccatcaattatggatggaaacaaataaggaagagtcaattttgctgagccccttctccggcaacgagaggcgttctgcagccgggagggagccgccgctcgcgccggcagccgctggcaggggcatggtgaggaggaaggtagctcagtggcatttctgagcaggggccaccctgacttcaccttggcccaccatgagggtcttcctgctttgtgcctacatactgctgctgatggtttcccagttgagggcagtcagctttcctgaagatgatgaaccccttaatactgtcgactatcactattcaaggcaatatccggtttttagaggacgcccttcaggcaatgaatcgcagcacaggctggactttcagctgatgttgaaaattcgagacacactttatattgctggcagggatcaagtttatacagtaaacttaaatgaaatgcccaaaacagaagtaatacccaacaagaaactgacatggcgatcaagacaacaggatcgagaaaactgtgctatgaaaggcaagcataaagatgaatgccacaactttatcaaagtatttgttccaagaaacgatgagatggtttttgtttgtggtaccaatgcattcaatcccatgtgtagatactacaggttgagtaccttagaatatgatggggaagaaattagtggcctggcaagatgcccatttgatgccagacaaaccaatgttgccctctttgctgatgggaagctgtattctgccacagtggctgacttcttggccagcgatgccgttatttatcgaagcatgggtgatggatctgcccttcgcacaataaaatatgattccaaatggataaaagagccacactttcttcatgccatagaatatggaaactatgtctatttcttctttcgagaaatcgctgtcgaacataataatttaggcaaggctgtgtattcccgcgtggcccgcatatgtaaaaacgacatgggtggttcccagcgggtcctggagaaacactggacttcatttctaaaggctcggctgaactgttctgtccctggagattcgtttttctactttgatgttctgcagtctattacagacataatacaaatcaatggcatccccactgtggtcggggtgtttaccacgcagctcaatagcatccctggttctgctgtctgtgcatttagcatggatgacattgaaaaagtattcaaaggacggtttaaggaacagaaaactccagattctgtttggacagcagttcccgaagacaaagtgccaaagccaaggcctggctgttgtgcaaaacacggccttgccgaagcttataaaacctccatcgatttcccggatgaaactctgtcattcatcaaatctcatcccctgatggactctgccgttccacccattgccgatgagccctggttcacaaagactcgggtcaggtacagactgacggccatctcagtggaccattcagccggaccctaccagaactacacagtcatctttgttggctctgaagctggcatggtacttaaagttctggcaaagaccagtcctttctctttgaacgacagcgtattactggaagagattgaagcctacaaccatgcaaagtgcagtgctgagaatgaggaagacaaaaaggtcatctcattacagttggataaagatcaccacgctttatatgtggcgttctctagctgcattatccgcatccccctcagtcgctgtgagcgttatggatcatgtaaaaagtcttgtattgcatctcgtgacccgtattgtggctggttaagccagggatcctgtggtagagtgaccccagggatgctgctgttaaccgaagacttctttgctttccataaccacagtgctgaaggatatgaacaagacacagaattcggcaacacagctcatctaggggactgccatggtgtacgatgggaagtccagtctggagagtccaaccagatggtccacatgaatgtcctcatcacctgtgtctttgctgcttttgttttgggggcattcattgcaggtgtggcagtatactgctatcgagacatgtttgttcggaaaaacagaaagatccataaagatgcagagtccgcccagtcatgcacagactccagtggaagttttgccaaactgaatggtctctttgacagccctgtcaaggaataccaacagaatattgattctcctaaactgtatagtaacctgctaaccagtcggaaagagctaccacccaatggagatactaaatccatggtaatggaccatcgagggcaacctccagagttggctgctcttcctactcctgagtctacacccgtgcttcaccagaagaccctgcaggccatgaagagccactcagaaaaggcccatggccatggagcttcaaggaaagaaacccctcagttttttccgtctagtccgccacctcattccccattaagtcatgggcatatccccagtgccattgttcttccaaatgctacccatgactacaacacgtctttctcaaactccaatgctcacaaagctgaaaagaagcttcaaaacattgatcaccctctcacaaagtcatccagtaagagagatcaccggcgttctgttgattccagaaataccctcaatgatctcctgaagcatctgaatgacccaaatagtaaccccaaagccatcatgggagacatccagatggcacaccagaacttaatgctggatcccatgggatcgatgtctgaggtcccacctaaagtccctaaccgggaggcatcgctatactcccctccttcaactctccccagaaatagcccaaccaagcgagtggatgtccccaccactcctggagtcccaatgacttctctggaaagacaaagaggttatcacaaaaattcctcccagaggcactctatatctgctatgcctaaaaacttaaactcaccaaatggtgttttgttatccagacagcctagtatgaaccgtggaggatatatgcccacccccactggggcgaaggtggactatattcagggaacaccagtgagtgttcatctgcagccttccctctccagacagagcagctacaccagtaatggcactcttcctaggacgggactaaagaggacgccgtccttaaaacctgacgtgccaccaaagccttcctttgttcctcaaaccccatctgtcagaccactgaacaaatacacatactaggcctcaagtgtgctattcccatgtggctttatcctgtccgtgttgttgagaggatgatgttgtaagggtaccttaaaacaagagactcgcttgtattttaagagaaccaagtggccaaagaaactctttctaactttggcaacatcagaacttgccacatgtagctactgcagcaaggcttctgtgtacttgcctgaaaacaaaggaaggtgctggtcattccatttcttttgtttgaagctaaagagatgtgtagctcacaggggctaccttaccagtataaagagctgataacagtactcagaagaatctgtgaacaaatacttgaaaatgggttcaatgtagactgccattatgtgtggtcttcccattaaatgtgaacattttaatatgtatgcattcaccttgcctcttgcacaaatgtcaaaaaaaagatggtaatatctcaaagaaatgaacttgtagattaccaagcagtttgctaaaaattcaatctttgacccaagctgtagcatttttttttcatgtgtggcatctttttcatgccaccaacaaacttgttgtgtgtgtgcgtgtgtgtgtgtgtgtgtgtgtgtgtgtgtgtgtgttctgtacccactaggatttgtttaggtgcccattgcatctttttgtgctatggagttgtttacattaagcatgaccgaacgagagacaatactatttcccacaggagtccattgggttcagctttgaaagaggaatagaatcgaggctcctttgaccatcaaaatgatgaactttacttatgtggtacccaatgccagaatgtaagagttgcaagtgattttgtgctgctattcattaaaacttgtattccagtcttgccagcttaaggagatcaagatattaagaggtatccttgatttattttccagtattcagtagtaaaattttcctgtccactgtgaatcaaagcctgagtcactctatttaaccttggacacactaataaggttttattttgattgtgttcgtttccccccccccaatagtaaaatttctcctcctttaactcctcctaccccccaaggtaagaaacaaaaaacaaacaaacaaacaaaaatagaagacaaaagaaagacatatgaaaggaattgtaattggcttaacagaaacagtctgtaaaaacctaacagtggtgcaatcatgttgtctgtgttgtgttatgtgagaattttctcctaagtcatgcaggtaatgacaatatactgtaaataccacatgtgagtttacctgaatctgtgcattttgtgccttattcatgagaatgatagaagtactaaaatctgtcaagtgttttcagtatagcacattatttactgagtgccagttgtaaatgtttttcaaccagcacctaaaaagactcttttcaaaaaatcacagaaacaacctaggacaattatttgttacataatccgacctcatagcagcattacattctttgccgtgataaacattccactcctgctttcctaaggatgaaacagtgataatgtgaactcaaatgaggtttcctgggtaatgtgacacctgcagaaactatagagcgtcatttatacgtagtttggcagaaaccacttacggctgatgatgcgcaaccctgctgactgtttcagttaatatgctgcacaccacacacttgtttagtgaaccaaatctagaaagtaccaaggcagaggtatgctcctgctgtaatcaggcaaatgagttcaactggatttcttttgacaatactgttggtacctattacttgggggaggacatgttgcagaagaccagatcatttttatacagaatgtgaaatactgatacagttattcttttttttaaagaacattgttttataaagaacgtgatttccagtgatctctggaagcgctaaagctaaaatttctgttcttgaaacacttcagctttgcaactaaaatattacagattaataataaattaaaccaaccaatgataaacactactcagtccaccaacaacaaacgtgtttgaattcaccttaccaatattaatcccagcgtgtgtaaaacagaacagtaactctatgtgaccccagataacattttgtaacattgtgcttccttgtagtttgtaatgtgagttcaatcagtatttatgttgaaatttctaacattaaatctagtctctatcctgttaatttaatttttaaatgctttatccatttgtgcaaaggtaaacgcagattgtatcttttttaatggtacggcataaaaagtaaccctcaagtgaagtgtctctatactgttttatagagtactttaacatgaatagataccttgtaaacttgtattgtggatgtgtaaataatatgtactttgggtttttaacaccgcatgtaaagtcaaaataaaatatacaaatcattataaaaaaaaaaa

SEQ ID NO: 3083 - DNA, 1900 bp, Homo sapiens; identical to SEQ ID NO: 1899

SEQ ID NO: 3084 - DNA, 1013 bp, Homo sapiens
cggctgcctagggtctgggaagctcgggcaccctccctctccggggctcctgctcccacccctccggcccctccaccgtcgcgctcctccaggctgggcctgtggccgcggtgctttttaattttcccccagctcagaatcttgctgctcggcccccaggagagcaacaactcaacgggaacgatgtggaaggtgtcagctctgctcttcgttttgggaagcgcgtcgctctgggtcctggcagaaggagccagcacaggccagccagaagatgacactgagactacaggtttggaaggcggcgttgccatgccaggtgccgaagatgatgtggtgactccaggaaccagcgaagaccgctataagtctggcttgacaactctggtggcaacaagtgtcaacagtgtaacaggcattcgcatcgaggatctgccaacttcagaaagcacagtccacgcgcaagaacaaagtccaagcgccacagcctcaaacgtggccaccagtcactccacggagaaagtggatggagacacacagacaacagttgagaaagatggtttgtcaacagtgaccctggttggaatcatagttggggtcttactagccatcggcttcattggtggaatcatcgttgtggttatgcgaaaaatgtcgggaaggtactcgccctaaagagctgaagggttacgccctgctgccaacgtgcttaaaaaaagaccgtttctgactctgtgccctgtccctgagctcgtgggagaagatgacccgtggaacacttgcctggcccactcagaatccacggtgacctctccgcttgccaaaataaccgaaggaaagaccgttcaccagacttggctcctctaaacatttgctgttcaaacatgtttttgaatatacattctataaaagattatttgaaagacaaaattcatagaaaatggagcaaaactgtataaactgatttgtaactaacactggaccattggatcgatattatatgctgtaaccatgtg

SEQ ID NO: 3085 - DNA, 1721 bp, Homo sapiens; identical to SEQ ID NO: 2540

SEQ ID NO: 3086 - DNA, 1100 bp, Homo sapiens
ggagttcagagggcccggaggtgggagacttcccacacggtgactgagatgtcgtccactgcggctttttaccttctctctacgctaggaggatacttggtgacctcattcttgttgcttaaatacccgaccttgctgcaccagagaaagaagcagcgattcctcagtaaacacatctctcaccgcggaggtgctggagaaaatttggagaatacaatggcagcctttcagcatgcggttaaaatcggaactgatatgctagaattggactgccatatcacaaaagatgaacaagttgtagtgtcacatgatgagaatctaaagagagcaactggggtcaatgtaaacatctctgatctcaaatactgtgagctcccaccttaccttggcaaactggatgtctcatttcaaagagcatgccagtgtgaaggaaaagataaccgaattccattactgaaggaagtttttgaggcctttcctaacactcccattaacatcgatatcaaagtcaacaacaatgtgctgattaagaaggtttcagagttggtgaagcggtataatcgagaacacttaacagtgtggggtaatgccaattatgaaattgtagaaaagtgctacaaagagaattcagatattcctatactcttcagtctacaacgtgtcctgctcattcttggccttttcttcactggcctcttgccctttgtgcccattcgagaacagttttttgaaatcccaatgccttctattatactgaagctaaaagaaccacacaccatgtccagaagtcaaaagtttctcatctggctttctgatctcttactaatgaggaaagctttgtttgaccacctaactgctcgaggcattcaagtaagtttctggaatgatgcattttggaagcagcatagctcaccagtttaacacaaatataaagggcaagaacttttaactgacttagtttggcccttgactctgatgctgctgctttactgatccacaaatgaggaccttaagctcttccttacacttagcaataaagcattggcatttctggaaaaaaaaaaaaaaaaaaaaaaaaaaaaaaaaaaaaaaaaaaaaaa

SEQ ID NO: 3087 - DNA, 2280 bp, Homo sapiens
gcctgagcggccgaactcggcagctccaacccaactcggcttaactccgcctcaccgagcccagtccaagactctgtgctccctaggtttgcaacagctctctgatcatcttcttcaattcctgctaggatgccgtggcaagcatttcgcagatttggtcaaaagctggtacgcagacgtacactggagtcaggcatggctgagactcgccttgccagatgcctaagcaccctggatttagtggccctgggtgtgggcagcacattgggtgcaggcgtgtatgtcctagctggcgaggtggccaaagataaagcagggccatccattgtgatctgctttttggtggctgccctgtcttctgtgttggctgggctgtgctatgcggagtttggtgcccgggttccccgttctggttcggcatatctctacagctatgtcactgtgggtgaactctgggccttcaccactggctggaacctcatcctctcctatgtcattggtacagccagtgtggcccgggcctggagctctgcttttgacaacctgattgggaaccacatctctaagactctgcaggggtccattgcactgcacgtgccccatgtccttgcagaatatccagatttctttgctttgggcctcgtgttgctgctcactggattgttggctctcggggctagtgagtcggccctggttaccagagtgttcacaggcgtgaaccttttggttcttgggttcgtcatgatctctggcttcgttaagggggacgtgcacaactggaagctcacagaagaggactacgaattggccatggctgaactcaatgacacctatagcttgggtcctctgggctctggaggatttgtgcctttcggcttcgagggaattctccgtggagcagcgacctgtttctatgcatttgttggtttcgactgtattgctaccactggagaagaagcccagaatccccagcgttccatcccgatgggcattgtgatctcactgtctgtctgctttttggcgtattttgctgtctcttctgcactcaccctgatgatgccttactaccagcttcagcctgagagccctttgcctgaggcatttctctacattggatgggctcctgcccgctatgttgtggctgttggctccctctgtgctctttctaccagcctcctgggctccatgttccccatgcctcgggtgatctacgcgatggcagaggatggcctcctgttccgtgtacttgctcggatccacaccggcacacgcaccccaatcatagccaccgtggtctctggcattattgcagcattcatggcattcctcttcaaactcactgatcttgtggacctcatgtcaattgggaccctgcttgcttactccctggtgtcgatttgtgttctcatcctcaggtatcaacctgatcaggagacaaagactggggaagaagtggagttgcaggaggaggcaataactactgaatcagagaagttgaccctatggggactatttttcccactcaactccatccccactccactctctggccaaattgtctatgtttgttcctcattgcttgctgtcctgctgactgctctttgcctggtgctggcccagtggtcagttccattgctttctggagacctggtgtggactgcagtggttgtgctgctcctgctgctcattattgggatcattgtggtcatctggagacagccacagagctccactccccttcactttaaggtgcctgctttgcctctcctcccactaatgagcatctttgtgaatatttaccttatgatgcagatgacagctggtacctgggcccgatttggggtctggatgctgattggctttgctatctacttcggctatgggatccagcacagcctggaagagattaagagtaaccaaccctcacgcaagtctagagccaaaactgtagaccttgatcccggcactctctatgtccactcagtttgacatcgtcacacctaaatgctgtctggtcccctgcacaataatggagagtactcctgaccccagtgacagctagccctcccctgtgatggtggtggtggatactaatacagttctgtacgatgtgaaggatgtgtctttgctatttcttgtctattttaacccgtctgcttctaaatgatgtctagctgcttaccaactttaaaaaatgatattaaaagaaagtagaaaaataaaaaaaaaaaaaaaaaaaaaaaaaaaaaaaaaaaaaaaaaaaaaaaaaaaaaaaaaaaa

SEQ ID NO: 3088 - DNA, 1680 bp, Homo sapiens
cgacggtggccactgcgctcctgcgtacgcgggggcagccctcgtcgccatcccctctggcgtacatgctgagcctctaccgcgacccgctgccgagggcagacatcatccgcagcctacaggcagaagatgtggcagtggatgggcagaactggacgtttgcttttgacttctccttcctgagccaacaagaggatctggcatgggctgagctccggctgcagctgtccagccctgtggacctccccactgagggctcacttgccattgagattttccaccagccaaagcccgacacagagcaggcttcagacagctgcttagagcggtttcagatggacctattcactgtcactttgtcccaggtcaccttttccttgggcagcatggttttggaggtgaccaggcctctctccaagtggctgaagcgccctggggccctggagaagcagatgtccagggtagctggagagtgctggccgcggccccccacaccgcctgccaccaatgtgctccttatgctctactccaacctctcgcaggagcagaggcagctgggtgggtccaccttgctgtgggaagccgagagctcctggcgggcccaggagggacagctgtcctgggagtggggcaagaggcaccgtcgacatcacttgccagacagaagtcaactgtgtcggaaggtcaagttccaggtggacttcaacctgatcggatggggctcctggatcatctaccccaagcagtacaacgcctatcgctgtgagggcgagtgtcctaatcctgttggggaggagtttcatccgaccaaccatgcatacatccagagtctgctgaaacgttaccagccccaccgagtcccttccacttgttgtgccccagtgaagaccaagccgctgagcatgctgtatgtggataatggcagagtgctcctagatcaccataaagacatgatcgtggaagaatgtgggtgcctctgatgacatcctggagggagactggatttgcctgcactctggaaggctgggaaactcctggaagacatgataaccatctaatccagtaaggagaaacagagaggggcaaagttgctctgcccaccagaactgaagaggaggggctgcccactctgtaaatgaagggctcagtggagtctggccaagcacagaggctgctgtcaggaagagggaggaagaagcctgtgcagggggctggctggatgttctctttactgaaaagacagtggcaaggaaaagcacaagtgcatgagttctttactggattttttaaaaacctgtgaaccccccgaaactgtatgtgaaagttgagacatatgtgcatgtattttggaggtgggatgaagtcacctatagctttcatgtattctccaaagtagtctgtgtgtgacctgtccccctccccaaagattaaggatcactgtatagattaaaaagagtccgtcaatctcattgcctcaggctgggttgggggagccccacagctttctggctggccagtggcaatctactggccttgtccagaggctcactggagtggttctctgctaatgagctgtacaacaataaagccattgtctagttaaaaaaaaaaaaaaaaaaaaaaaaaaaaaaaaaaaaaaaaaaaaaaaaaaaaaaaaaaaaaaaaaaaaaaaaaaaaaaa

SEQ ID NO: 3089 - DNA, 2693 bp, Homo sapiens
ccacgcgtccgattctcgtctgtcacttcagacccccactagttgacagagcagcagaatttcaactccagtagacttgaatgtgcctctgggcaaagaagcagagctaacgaggaaagggatttaaagagtttttcttgggtgtttgtcaaacttttattccctgtctgtgtgcagaggggattcaacttcaatttttctgcagtggctctgagtccagccccttacttaaagatctggaaagcatgaagactgggctttttttcctatgtctcttgggaactgcagctgcaatcccgacaaatgcaagattattatctgatcattccaaaccaactgctgaaacggtagcacccgacaacactgcaatccccagtttaagggctgaagatgaagaaaatgaaaaagaaacagcagtatccacagaagacgattcccaccataaggctgaaaaatcatcagtactaaagtcaaaagaggaaagccatgaacagtcagcagaacagggcaagagttctagccaagagctgggattgaaggatcaagaggacagtgatggtgacttaagtgtgaatttggagtatgcaccaactgaaggtacattggacataaaagaagatatgagtgagcctcaggagaaaaaactctcagagaacactgattttttggctcctggtgttagttccttcacagattctaaccaacaagaaagtatcacaaagagagaggaaaaccaagaacaacctagaaattattcacatcatcagttgaacaggagcagtaaacatagccaaggcctaagggatcaaggaaaccaagagcaggatccaaatatttccaatggagaagaggaagaagaaaaagagccaggtgaagttggtacccacaatgataaccaagaaagaaagacagaattgcccagggagcatgctaacagcaagcaggaggaagacaatacccaatctgatgatattttggaagagtctgatcaaccaactcaagtaagcaagatgcaggaggatgaatttgatcagggtaaccaagaacaagaagataactccaatgcagaaatggaagaggaaaatgcatcgaacgtcaataagcacattcaagaaactgaatggcagagtcaagagggtaaaactggcctagaagctatcagcaaccacaaagagacagaagaaaagactgtttctgaggctctgctcatggaacctactgatgatggtaataccacgcccagaaatcatggagttgatgatgatggcgatgatgatggcgatgatggcggcactgatggccccaggcacagtgcaagtgatgactacttcatcccaagccaggcctttctggaggccgagagagctcaatccattgcctatcacctcaaaattgaggagcaaagagaaaaagtacatgaaaatgaaaatataggtaccactgagcctggagagcaccaagaggccaagaaagcagagaactcatcaaatgaggaggaaacgtcaagtgaaggcaacatgagggtgcatgctgtggattcttgcatgagcttccagtgtaaaagaggccacatctgtaaggcagaccaacagggaaaacctcactgtgtctgccaggatccagtgacttgtcctccaacaaaaccccttgatcaagtttgtggcactgacaatcagacctatgctagttcctgtcatctattcgctactaaatgcagactggaggggaccaaaaaggggcatcaactccagctggattattttggagcctgcaaatctattcctacttgtacggactttgaagtgattcagtttcctctacggatgagagactggctcaagaatatcctcatgcagctttatgaagccaactctgaacacgctggttatctaaatgagaagcagagaaataaagtcaagaaaatttacctggatgaaaagaggcttttggctggggaccatcccattgaccttctcttaagggactttaagaaaaactaccacatgtatgtgtatcctgtgcactggcagtttagtgaacttgaccaacaccctatggatagagtcttgacacattctgaacttgctcctctgcgagcatctctggtgcccatggaacactgcataacccgtttctttgaggagtgtgaccccaacaaggataagcacatcaccctgaaggagtggggccactgctttggaattaaagaagaggacatagatgaaaatctcttgttttgaacgaagattttaaagaactcaactttccagcatcctcctctgttctaaccacttcagaaatatatgcagctgtgatacttgtagatttatatttagcaaaatgttagcatgtatgacaagacaatgagagtaattgcttgacaacaacctatgcaccaggtatttaacattaactttggaaacaaaaatgtacaattaagtaaagtcaacatatgcaaaatactgtacattgtgaacagaagtttaattcatagtaatttcactctctgcattgacttatgagataattaatgattaaactattaatgataaaaataatgcatttgtattgttcataatatcatgtgcacttcaagaaaatggaatgctactcttttgtggtttacgtgtattattttcaatatcttaataccctaataaagagtccataaaaatccaaaaaaaaaaaaaaaa

SEQ ID NO: 3090 - DNA, 1103 bp, Homo sapiens
ataaaggggtggcccgtagaagattccagcaccctcccctaactccaggccagactcctttcagctaaaggggagatctggatggcatctacttcgtatgactattgcagagtgcccatggaagacggggataagcgctgtaagcttctgctggggataggaattctggtgctcctgatcatcgtgattctgggggtgcccttgattatcttcaccatcaaggccaacagcgaggcctgccgggacggccttcgggcagtgatggagtgtcgcaatgtcacccatctcctgcaacaagagctgaccgaggcccagaagggctttcaggatgtggaggcccaggccgccacctgcaaccacactgtgatggccctaatggcttccctggatgcagagaaggcccaaggacaaaagaaagtggaggagcttgagggagagatcactacattaaaccataagcttcaggacgcgtctgcagaggtggagcgactgagaagagaaaaccaggtcttaagcgtgagaatcgcggacaagaagtactaccccagctcccaggactccagctccgctgcggcgccccagctgctgattgtgctgctgggcctcagcgctctgctgcagtgagatcccaggaagctggcacatcttggaaggtccgtcctgctcggcttttcgcttgaacattcccttgatctcatcagttctgagcgggtcatggggcaacacggttagcggggagagcacggggtagccggagaagggcctctggagcaggtctggaggggccatggggcagtcctgggtgtggggacacagtcgggttgacccagggctgtctccctccagagcctccctccggacaatgagtcccccctcttgtctcccaccctgagattgggcatggggtgcggtgtggggggcatgtgctgcctgttgttatgggttttttttgcggggggggttgcttttttctggggtctttgagctccaaaaaataaacacttcctttgagggagaaaaaaaaaaaaaaaaaaaaaaaaaaaaaaaaaaaaaaaaaaaaaaaaaaaaaaaaaaaaaaaaaaaaaaaaaaaaaaaaaaaaaaa

SEQ ID NO: 3091 - DNA, 4639 bp, Homo sapiens
ctctgttttcatttcagtcttaatgaaaactttctaacttatatctcaagtttcttttcaaagcagtgtaagtagtatttaaaatgttatacttcaagaaagaaagactttaacgatattcagcgttggtcttgtaacgctgaaggtaattcattttttaatcggtctgcacagcaagaactgaaacgaatggggattgaactgctttgcctgttctttctatttctaggaaggaatgatcacgtacaaggtggctgtgccctgggaggtgcagaaacctgtgaagactgcctgcttattggacctcagtgtgcctggtgtgctcaggagaattttactcatccatctggagttggcgaaaggtgtgataccccagcaaaccttttagctaaaggatgtcaattaaacttcatcgaaaaccctgtctcccaagtagaaatacttaaaaataagcctctcagtgtaggcagacagaaaaatagttctgacattgttcagattgcgcctcaaagcttgatccttaagttgagaccaggtggtgcgcagactctgcaggtgcatgtccgccagactgaggactacccggtggatttgtattacctcatggacctctccgcctccatggatgacgacctcaacacaataaaggagctgggctcccggctttccaaagagatgtctaaattaaccagcaactttagactgggcttcggatcttttgtggaaaaacctgtatccccttttgtgaaaacaacaccagaagaaattgccaacccttgcagtagtattccatacttctgtttacctacatttggattcaagcacattttgccattgacaaatgatgctgaaagattcaatgaaattgtgaagaatcagaaaatttctgctaatattgacacacccgaaggtggatttgatgcaattatgcaagctgctgtgtgtaaggaaaaaattggctggcggaatgactccctccacctcctggtctttgtgagtgatgctgattctcattttggaatggacagcaaactagcaggcatcgtcattcctaatgacgggctctgtcacttggacagcaagaatgaatactccatgtcaactgtcttggaatatccaacaattggacaactcattgataaactggtacaaaacaacgtgttattgatcttcgctgtaacccaagaacaagttcatttatatgagaattacgcaaaacttattcctggagctacagtaggtctacttcagaaggactccggaaacattctccagctgatcatctcagcttatgaagaactgcggtctgaggtggaactggaagtattaggagacaccgaaggactcaacttgtcatttacagccatctgtaacaacggtaccctcttccaacaccaaaagaaatgctctcacatgaaagtgggagacacagcttccttcagcgtgactgtgaatatcccacactgcgagagaagaagcaggcacattatcataaagcctgtggggctgggggatgccctggaattacttgtcagcccagaatgcaactgcgactgtcagaaagaagtggaagtgaacagccccaaatgtcaccacgggaacggctctttccagtgtggggcgtgtgcctgccaccctggccacatggggcctcgctgtgagtgtggcgaggacatgctgagcacagattcctgcaaggaggccccagatcatccctcctgcagcggaaggggtgactgctactgtgggcagtgtatctgccacttgtctccctatggaaacatttatgggccttattgccagtgtgacaatttctcctgcgtgagacacaaagggctgctctgcggaggtaacggcgactgtgactgtggtgaatgtgtgtgcaggagcggctggactggcgagtactgcaactgcaccaccagcacggactcctgcgtctctgaagatggagtgctctgcagcgggcgcggggactgtgtttgtggcaagtgtgtttgcacaaaccctggggcctcaggaccaacctgtgaacgatgtcctacctgtggtgacccctgtaactctaaacggagctgcattgagtgccacctgtcagcagctggccaagcccgagaagaatgtgtggacaagtgcaaactagctggtgcgaccatcagtgaagaagaagatttctcaaaggatggttctgtttcctgctctctgcaaggagaaaatgaatgtcttattacattcctaataactacagataatgaggggaaaaccatcattcacagcatcaatgaaaaagattgtccgaagcctccaaacattcccatgatcatgttaggggtttccctggctattcttctcatcggggttgtcctactgtgcatctggaagctactggtgtcatttcatgatcgtaaagaagttgccaaatttgaagcagaacgatcaaaagccaagtggcaaacgggaaccaatccactctacagaggatccacaagtacttttaaaaatgtaacttataaacacagggaaaaacaaaaggtagacctttccacagattgctagaactactttatgcatgaaaaaagtctgtttcactgatatgaaatgttaatgcactatttaatttttttctctttgttgcttcaaaatgaggttggtttaagataataataggacatctgcagataagtcatcctctacatgaaggtgacagactgttggcagtttcaaaataatcaagaagagaaatatccttagcaaagagatgactttggggatcatttgaggaatactaactctgttgcattaatgcttcaaaaaatcatcaaatgattcatgggggcctgatttgcatttgaaaaatgtttgaaactagagtctcatttgtttcaggaatgcagctacctgagttttttgtctcggcaaagtcacaaagcccatatactcacattgtgtgtctatacttgccaattaattctaaacttgtaggaaatatgccctctcttaaaggagaattttttttaaatctctgagaaatgagattctgagtttatttcagctaaaaggttgcaattcttctgaagatatctcaaatataaggttgaaagttaagtgttaataatttttgtgaatttatacacacctaaacgttaagtacacaaatattttatttgttttacaaataaggaataagtaatttataaattaagaagttacctataaaaataaaaagataacaaccctatcatatagcttatttttaaattacctgaaaaacgatattctacactgtttcctttttgactctgagttttcaaactgttacttctcccatatttctcaatccatttcactcagttgcacagtcttttaaaccctgtaattgtcataccaaagtttctttttaaaaaaaaattactttaaatgcttagtttattcaaagagcgatccaataatataaaaggaacatgtgttaaacacaataaaattttaaatggctctaaatcaagcacatcaagagtatacaagtcttaaaggctttttaatacatactcttttcccatctatgtaacccaacttgcacatttcagctgcatgtggtgaatatgcatcatatatttactttaagaggtaagattttacttgcaaaatacatgtgcaaattagggatccatcagttgatggaagagatggactctagaatattatttcttgtggttattactcctttacaaagcactttcgtctcacttgatcctcataaggaaactaaggctcagaatgagtagagctgggttcagaatctagctcttctaactccaagccatctcctctttccactgcaggaaactgcctcttttgtcagtgaaataatagaaagattgtgttagttaagtgataactgtcatttgtttgaaaatgttcgagactgaacaaatagcatttaaactgctggcatatagatgagatattgtacttttgtgcaatgtttattacctttgattaaattgtaatgtgaagcttttactaggtgaatagttcattatgtagtggaggcttcgtggttgtccattgaattgtcacagcaaaatctataagtttcttcaattctacaagatagatccatatacctttgatcacttggagactctttttttgctggtttctagataactcaggtaaatcagacctttacagagtacagggctaggtgaaagaattactgaaaaatcaccttgaaaatccgaagggctgatataccctttatgttcctgactgatgcgcagaacctgggggaaatctacagcaatatacaggttgcaatgctgataacacaacagcaatcctctcctctacgtggacttactgttgtttttttaattattattggaatgggattttagaaaatagaagttacctttgtgtgtgttttagggaaggtagagaagaatctgctctttctctgaatactgttttgaccccaggcaggaccttggaaaggccaaaacattaacagtagtacttctgttcactgaagagttatgttacatgaggataaaatggttttgtcgtgtttattattgtattttgtgttgatataaataaacatggtaatttaaacaataagaaaaaaaaaaaaaaaaaa

SEQ ID NO: 3092 - DNA, 6469 bp, Homo sapiens
caatattttatagtttatggttgaaagaagcatttccttattgaaaccttggaaaggggaggctacagatctgtgagtagaaatttctgggctagtggccaggtgcggtggctcatgcctgtaatcccagcactttgggaggccgaggtgggtggatcatgaggtcaggaggttgagagggcgagaccatcctggctaacacagtgaaaccccatctctaataaaaatacaaaaaattagctgggcgtggtggtgggcgcctgtagtccagctactcgggaggctgaggcaggagaatggcgtgaacccagaaggcggagcttgcagcgagccgagattgtgccactgcactccagcctgggcgacagagcgagactccatctcaaaaaaaaaaaccaaaaaacaaatttctgggctagtttagatgaggttgaacatacacttaaacattgactcagtacccctttaagtgctcagttttatgctgggtgtggtaacactgtgcttagtttttatagtgtccactaaggagggcaggagggactgtaactaacactaaccaaacatctgccatatggattgtaatgataagggatttacataaattacataatttaattctcacagtaagtgtttgttgaaggcattgttaatatcttttccaaaactaagacacagagaggttaattaacttccccctgatcacaggactgctaagtgttagaggctgagtctagattcagaatcatggtctgcctgacctcagaagctgcagtctttcctctttgtcaagctgtagccccaaaagacaaaactctattctctcataatccagtaagaaagccgataagcaccaagaagggctgtccatgtggcttcagataagagagacgaacatcaggacaatgagtgggattcagaagtcttcgtgaaggaagtagaagttgacctaggttttaaagaatggtggagggtagggaactcttttattgagtgcctactatatttggcattgtagactctctccacagataattttatttaatgcacagcaatccagggttgtgagattattagtccatttcacatatgcaaaataggaggctatgttaagacaacaaagcataaaaaaagaaacatatgagactaaacgataaagcaaatttctgaaacctctacacgtagtgagtgctagagctagggtgagtgggatttggatttcagcaggtagagacagtgtgaggattagcatctgggtgaggaatgaatgacatgaataaagggcaagaatctgggaatgtgaagcttgtccaggaaacataaaggagcccagttgacctgggtttgaggaaaggtggaaggaaatactagaaaggtgttttggagccaggggcagtctggatgttttggcctagaatgccaaggcttaagaaatttgcactgagtttggttttttaggggccaaggattactttgagcaaatgaatgagatggagtatttgccatcagttgctgtgagatagattggaaaaagaaaccgattaggatattgcttcaaaaccagttaggatgttgctttaaaagtcacatagagatgtcagtggaacctgaagagatgggaagaaaaggaaaatgtagtaaattttctttgaaaattaccaaaagtgtcttctttgcacttgtgctttttgtaactgctaggcatgcacgttttatggttaaggaaacgacattggtaaatgtctaataggagggagattcccagatcaccttaatgggtctcagactattaaaaagaactcctaattcaggatttcattccaaagtgccacttgaaccttcagtccaattctgccttccttcctgacccaggatattttaggctctccaaggtctttcgggttctccttttccctctaagccttaaaatgttctaggttttcatttgccttccagacgtctctttaacctttgccaaacttcatgtaggagtctgataatccagtgaactttctttatattctcattgtttgacattgtgaaatcaaaactatttcctaatgcaaagtaaatgcagagctaaagccccctaagcaaccttgcctgtcttttaatgcattcttcacaacactttctcctttttgtaggataaacattttcacttaacatcttaattcagagataccaacctagcacccacagtgttgttcttggaactttgagagtacaaggggttaaggtttcggtgtcagtgagatccgcactggctggcctttgcagctgatagatgttttactttggccttataaagacattttacccgctggaaacccttgtcgcatgacaggatcaaaaatagcccggctgcagcccctgctgtccatcaccacatgtaaactggcataagagtaggctctcttagccgtgtctacacgttgtagacacggcagcctccagggacagtgtttcataaagccacacctgttgttgcgagtgagccagtcacctgacctgcagcaaagttctgagtgtgtgcatgaccacgcgcctggtttctgacaagcagttaagaacatctctgagtgtcctcagaaacacttgatgacgtcgtttctcctggcactgggaaacatctacaagtctggtaaaattgagtgtatttttatcattggggccaaagtccactaccctctgagataaattcatcttttccatggatgttcgttaatgagtgctttcagtaaaactctgaaaaggcaaagcaaaatctatgtttctgaaaaatctacaagtgctgttttctgttttgagttctttgaaattgaaaggttgttacttgtccttgtacttcttacaagttggctttgccagcaaccacacagtattatagtgtcatgtttttagatataaatatagggggctttaatggagattattttaaagaagaagataaatcagatattcatggtagtgtttcagatgggcagtaataaattgcaagagtgagaatggagatgcatggaatttttgtttaaatacctcttgtgatttatttttttaaccacattaacttttaagtaacgtcattggagtctgtcttgtattatctgtgaatgtataattttaaaagatacttggttttgtttgactttcttgaacttttgcaggataacacatgattatacaattgatatgatttgtacaaaatatcaacgaatagggcagatttcgaacataacactaacgtatttctgctaatttggaggatgaaacaagagttagtagatgtgcaaaaaaagtttccttgttatgtaaaccttttaaatttctattaattttagaaatatttagttgtacttccctgtcctgccttttccctcaacctcatcatttccccaaaaccccttctgtctgtcttgcatagagataaacaagctggctgaccctcaggtgcctgatagtcaaacaggtttggttgaccgttgtgtccttatgaattttatgggggaaaaaaaagagaaagaaagaaaataagtgtgctgcacatctctttgggaatcactgccatgaatgttaatagcatttttgtagcttcccacgacagcctcttgtgacagagtgagctgcactacagttcgtttgagaagtgtgattctgctgtgtttaccacacttgtgaacttttaaactcctttttcttattttgtcgcctgcttccttttttaattattatttttaataagggtgactgaggttgcagagagattaatgtgtgctgagtctgcatagcaatttcaagtagggttgccatgataataaacatacggattttgttaacgtttatgttaatttcgacaaactggtgatcaccccacagaagtgaataattatggactaccttttgagtcctatattcttggctaagaatttttctatttacttaattaaacattcttattttatgaactcattacaaaattttccaaagtcttcatcaattgagcacttgttaaacctctcttacgtgtgtagccctcatgaatcttgatttattttccaaactcttgataaactgtacttagcagctccaaataatcatacatgacaattctagcagggagggtgtcatcatatttttggggtccagttcttctgggggcactctatgactttggctactgcctgagtattctcaatggaccactagaaagtagatattgtggcaaccctatgctcataataaccactaaatttgagtttgttttatctttgaacaacatgctacagttaggaggtgactaccgcctgactttgttttccatttctcaacaggatacctgcccactatgtctatccgcaggcttttgtgcagccgggagtggtcattccacacgtccagccgacagcagctgccgcctccaccaccccttacattgattacactggagctgcatacgcacaatactcagcagctgctgctgctgccgccgccgctgctgcctatgaccagtacccctatgcagcctctccagctgctgcaggatatgttactgctgggggctatggctacgcagtccagcagccaatcaccgcagcggcacctgggacagctgccgccgccgctgcagcagctgctgccgctgcagcatttggccagtaccagcctcagcagctgcagacagaccgaatgcaatagaccagccatctgatcaaagttgaattgttttctctttccctcccaattttccaatttttagtagctaataagagagttaacattgacttaacagctttaaaaaaaaaaacagccatgctattgtgaagcagagttattattttttttatactccaggtagtgttctagatgagaaagaggtaagaatgaggggaatgggcacaattttggaaatcaatcccaaagagcctgagtaaatgaaaggccactacgaaatgacgccaggagtaacaacggaacttcacttttgtaacgggatttttatttttgctctttttatagtatcagggaagcaaactgccttttacaagttagaaaatgctgtttgaatctagttgaaccagggaatacagagcgagcaatatgtagcttgaattacatttaaaagcagattttttacaaacaaaatggcgaaagcactgattgtcatttttagcagtcacttaaggcctatagaacttttttcaagtcggaaggtcctgttcttactatctcaaaaatgggcatcgaacaatcaatctaggagcgtggcagtgggtaaaatggtggacaggcaccaaagctattttctcatctgtcctgtggatgagtggaactgtggaacaagtgatgtggaattaatgggtgcaacagctgtacagacaatcaataacacacacagttctggaaagaacacatcacttgtgcttgtttgatgagcttgtcacattctaatccctctccccatcctgtttcaattttgggaaacttgtatctgctggtgtcagcaattctgattctgaaataggatcaggcttttactacaacagccttctctttctatttattgtgtcgactcgtggcttatgaataaaggcaggcaaagtttgcagaactgtcttaaggacatttattttttttccctttttaagtaattttacactttagtatctatttcagagtcatatttaaaactatttattagtgactacagtacatgagacaacaaggttactgagattacaattcttcaaaggttaatgataatgtggtttatactgtgccttaatagtaatgctatttaagatatttatttttaagttttactatgctgcactctaaagaagggaactttagatgtgacactgtaaaattatgtattcatctcatggcataaattatttagtaagtctagatgtagcgtattaaatattaacctattcaactaaagatgttgacttggatttatttaaattcatatgtgcactgtataagagagtactcttacattaacacattttagtttagtttttagatttttttttaaacgatatattgctagtttcatgcttcctcctctgattttgcctgtgtagatttcatttattggtaattcattagtttaacactattatgtagtttttaaatgctgctttacatttttcttctgaaactgcaatacttgcaatttttattcttaaactaaattgaatactattttacactgtattggatttttatacttgaacaatttcatacaagggaagacaggttagcatttttatggactttctccattatcactggatttactttaagtattcccatactagacagtgttatgtaatgtagacatgactctcctgtgcaaattatttattcgttgtgtatattgctttataacatttcagatcttctaatctattcacttgtattaaatataatttttaaaaaaagaaaaaaaaaaaaaaaaaaa

SEQ ID NO: 3093 - DNA, 5789 bp, Homo sapiens
cactggtaaaaatgtattatgcatccacagggctatatattaaaatcagtattaatgttggaaatgtcatatcccttagggacgttcattataatagagaaaaaagggacaaaatattaaacaacatagatgagtttattcaaatctaatggttacgggagtgttgctaagtgtttagacatgtaacttgcatttgaatcaatgaacatttgctccggaattgtctccaggggttggagaatggagtagtgagaggatgggtagcaaaaacatttagtagtgtcagttggcttttgcaaaactaacttctcccagatttggggaaaagggaaatgtttaaggaacctaggaagacacacatgtttgtaaaccatgccagtagttatgctaatttttattattttatttcagatgttactttaagcttactcccttcaaacgaaacaggtaatatcaagtgatttctaaatgtaatagcttcttctgcagcctcttgagtgtcttgcttgtgcagtctactgggttactaaagagttttcttttgcctccttgccctttttcctgtgccttcaaccattgatttatgacccctttgactttgacattgaactataattctgtcaccacactcccaaacttccaaaggatggccatagcactccatttaaaatagcatgtattatttttgtgattataatagtgatacatattagctcataaagatggagaatatagagaaatgcaaagaagaaaatacaaatcatctttaatgttactttcctaagactatgactgttaacaatttggtctatttccattcagtatcatttatacatatatttatatacatatactcttatatcctttgcaaaatagtcataatttacatagatttttgtatcttgcccatttgacttaatattacgttagaagtatattccagtgtcccttactattatgacttgataatattccattttgtaccatatgttgaactttaaagttgtttctatctttttaatagaagttattgcaatgaacattctggtgccaacatctttgcattcatttcttatttctgtaagatacattctaaggattgcagtatgcaaggattgcattctaagggtcagcagtatgaatattgtaagactcttgatactactgcttggttaccttctagaaaggtcgtgcctagcgacattcctgtccgcagtggatgagaatgtctgtcactgtacctttgctgagactgtatcatatcttattaaatctttctctcaacgcttaggttttatttttcattcatgattactagtgaagttaaacatttttaccccagagcactttagttaccaaaaccagaagttcatttcacagttgtattttgtttgctctgaaaaggaaactatcagggcaaacaaaataatatatttaaaagatttttttttttttgagacggagtctctctctgtcatccaggctggagtgcagtggcgccttcttggctcactgcaagctccgcctcccgggttcacgccattctcctgccttagcctcccgagtagctgggactacaggtgcccgccaccacgcctggctaattttttgtatttttagtagagatggggtttcactgtgttagccaggatagtctcgatctcctgaccttgtgatccgcccgcctcagcctcccaaagtgctgggattacaggcgtgagccacggcacccggacctaaaagattcttaatgacaatgtgaaatgctatcagccttcataattaccacccatcattggctcatgggtcacacattgaaacctgacagtttcagaaacctcatttgtgtgtctttgttactgatgagtttctgccaggataacatcatcattcttaagtgtgtttccaatctctgagcttggccttttcttcagaatttgcccatccaccctaggtgacagagcttcggtgaaaatctatgccctgaacacagcctctttccattggccatttttacagcaaagatttctgtacctgcttctccgttacctggggaatgaaccatgggctctgtccccaaaacgtgtttggaagacatttctaaagtttgcttcttcagggcatgttaatatttgcctgtgagtcactcactttgaacagtcttggttctgctgtgggcgtgttatgtgattgtgtataggtggatgatctcgacctctctgagaatagcattctctatcagtacaatggggatagtattatgttaactcctaaagaagatagcgagacacttgattgtataatagcaatactttacatcccatgtgtactgtttcacattaatttttattctgaattacctgtttttacaacctatcacctgaaggtcccgatagtggcttaattctacatatctgaagtgtaagtccacatcatttgtctagcagcagtgtgtggaaagtaaagtagaattacacaggcagtggggtgtgtaatgggtgtgatctaactgcgtaaacatggaactccaactcccagactcaccctgtgccaatgctacatgatccgtggatgcggttcctattcattctgctgctgagatgaccgatagtgtcttaaaggtgtcaacagtgtgactttttttttagcacttcactaaaatgatactcatggcaaattgtttttaaaaaacaagcaatgattattctctaatatttaagttgtttctttgcagaaaaaactaaaatcactatagtaaaaaccttcaatgcatcaggtatgacttattatcaatatcaagactttcctttttataactaaagtaaaattaaacaaatggctggtgtttataatttctttctcttttttccaaacttttcaagataaaatctggtcttaacaaacagatgtgtatgcactgggtacctgaaattgtactaggtgtttggggctatataataatgatcagacacagagcctaccctcaagaatcttctagtctatgggtggagacaaggcaaaaaaatagataactaacatgaacatgcatgcagataaaggcaatgattatacaagtattactgacatggttaagaggcataggagtagagggggatgcaattaatgaagaagttagaggaatgaacctcaaatttttttttcctgagacaagatctcactcagtggcccaggctacagtgcagtgatgcaatcatagctcactgcagcctcaacctccttggctcaggtgatcctcccacctcagcctcctgagtagctgggactgcaggcttgtgccatcaagcacggctaatttttgtattttttgtagagacaggatttcgccacgttgcccaggctggtctcaaactcctgggctcaagtgatctgcctgcctcggcctcccagagtgctaggattacaggcctgagccactgcacctggccaaattctttttaaatcaaagaaaatgtgtacttttaagtttctgatacaagactacacacacaagacatgcttgacaaaggcttgatttcaagtagcggttggcaaactatcaccaatgggccaaatcgggctcactgcctgtttttgtgaataaagttttattggaacactaccatgcccctttgcttacatattctctatagctatttttctgctgcgtaaaacacgagtggttgcaacagagaccatatgacccacaaagcttaaatatttactatctgaccctttagaaagttttctcactcatgatttaaggaatgacctgtggccatgtacatagaggagattacagatgagaatgctagcagtaggaaaaacaaaattctcagtatgaatgaacagcaagaagacacgcatcactggaaacggagctgcagctaaaatttagaaaaagatgagatgatcgaatgaaaagtttagtaagtaatacagcaatggtttaaaggacatttacagcataactacccattataaaatctataaattctatatttgcataatatatatgttatagtgagttctatctataagcaagtatatttgcttatagacagaagaagaaatgaaatatttctcttttggtgtgggtaacactgctttggaacaatataaaaatctacagatctggtaatttggggtacctaaatttaatttgctcacaaaatcaaaactcatagctataggtgtcttcgctaaagcatgatgcctgtacatcaataaatcacactagcagaaagcatatcacatgcactaactcaaattataattttagtttgtacccaaactagttttctcatagaaaagaatttaaggatttgtaatgtgcaatggaaataaacttgcagttgggcattgcacacataattctgaccaaacaagacctaacaaggagacaaaaatatttcttaatataacaagtttttcccttggcagtttgtttaatacattatcagcatttgctcctcccatgtactatggatttcttatgctttgccaaaaggatgcaattaataaaggaaggctttttagagaagtaaaccttgagttcttttcaaattgaagaagagatacacttctcctctcaccaaaggagaaagtgtttctcaggttaatacgtataaagttttggttctgatgctcattttatctcccagtcatctctgtctcctttgtatgcctgtgtggtctgttgtcctggtcatcactccattttgccctcactaataagtaaattaaaaaatgctttttatttactggctagtatcatccactagattgtatgctccttgagggcaggatctatatctggaaactcccaaagcctgtagaatatggttaatgctcagcaaatatgttttgaattttgtagtttttgcccatgaaacaatattatgacattaatgttatttcatacatacatttgcataaagagctaggattaacattagagtgttcatagactcccctacataggaaaagaaggaggatctatgattaagggccattccatttaaagtctctacttggtttgtgttcatggtgctctgtttatactgaacaggagagggattaattgggaaggggtcaaaaattttagggaggagttaaggatcagatattgacatactaaagattagtaaagaattaagttccgtagctgacaaatgaccaacaaatgaaaactcatttctttagtctttgtggaattcatccatccaattaattccagcttataatatttctggtccacatttgatgcctacgtttatgaattctcttgacaatgcagcacataaacacgggcattgacatgcttaaccagctgggttgtgttttctttgcaggcgtcaaaccccagagaaatatctgcaatttgtcatctatttgcaatgactcagcattttttagaggtgagatcatgtttcaatatgataaagaaagcactgttccccagaatcaacatataacgaatggcaccttaactggagtcctgtctctaagtgaattaaaacgctcagagctcaacaaaaccctgcaaaccctaagtgagacttactttataatgtgtgctacagcagagggcccaaagcacattaaattgtacattcacaataaaactgaataatacaatgaatgcatgtgctgtaatagctgctttggaaagagtaaagattcgaccaatggaacactgctgctgttctgtcaggataccctgcccttcctccccagaagagttggaaaagcttcagtggtatgtaacaaacatgctgacccttctcctt

SEQ ID NO: 3094 - DNA, 5749 bp, Homo sapiens
ctcaaggccaagtagaccttacttgacctgactccacagctcaaaatgtacaccttttaactgcttgagtccaggaggctaaggttgtagtgagccaagatcatgccactgcactctagcctgagtgacagagtgagactctgtctcaagaaaaaaaatatatatatatacctttaaaaatattctatagattttaagagtttttatcaactctttctggttatgaaaggaacatatgttcattatagaaaacttagagaatacagaaaactgttttcaaaagggtaaaacacctaatccaaccactcagaactaactggagactaggggaagaagagcattaatccctgctgtccccagcagaaggttggcagcagcctctgggagaggcctgcctgtcccaccagggccaagggtttctcccactccatctggcacttgctaataagcagctcatacctgggtggcccagcagcaggcaggcaccaggcttggcaacagcacggctctcaggaggggccaccagggcaaagctcagcactgatggccatagctttacctgccaggaagccaaatgccacccgagttgctggggtgtccaggagctgtgactctgcctcctagctacagaatctgaacacccgtgaggcaccatcccagggcacctgtggaccaggagcagacagagcctaacaggcccctgatgtggaagaaaggatttcagtggcattcatggggaggacagtggttgaaagtcagaatattcctctccaagtagcagaaatgcaataatgaggcgattccgagtgatggctatgactggtgggaagatttgctcatcatttgggaagggagaatgatgggaagtccaaaatcaatttcctccttcctggaggcttgcaggaatgatctcatctctcatgtgtgcagcctgggcctctcaatccttacaatagccctgaggcagcatacattaagcctttttacaaatgaggaaactgtatcagagagattaattaacttgcccaagatcacacagctaatacccagcagacccagagtgtgagaccatggctgattccaaatcctgcttcctttctagcctcccttagctccctttaaagtataaaatgctcttctattgacctatgcactaagttgtggcagttagtcagtcagccagtctgttagctggttggttagttaccttttctctctggcactctgtcctgcttgttgcaaggttttatggggagaacggcatcttaggctttgtcttgtggggactcaggtggacatcagctcctagtgcctgcccagcctgttcctctccctccgtgcacctctcctttgtggaagctgcagagtgaagtattctggacccatcccatcttcccctggccctgccctttccacaggtaactacctgatcatgccctcagggaacctccagattgtgaatgccagccaggaggacgagggcatgtacaagtgtgcagcctacaacccagtgacccaggaagtgaaaacctccggctccagcgacaggctacgtgtgcgccgtaaggcccgggcccacctgctgggggatgggggatcactgatggaagggctcacaaagatggaaagggaggtagatacctggaggtgccacatccaagctccagttctgtgtgcactggctttggccagggggacagccaggggttctcagccagggattctctcccctctggccggcctcagggccagcatctcacagcacacagcaccaggcgactgcctgctgccacacctgcctgatgggaggtttccttcacggttactttgcgattgggatgggtcagaatgtgtgtgctgggacaggacggtgggtcttgtctcaagctcagcagcggacacagcatgtgcctagaacagatggccacgtgggaggcctccaggctgctgttctgccctatatgaggtccctgggcctgcactctctgcactgatgaggtgtgccctgcaccaccctctggtgagcttccgggaggcccacatgctctcaatgcacaggaaaacagcagctacctttccgtgcgcttgcctggatccctgccaattcaaaggagtgacatcttacacggagttaggcttagagttggcaccagagatggaatcactgtgaagctaatgaagttaaacttccatcgtctttcactcactgacagaagcctcacaaggccctaactttgtatgtatcattttccattctttttggggcctccgaaactgtataaatttcaggttttagaaaacctgggtgtgtccctggttggcatataaagcggaatcacacatagtccccttgctccttgaaggttgctgaggaacggcacacattagagagtaaacaggcctttcagtgagttctctgcagtttgtccacagtgttgaaaaaagattacagctttcccagctgtgcacctgaggaagtacataggtgatttgcatttggggaccttgcaatatgagaaatgcatgtgtttaaacagtggattccattcagctcagccggaggccggctctgagatgctcactgagagacagttgggcctgagaaccatagggtggggttgagagcatggcagattcttgtttcccatctcatcttcagcctcacagcgcacatactgagtgcaagcagaaagaaatatctgtaccatttaaactgcctctacactccctcacctttctctctttgccagcacacagttaactgtgcatatgttatgttgatgctgctgttcttctgtgttatctcatttcttactcataacagctccctgcagaagcagtccttgtttctgataaggacaccaagccccaagggaattctgtagcacgccccactctacataggttgaaagacccggaatggctgtttgatcccatctccatgctctctgggactgcctcctgggcatgctctacaggacatcctggtccacacgccttctgtccttgccctccttgcccctccaggctccaccgctgaggctgcccgcatcatctaccccccagaggcccaaaccatcatcgtcaccaaaggccagagtctcattctggagtgtgtggccagtggaatcccacccccacgggtcacctgggccaaggatgggtccagtgtcaccggctacaacaagacgcgcttcctgctgagcaacctcctcatcgacaccaccagcgaggaggactcaggcacctaccgctgcatggccgacaatggggttgggcagcccggggcagcggtcatcctctacaatgtccaggtgtttgaaccccctgaggtcaccatggagctatcccagctggtcatcccctggggccagagtgccaagcttacctgtgaggtgcgtgggaacccccccccctccgtgctgtggctgaggaatgctgtgcccctcatctccagccagcgcctccggctctcccgcagggccctgcgcgtgctcagcatggggcctgaggacgaaggcgtctaccagtgcatggccgagaacgaggttgggagcgcccatgccgtagtccagctgcggacctccaggccaagcataaccccaaggctatggcaggatgctgagctggctactggcacacctcctgtatcaccctccaaactcggcaaccctgagcagatgctgagggggcaaccggcgctccccagacccccaacgtcagtggggcctgcttccccacagtgtccaggagagaaggggcagggggctcccgccgaggctcccatcatcctcagctcgccccgcacctccaagacagactcatatgaactggtgtggcggcctcggcatgagggcagtggccgggcgccaatcctctactatgtggtgaaacaccgcaaggtcacaaattcctctgacgattggaccatctctggcattccagccaaccagcaccgcctgaccctcaccagacttgaccccgggagcttgtatgaagtggagatggcagcttacaactgtgcgggagagggccagacagccatggtcaccttccgaactggacggcggcccaaacccgagatcatggccagcaaggagcagcagatccagagagacgaccctggagccagtccccagagcagcagccagccagaccacggccgcctctcccccccagaagctcccgacaggcccaccatctccacggcctccgagacctcagtgtacgtgacctggattccccgtgggaatggtgggttcccaatccagtccttccgtgtggagtacaagaagctaaagaaagtgggagactggattctggccaccagcgccatccccccgtcacggctgtccgtggagatcacgggcctagagaaaggcacctcctacaagtttcgagtccgggctctgaacatgctgggggagagcgagcccagcgccccctctcggccctacgtggtgtcgggctacagcggtcgcgtgtacgagaggcccgtggcaggtccttatatcaccttcacggatgcggtcaatgagaccaccatcatgctcaagtggatgtacatcccagcaagtaacaacaacaccccaatccatggcttttatatctattatcgacccacagacagtgacaatgatagtgactacaagaaggatatggtggaaggggacaagtactggcactccatcagccacctgcagccagagacctcctacgacattaagatgcagtgcttcaatgaaggaggggagagcgagttcagcaacgtgatgatctgtgagaccaaagctcggaagtcttctggccagcctggtcgactgccacccccaactctggccccaccacagccgccccttcctgaaaccatagagcggccggtgggcactggggccatggtggctcgctccagcgacctgccctatctgattgtcggggtcgtcctgggctccatcgttctcatcatcgtcaccttcatccccttctgcttgtggagggcctggtctaagcaaaaacatacaacagacctgggttttcctcgaagtgcccttccaccctcctgcccgtatactatggtgccattgggaggactcccaggccaccaggccagtggacagccctacctcagtggcatcagtggacgggcctgtgctaatgggatccacatgaataggggctgcccctcggctgcagtgggctacccgggcatgaagccccagcagcactgcccaggcgagcttcagcagcagagtgacaccagcagcctgctgaggcagacccatcttggcaatggatatgacccccaaagtcaccagatcacgaggggtcccaagtctagcccggacgagggctctttcttatacacactgcccgacgactccactcaccagctgctgcagccccatcacgactgctgccaacgccaggagcagcctgctgctgtgggccagtcaggggtgaggagagcccccgacagtcctgtcctggaagcagtgtgggaccctccatttcactcagggcccccatgctgcttgggccttgtgccagttgaagaggtggacagtcctgactcctgccaagtgagtggaggagactggtgtccccagcaccccgtaggggcctacgtaggacaggaacctggaatgcagctctccccggggccactggtgcgtgtgtcttttgaaacaccacctctcacaatttaggcagaagctgatatcccagaaagactatatattgtttttttttt

SEQ ID NO: 3095 - DNA, 2118 bp, Homo sapiens
ctaactctgcaacagttatatttagacaaggataatcttcaccggctgccatccatcgctacacaaacaggctttgaaacactctgtagcctattttgtgttgtcttttgtaattgatgttttaatgagggttaggaaacttcagtgcaatatggaatgaagaacaatcattgtcattgtaataacaacagtaacacagccacagaaagtcaagtccccaccaagtgccgggctgctgcacttccaagcgctttacaaacatttttgggcttgtttttcacagcagcactgagaagtcaatccttctatgcctgttttacggataagactagtttggggctcaagctcaaagaaacccaccaaggaaggagcagagtagatcagggatttcaggatcctttaggccaatttggggtccctgtggccctccttggtttcactgcagatctccaaaccctggatgcctatgcatccacagctcagagaaattggcaggccccaaggtacagttcaccctttcccagcagctcagctcacccacagggccaaggaccccccaaaagaggacagtgggagtgaactgctgcaatagctcgtggcccaaaagccagattctccagcttggttcgtagttacattataggccattttattcctttatagtaagtagatcttttcattttatcagccatttttggatcaacatacttgtgtgatgtagtcatttaacagactcagaattaaccgcttaccaggcctgacaatgctcagatcaggtagtcatggtcatttttttaaaaaatggtttcaagtgttcctcaagaaaagtcaaaatggtttagaaatatttgaccagattatcccagtgctgagactgacagatgctcttgtaaacacccttcacccttctccaccgtctcgatataattaaataagttacagcaagtctcctttacttcccttgtgctccctttacagaatagaggtaattctccaaatacagaatgattttaaggattgtacaggagttcattccatctctaaagttaagcatccagaattatttcataattcattttcacagcatccctgtgttcagattgaaatatctcatttactccaggtcccacgaaccagagaacacccaggactcatctgaaggactctagtcaaccaatgcgtgtttacagttgctgagggggaaagaataagggtcaaattgctctatttaataaaatgtgtaatacagtgtcttccactgaaagggaactgaccctggcagtagctgatgaaaactggaatctgcattctgattccagatgtaaaaataatgtgagaaattaactttatatctaaaaaaaaagttaaactacttacccaaattacttgggaaatacaatattctgatgagaagagatgccattatacaccttatgaaaatttccagtgttgacagattgtcaacatctttacaggtaccacattaaaactatactgacggtggttttgtgtttctccttgttaatttgcagggcacttgtggatctatagacctcagggtcattgatatgtatggcttatggttgaaaattctctagaggaaagcatttagttacttggcttcggttcatttgagttacaaataagctagagtagacttctgtgtattcctttcttgatgagatgcaactttcaaccgagagggaaactggcactgatttctctgtggtaacccttgttctctgtgtcttttctggatacaacagttctgtggaagcaaatcattgaacgcaatggaggagtcctcaccagtgccttgaatgtcagctgcctggcgaaggtcactgacggcttcacccaaggacatatagtcgaagtggttaaaggcgtgttcacagatcagagaatccggcggcaaattcataaacctctcactgcagttgagtttattacggcgataaccagcatgaatccagtgtacaaagaggaagaagagagctttaagaactggtatgccaaaactcctctgggtaaaaaacgtgccttggcgataacaggaggcagcacagaaaaggcaaaggacaaagggaaaaggaaataaaagaaagagaaaaaggc

SEQ ID NO: 3096 - DNA, 2757 bp, Homo sapiens
actaggcagggatgagcaagaggaatggctcacccttgagagctggggtccatagcccaggtcagttctccagctctcccacttaccagccaagacaggaggtgaggattgagatgggatgaacccagcaggcggccatgggttaaaggtcgccatgaatgtaatgtgcccagcacagtgcctgctaaaaggcaacactcccttcctggtctgaagaccaaacaagcagactgtactcaggaaagccagaagaaccttccagctgtctggaccagaaggtgccagcccaggggctgaagaagacgtaatgcccagagcaaaaagcgcctgcagccccctgaagggctgggtgctctggaatagatgagggggcgaaatggggctggggaccagggacggacagggtgggtccagcacctgcctcgcttccgaagggctgctccaacactgaaaaacacccaaccagcttcctttcagaaagactggaatattccaaaacttctcactggaggctccggaggaggtgggctccagctgaaaaggaaatgtggaggcgtgggcgctcccggcctgcatcctgcacctcttacactttggttttcccacagactcctgaagaataggtcagaagaaagggttaaagccttaaaaggggaacaaccattgcggggctcagggaggaggataatgttctttgggctgccgcaccctgatccccggggtcccgaaccctcccgtccctggccaggcctgccagccacagggtgagggcccccttccgccgcaacctgccactctcacaccaatgcgggaccgccttctcttccttccccaccccccaccccaccctgccgtcctttctcccccaatctccgcctctgattggctgagcccccggctccccgctccccctctcctccatccccggtgaaaactgcgggctccgagctgggtgcagcaaccggaggcggcggcgcgtctggaggaggctgcagcagcggaagaccccagtccagatccaggactgagatcccagaaccatgaacctggccatcagcatcgctctcctgctaacagtcttgcaggtctcccgagggcagaaggtgaccagcctaacggcctgcctagtggaccagagccttcgtctggactgccgccatgagaataccagcagttcacccatccagtacgagttcagcctgacccgtgagacaaagaagcacgtgctctttggcactgtgggggtgcctgagcacacataccgctcccgaaccaacttcaccagcaaatacaacatgaaggtcctctacttatccgccttcactagcaaggacgagggcacctacacgtgtgcactccaccactctggccattccccacccatctcctcccagaacgtcacagtgctcagagacaaactggtcaagtgtgagggcatcagcctgctggctcagaacacctcgtggctgctgctgctcctgctctccctctccctcctccaggccacggatttcatgtccctgtgactggtggggcccatggaggagacaggaagcctcaagttccagtgcagagatcctacttctctgagtcagctgaccccctccccgcaatccctcaaaccttgaggagaagtggggaccccacccctcatcaggagttccagtgctgcatgcgattatctacccacgtccacgcggccacctcaccctctccgcacacctctggctgtctttttgtactttttgttccagagctgcttctgtctggtttatttaggttttatccttccttttctttgagagttcgtgaagagggaagccaggattggggacctgatggagagtgagagcatgtgaggggtagtgggatggtggggtaccagccactggaggggtcatccttgcccatcgggaccagaaacctgggagagacttggatgaggagtggttgggctgtgcctgggcctagcacggacatggtctgtcctgacagcactcctcggcaggcatggctggtgcctgaagaccccagatgtgagggcaccaccaagaatttgtggcctaccttgtgagggagagaactgagcatctccagcattctcagccacaaccaaaaaaaaataaaaagggcagccctccttaccactgtggaagtccctcagaggccttggggcatgacccagtgaagatgcaggtttgaccaggaaagcagcgctagtggagggttggagaaggaggtaaaggatgagggttcatcatccctccctgcctaaggaagctaaaagcatggccctgctgcccctccctgcctccacccacagtggagagggctacaaaggaggacaagaccctctcaggctgtcccaagctcccaagagcttccagagctctgacccacagcctccaagtcaggtggggtggagtcccagagctgcacagggtttggcccaagtttctaagggaggcacttcctcccctcgcccatcagtgccagcccctgctggctggtgcctgagcccctcagacagccccctgccccgcaggcctgccttctcagggacttctgcggggcctgaggcaagccatggagtgagacccaggagccggacacttctcaggaaatggcttttcccaacccccagcccccacccggtggttcttcctgttctgtgactgtgtatagtgccaccacagcttatggcatctcattgaggacaaagaaaactgcacaataaaaccaagcctctggaatctg

SEQ ID NO: 3097 - DNA, 2565 bp, Homo sapiens
ctcctggcctcaggcgaaccttacgctttggcctcccaaagtgctgggattataggtgcatgccgctgcacctggcacttctgagcagtgcttggaagccgcctcctgatgggggctgagggtcagagtggccagctgaatgctgggccatcagggtgaggggcgtcttctcctcgtccattgcctgttctcccagggcaggtggaaggggaaggccctgcattggggtggcgtgaaacaagatgagatggtaagatctgctttcactttaaaggaacatttctggttgttgcttggaaagaagtgtcaggggcaagaatgctgcaggagggctggcctggaggacagggtgggactgcgggctggctgcacgggggcaggagcctgcgcttgcgtcagaggttcctgagagactcggtctctggggcagaggcctgagcaaggggacctcgctggggtgtctctgtcttagccacgctcggtgtttctgggtcctgtgacccacgtgtgagcagcctgtggtgctggtggcacagggaaggaaaccgaggcagggagcctgtgggggctgcttggcaggggacaggcagctcctgtgcccactgctgtcccacacctgcatggaaacagaaaccccgccacggagccccctcccatctccacagggcctccagagcgccatgtgcacgacttcatgggcggggtggggtggggtcaggagcctgctgtgggctggccaggccctggccctccctgtcccaccctgcgctgcctccatgcacctctcagggctgtcatggcttttcctgtggcttctgacaggtagagtcagcgatgacggcttcatagccattaagctcacagcactggggagaccccagtttctggtaagtgctagaaccttccacctgcagagtctggtgctgtgcgagatctcagggcagctgtgggcatccaccaaaaacacagatgcccatgccttagaggcctgagctggccacaggggctgtgtgggggactggggtgggcaggggcgtgtgcagatggcattcaggcctgcgttgcagctgcagttctcagaggtgctggccaagtggaggtgcttctttcaccaaatggctgtggagcaagggcaggcgggcctggctgccatggacaacaagctggaggtggcggtgctgcaggaaagtgtcgcaaagttgggcatcgcatccagggctgagattgaggactggttcacggcagagaccctgggagtgtctggcaccatggacctgctggactggagcagcctcatcgacagcaggaccaagctgtccaagcacttggtagtccccaacgcacagacaggacagctggagcccctgctgtcccggttcactgaggaggaggagctacagatgaccaggatgctacagcggatggatgtcctggccaagttgctcccactctcccaccccctgcgcctctcagaaagccacagagatgggcgtgcggctgatggtggatgccgagcagacctacttccagccggccatcagccgcctgacgctggagatgcagcggaagttcaatgtggagaagccgctcatcttcaacacataccagtgctacctcaaggatgcctatgacaatgtgaccctggacgtggagctggctcgccgtgagggctggtgttttggggccaagctggtgcggggcgcatacctggcccaggagcgagcccgtgcggcagagatcggctatgaggaccccatcaaccccacgtacgaggccaccaacgccatgtaccacaggtgcctggactacgtgttggaggagctgaagcacaacgccaaggccaaggtgatggtggcctcccacaatgaggacacagtgcgcttcgcactgcgcaggatggaggagctgggcctgcatcctgctgaccaccaggtgtactttggacagctgctaggcatgtgtgaccagatcagcttcccgctgggccaggccggctaccccgtgtacaagtacgtgccctatggccccgtgatggaggtgctgccctacttgtcccgccgtgccctggagaacagcagcctcatgaagggcacccatcgggagcggcagttgctgtggctggagctcttgaggcggctccgaactggcaacctcttccatcgccctgcctagcacccgccagcacaccctcagcctccagcaccccccgcccccgcccaggccatcaccacagctgcagccaaccccatcctcacacagattcaccttttttcaccccacacttgcagagctgctggaggtgaggtcaggtgcctcccagccctgcccagagtatgggcactcaggtgtgggccgaacctgatacctgcctgggacagccactggaaacttttgggaactctcctcgaatgtgtgggcccaaggcccccacctctgtgacccccatgtccttggacctagaggattgtccaccttctgccaaggccagcccacacagcccgagccccttggggagcagtggccgggctggggaggcctgcctggtcaataaaccactgttcctgc

SEQ ID NO: 3098 - DNA, 2376 bp, Homo sapiens
aaaaaagacgcggccaaggcccgctccgtccacgcttcccgccggcccggcaaggggttccggagaacggcttgggggggcgagaaccatgggcgggggaaatggaagacagagggaactgaagcacgggggtcttcgatgagcagtgcggatgttcgactccaaacatcaaagccaacgagaggttcaggttactcctccttgaccccaaacatccagtgagtggagactggcctgttcacagagtaaaatatgtcgtctctaattcggcaaagacggtgatgactgtatatatgcaggccaattccgctctccaagagattctaactcagtcacagtttgaaccactactgaaccactgctgttaggaagctacaacccaaaagaaaagccccacagatgctgagagctggtgatcctcaggataaaacaaaggaaccagaaccacatccactgatcggatttgcctggggaggaggggtgctctctcctttgatcttctcttctggaagagatggaccaaaagcctctccagcaataatccgaaatgattcttgaagactatctttccagcttgtcacatatgcaaggtgtatttacaggagacagcaatggaaacctggtcagttgagcaggtctgcagttggttggtggagaaaaatttaggagagctagttcatagatttcaagaggaagaagtaagtggggccgctcttcttgcacttaatgatcggatggttcagcaactggtaaagaaaattgggcaccaggctgttctgatggatttaattaaaaaatacaagcagaacactcaaggactgaagtccccagaaaaccccaaaaaggcagccctggtcatgcaaacagaagcagctcgagattacagggatgaagagtcctccagtccagccaggcatggggagcagatgccatctttctatccagctgaaaaccttgataatggactaattgaccaaagagtattgaaacagagaagaaatgtgaaacaaattctagcaagaagcaaagcattacagtggacgaagtcctatgttttaccagagtttccctatgatgtcaaatgcatgttagcagagcagaagtgcccggatcacagcatgaggataaggatcattgagtttctccaggccgacatgactaagtatctggaaggctcactgtaccccagcacccagcagtacaatgacgtggttaatgccctgctgcaggcccaccctttcctggatgaggatggctgtggcttctttttatggaaacgagccctcaaagatcgctttaaatatgttcgaagacccatagaagatgatgagcaagtgattagaaataagtgtaaatttggacaccgaagaggccagacaaggaaatctcttgctgatataagatttgatgaaattaaacttgtccagataaaagaagaagctgtttgttttgattctgagctagatgaacatattaagtggttccagcaagaatacgtgaaaacagaaaaggactggagagaaattgacaagagaatgagccaaactttggaaataagaagaaagatgattggcagccgaacacctctgaaggacattcttaaactgtttcctttcttgaagtgcccttatcagatgttcagagaattccaacttcttacaagaacagatatttataagaaaacaaggcacattttggaatcctattcagaaaatatactgacttctttttcagtggtggacaatccaatcaatattgtattgcaagaaaaaatgaaacattacacagatgaagacatgttgaaatacatgaagatgacagccacatgtttactcctcccagatgtttttggggatgatcccagcctttttgtcatcatgaatgaacaggtgcaagtgtccacacctgtgttggaagttaaaaaccctttcaacatggaggtctgcgaattttctttatatttagaaagggagaggctcacaaaggtggacgactgtgttacagccttggctgcgctagtagctgcctttcatgtatttaggattgagtgtccaagaagactgtcccaaactttcaacttcctagaaacgctgattttcgatatgcacagtccttattttccttctttgaaagaaaaggaaaacgaagtaggatttcagcacccactcacttaatagcatgccaaatattgtactggaatttacctctgggaaaactgaagcttcataagaaattgttttgatttagggttgtggtagaggtaggtatgagaaagtcatcttgtatttatagatgctaatgaatttcaatgctttctatctttacacttagatattaagttctttgtgaaattctgtaataaaattctacttcatt

SEQ ID NO: 3099 - DNA, 3345 bp, Homo sapiens
gttagtctgtggtcagttacgtggtgaaaacacggctgtgccgcggccgcatctttccgcggccgaggcctctctgggtgggagtgttggcttcctttccggatcgctaaatggggaaagttctggccgctcggcgggatacgtctccaggccacggatggttcgttctccgtgccgcggccccgagctgggctccctgggtctccagcgcgggctcccggcattgggggctgcgggccggcccctccgccccgcccccgccccgccgcgcctcctcggccgagcggctcgcggtctccggcgcgggaggctccgagtctgcccactccgggccgagcgaggtctctggaggagaagagtggcgaggaggtgagggcacgccggcccccgcccggcgggtggcgccaggacttcaggtggcatggaatattcacatgggagagccgcatgaggccgcccaccacgcttcctgaaggatgcccgtgtggaagaattttgacgtgccagtgtcctcgttctacagggtgttccattcttccgcaatctcagaaaaatgggactaaaagaaactattttgtaaaataagaagacttccatttttaatgaccaacatgtattaagatggacacctactctacgaaacacgaagttctatggtctcgaagaagcccgtgcctgtttaaaactgatcctaactaaaaacagacttgagtggatatgagaatgttggttagtggcagaagagtcaaaaaatggcagttaattattcagttatttgctacttgttttttagcgagcctcatgtttttttgggaaccaatcgataatcacattgtgagccatatgaagtcatattcttacagacacctcataaatagctatgactttgtgaatgataccctgtctcttaagcacacctcagcggggcctcgctaccaatacttgattaaccacaaggaaaagtgtcaagctcaagacgtcctccttttactgtttgtaaaaactgctcctgaaaactatgatcgacgttccggaattagaaggacgtggggcaatgaaaattatgttcggtctcagctgaatgccaacatcaaaactctgtttgccttaggaactcctaatccactggagggagaagaactacaaagaaaactggcttgggaagatcaaaggtacaatgatataattcagcaagactttgttgattctttctacaatcttactctgaaattacttatgcagttcagttgggcaaatacctattgtccacatgccaaatttcttatgactgctgatgatgacatatttattcacatgccaaatctgattgagtaccttcaaagtttagaacaaattggtgttcaagacttttggattggtcgtgttcatcgtggtgcccctcccattagagataaaagcagcaaatactacgtgtcctatgaaatgtaccagtggccagcttaccctgactacacagccggagctgcctatgtaatctccggtgatgtagctgccaaagtctatgaggcatcacagacactaaattcaagtctttacatagacgatgtgttcatgggcctctgtgccaataaaatagggatagtaccgcaggaccatgtgtttttttctggagagggtaaaactccttatcatccctgcatctatgaaaaaatgatgacatctcatggacacttagaagatctccaggacctttggaagaatgctacagatcctaaagtaaaaaccatttccaaaggtttttttggtcaaatatactgcagattaatgaagataattctcctttgtaaaattagctatgtggacacatacccttgtagggctgcgtttatctaatagtacttgaatgttgtatgttttcactgtcactgagtcaaacctggatgaaaaaaacctttaaatgttcgtctataccctaagtaaaatgaggacgaaagacaaatattttgaaagcctagtccatcagaatgtttctttgattctagaagctgtttaatatcacttatctacttcattgcctaagttcatttcaaagaatttgtatttagaaaaggtttatattattagtgaaaacaaaactaaagggaagttcaagttctcatgtaatgccacatatatacttgaggtgtagagatgttattaagaagttttgatgttagaataattgcttttggaaaataccaaatgaacgtacagtacaacatttcaaggaaatgaatatattgttagaccaggtaagcaagtttatttttgttaaagagcacttggtggaggtagtaggggcagggaaaggtcagcataggagagaaagttcatgaatctggtaaaacagtctcttgttcttaagaggagatgtagaaaaatgtgtacaatgttattataaacagacaaatcacgtcttaccacatccatgtagctactggtgttagagtcattaaaatacctttttttgcatcttttttcaaagtttaatgtgaacttttagaaaagtgattaatgttgccctaatactttatatgtttttaatggatttttttttaagtattagaaaatgacacataacacgggcagctggttgctcatagggtccttctctagggagaaaccattgttaattcaaataagctgattttaatgacgttttcaactggtttttaaatattcaatattggtctgtgtttaagtttgttatttgaatgtaatttacatagaggaatataataatggagagacttcaaatggaaagacagaacattacaagcctaatgtctccataattttataaaatgaaatcttagtgtctaaatccttgtactgattactaaaattaacccactcctccccaacaaggtcttataaaccacagcactttgttccaagttcagagttttaaattgagagcattaaacatcaaagttataatatctaaaacaatttatttttcatcaataactgtcagaggtgatctttattttctaaatatttcaaacttgaaaacagagtaaaaaagtgatagaaaagttgccagtttggggttaaagcatttttaaagctgcatgttccttgtaatcaaagagatgtgtctgagatctaatagagtaagttacatttattttacaaagcaggataaaaatgtggctataatacacactacctcccttcactacagaaagaactaggtggtgtctactgctagggagattatatgaaggccaaaataatgacttcagcaagagtgactgaactcactctaaggcctttgactgcagaggcacctgttagggaaaatcagatgtctcatataataaggtgatgtcggaaacacgc

SEQ ID NO: 3100 - DNA, 3322 bp, Homo sapiens
gaatgatcaaacacccaatagaaatgccctgaccagcattactaatgtggagcccaaaaccgagccagcctgtgtctctcccattcagaattctgccccagtcagtgatctaaccaaaactgaacacccaaaaagctcattccggattcatcggatgagaaggatggggtcagcctctaggaaaggaagagtgttctgtaatgcatgtgggaagacattctatgacaaaggtactctcaaaattcattacaatgctgttcacctgaagatcaaacatcgatgcaccattgaaggttgcaacatggtctttagctccctccgaagtcgtaatcgccacagtgcaaaccccaatcctcgccttcacatgcctatgctaaggaataaccgagataaagatttaattcgggccacctcaggagctgccacccctgtcatagcaagtacaaaatcaaatctggcactcacaagccctggccgacccccaatgggttttaccactccccctctagaccctgtcttgcaaaatcctctccctagccagctagtactttctgggctaaagactgtacaaccagttcctccattttatagaagtttactcactccaggggaaatggtgagtcctccaacctccctcccaaccagtcccatcattccaaccagtggtaccatagagcagcaccccccgccaccctctgagccagtagtgccagcagtgatgatggccacccatgagcccagtgctgacctggcacccacgaaaaagcccaggaagtcaagcatgcctgtgaagattgagaaggaaattattgataccgccgatgagtttgatgatgaagatgatgaccccaatgatggtggagctgtggtcaatgacatgagccatgacaatcattgtcactcccaagaggagatgagcccaggcatgtctgtgaaggacttttctaagcataacaggacccggtgcatttcaaggactgaaataaggagggccgacagcatgacttctgaagaccaagaacctgagcgggactatgagaacgagtctgagtcttcggagcccaaactgggcgaggaatccatggaaggggatgagcacattcacagcgaagtgagtgaaaaagtcctgatgaatagtgagaggcctgatgagaaccacagtgagccctctcaccaggacgtcatcaaggtgaaggaagaatttacagaccccacttacgacatgttttacatgagccagtatggactgtacaatggtgggggtgccagcatggccgccttgcatgagagctttacatcgtctctgaattatggcagccctcaaaagttctccccagaaggtgacctatgttctagcccagaccccaaaatctgttatgtgtgcaagaagagtttcaaaagctcctacagtgtgaaacttcactacaggaacgttcacttgaaagagatgcacgtctgcacagtggctggttgcaatgctgcattcccctctcgccgaagccgagacagatactgggagaagagcaatgagcaaaacggtctccttgtatcatggggagagactctgtcaagcctaaagtgagcctcggatcttcctaatgacctcctgctggcccagctggatgcaagacaagctcgtttaagcctctgctgacctttcactcctccactacaagaactgcaccactcatttccaccgtcttcagaactgtgcaccaaatagaccacaaagcttcatggctgacgaatgatttccttttcatgatgcaaagagatttttacaaatttctattgatgagagttaacattaagtctcttgtggcattataacctctgttgcacaaatacaatgcttctatataactcttatttttaccttccttataaaggaacaatctactgttcttgccagcattatcttgaaaattcaggccaaaatatctgagcagaatgcacatactgagtgcaccggtggtatttttcatgaagagaccactttgaaagggtcttcctgatttccacctccctcagaatctatctgaccttctcacagactttattggtgtgaatctttcttatatttaaccatttatttgagatgctcatttttgtagcccatcttttctttttaaaaaacatgggctggtttctacccagaagagggtggtaagactgtacatgtacgttaacattcacttgtataactcagcaaaagattagaaagctgatcttattgtcacaagacacagtgccaacataaacctacatcgtaaactgttgaccaaagaactcgatgacatgggcctggactcgtcgcagccctcccttagcaaggacctccgcgatgaatttttggtgaagatatatggtgtccagcaccccatggggctcgatgtcagggaagacgcctcctctcccgcagggactgaagactcccacctgaacgggtatgggagaggcatggcagaggactacatggtccttgacttgagcaccacctccagcctccagtccagcagcagtatccattcctccagagaatccgacgcaggcagcgatgaggggattcttctcgatgacattgacggggcgagtgacagtggggagtcggcacacaaggccgaggcccctgccctccctggcagcctaggggctgaagtttcaggatctcttatgttcagcagcttgtctgggagcaatggtgggatcatgtgcaacatttgccacaaaatgtacagcaacaaggggaccctgagagtgcactacaaaactgtgcatttgagagaaatgcacaagtgcaaagtcccaggttgcaatatgatgttttcctctgtacgaagccgaaatcggcacagtcagaaccctaatctccacaaaaacattcccttcacttcagtagattagtctcagaatggacactacaaatgccagctctcaccagatggcctacgtgtttgaactgccatagtcagtgtgcgcttatgtacttggggtgtgtgtgtgtgtgtgtgtgtgtgtgtgtgtgtgcatttatgtatgctctgtggctacatatacacacacgtatttccttgagataaacaagataaacactaggtgcttttgaatttttttcacttccctttatagttttgggaaaggagtgggatctttgatttcagggtgaaaacagagtacccctttaaacacacacacacacacatgcacatacacacacacacacacacacacacacacagtgtgcaactagccccagttttgacagaataattcttggtcttccccaaagagacaatttgttgtacccatgactgttgcctgc

SEQ ID NO: 3101 - DNA, 2625 bp, Homo sapiens
ctgagcagacggtgagtagggcgggcacattctccaggcccttcttcctagctctgtggttgacctctcagcaagtgctatccaggctgggccaaccagacccacaattaactgagcctcagtgaaagcgtccagtgcatcttgacctgagacagcaaggaattgcatttggggttattccaacgatgatggcagggaactggtggtatttagtgctgaggggcagtgatacagaaagatttgccctgtgggacagggtcctgcgcgagtcccatccccaaaagccagcagctcctgccatgaggaagacggggtttctgagcaggcttatgcctgcaggttcctgtggagccaccggctgtgacgggacacctctgggtctcagcattgccctggggaggctgggacatttagggacatggtagggttttaacatttgtttcccaaatgtcaaatcccgggcacaggggcaagaccctgtcccgaattcccaccccagtgaatggtgtcgctgccaaagccaacacaagatgacaaaagtggctgggtacggtggctcacgcctataatcccagcactttgggagaccgagacaggtggatcacctgaggtcaggagttcgagaccaggctggccaacatggtgaaaccccatctctactaaaaatgcaaaaattagctgggtgtggtggcgcgcacctgtagtcccagctactcaggaggctgaggtagaagaatagctggaacccaggaggcagagattgcagtcagccgagattgcgccactgcactccagcctgggagacagagcaagactgactcaaaagaaaaaaaatgacagaagcctgattatcagactgcccggaggagacaggctccagcagatagatgccagccaggcccagctgccacgatttgtcccaggtgaccaaaggcacgcagctccagcatgaatcgttctaacccaacagtgacaagaactgctgggccttaaccgtcatggaagactggggccgcttccaagtcacagacaggagacggggacaggaaagaactcattccacccaatcggacacctaataattgagtgtctacagcagcaatcaagtgacaagtgaggccctacctgacccagaaggtgcctgccggctaaacattctgcccccaccagaaactccagggggtccgcccgttatgccgtggcccacccacgcccctttggatcaccagcagtcacagacaacaggcaggcgaaactgaagaccccaactcagccccagcggaccctccagatctcatcctgcctcatcctgagtcccaatcttccaagggtgccagcccctccgttcatctctgaaacccagcatccttttcagctgcttgaaaacattgtatttttttttttaacgatgcagtatttgtgcgttccagaaaagggcccagctctgagcccctcacccttccacactcacgaactctcagccgaggaaggcaagaagcgcagggggtggcccgcgtggcgtcggtggcctccgctcctgctcgcagcccctgtggtcagagctggatacaagattcaagacccttctcttgcttgtcacccgctccaggttggagccacagacacccaccgccatcccggctgggtctgcgtcctttcctgtgcctttccctccagaatgcggcctcagacctagaagctcaacccccctatgagggccacgtcctggggtagctcctgacctccgaccttatgtccaaatttcacacccatggtttttcatttgacccgcccccttctcgctcataatgacacccagctcctttgagaggatcagagcccattgcacaagaagagccgctgccaaccatccttgtcctccgattgcaaaatgacaccccagtaatctagaacattctcaagcccctttaactcagatgtcaagccaccgggcaaaccccgtcaatacctcccaccaaggaatgagatatgtggacctcactgctcccccaacccagcgtcaggctgggacacgccaacgctgttccgggttggaacagcagaggctcagaaactggctctgaaataggcagacctagcaagaggaagatacagggtatcgggcgtttgagtgtttcagaagtcattcgggaagataaatccagtgcgctggccgcagccacctgcattcaaagcttggaccagcgggttcttgttcgggaggcaaatttccctaggaaaaagaagacagacttttctaatgtggtccaaatgcggatcactggtcagatggactctagaagcactgagctccctgtctctggaagtatttaagaaaaggctgggccaggcacgatggctcacgcctgtaatcccagactttgggaggccgaggcaggcggatcacctgaggtgaggagtttgagaacagcctggccaacatggtgaaacctcatctctactaaaaatacaaaaattagccaggcgtggtggcaggtgcctgtaatcccagctacttgggaggctgaggcatgagaatcacttaaacctgagaggcagaggttacagtgagccaagatcgtgccactgcattccagcctgggcgacagagcaagactctgtctc

SEQ ID NO: 3102 - DNA, 2692 bp, Homo sapiens
tttttaacagatttctaaaaaatactgaaaatggcaacagccttgcaaggacagtttagcctctaaaagcagttcctttgaagagaaaatactcaattagatgtatacattctgttctgtttaaaactcagttttgtatttttctcattatacttaatgtaaaatgtatcctgttaacagtgaatactttaattggtttgggaatttgtttttattgagaatatatagtgataataactgtgaacacagtgttcaccaggggtttttagcatttaatgtgatgattattcagatttctctacttgaattttttaatgaatgaagatttttcaaagttaattattcatataattcctgattaataattgacagatcctaatttggggccacatgtaaaatatatgaaagctcacataacgtggcaattttttactctgagagactgcagcagttcccatctccccttaacctattgccaccaacaccactgatttgttttccagcgatggcaagccggcaggtggatattgcaactcagggctggttcattggtctgatgtgtgctgttgctctccttatcttaattttgctgattgtttgcttcatcagaagaaacaagggtggtaaatatccagttaaagaaaaggaagatgcccatgctgaccctgaaatccagcctatgaaggaagatgatgggacatttggagaatacagtgatgcagaagaccacaagcctttgaaaaaaggaagtcgaactccttcagacaggactgtgaaaaaagaagatagtgacgacagcctagttgactatggagaaggggttaatggccagttcaatgaggatggctcctttattggacaatacagtggtaagaaagagaaagagccggctgaaggaaacgaaagctcagaggcaccttctcctgtcaacgccatgaattcctttgtttaatttttaagctctttgccaatattccatttctctagaatgtttatcctaagcacttgtttgtcagccctctcatactatgaacatatgggtagagagtatattttctgctgtatgttagtattatgagaatagttacagcaaaaacataactcagtcaaatgatatgttaatatgaactggaatgcaaagtgcatactttttcattcaaaatgggtattcttgatttcctcagaactgataaaaaataatgcaacatcaccaacagatcctgttatttcctctgcaggatacagttcaatatgatgcatgaaaaatgctccacatttaaaggacatacccgtgtatgttatgaaaacatggtttgatactttgtttatactaccctcagctgaacccctatatatgaattccgttttcattgtcaagagtgttactgtagtattctctagaacttcaatgtctttgtggacattgttgtgaaattggtgactatgtatagctgtcgttagtctttttgggagactgttaggaacagtttgtacagtatatacttgctaaatgagttcattatgacagtcacattgctgatgcttactgagaactattacctactcttggctcctgttactccgtaggcttcttaatcttccaggcattacagcagcacagtgttctactttttacatcatttctatgttcggttgtttttaggcataaacaatgtgtattgcagtgcatttcggcatttgtgccatactgaaagaatcaaaaacaaatcatccaaattaaatttcaaacattatttcagagaacacagggcaagacacatacagtgccttcagatattaagcattccacaacatcgtgcattctgtatcagctggtccagtccattctgggtcctagattactgtcattgtctaaaagtaacttttaaaaagcagagttcatgaaaactgcaatgctgggaaaagaaggaaacatgaaaataaaaataagacagtttattagaaatagcatttcctcataagcataaaaagaaaatctttgttgccaactgaagcacatgatgattttgtggtcctttatggtttctattacatgcagtaagaaagatgtcaacatgctagaaaattaattttaaaactaagttattccaacactaaaagcatacaacagcatgccaacagtaatatattattctccaagactttacctatgtaagtgttcaaaactctgcagcattaaacaacgtgtatgcaaattgttatggatacatttcagaatctaagaaatcaggcaagtgcttaaaaggccaacggtccaagggattacatctgcagtttaaaaagtaaatatatattctatcgtattcatttttcacagatccacctgtctcttgaaaatataaaaagacaaaacaggtttgccttggcatcagagagcacaaagattaaaagttactttaaatttgccaatattttgggagaacaataaaactacattttttcctcttccatactggtagatgcgaaatttatctgtgcatgaaagggtcacttctgtaatagtgcaacagatttggtattaaaaattaaatgtggttttaaaagttcctctctcttttgtaatttatgttcccaattgagtgtgaatgtccaagtaatggtgtatgtaatggtacaggcaaatgtgactggatttccctcaaaaaagtaactattaaacagtcttgatctc

SEQ ID NO: 3103 - DNA, 1906 bp, Homo sapiens
cagaagagcgggaagaggcggacagcgaggccaagatttcagctgcgggacggtcaggggagacctccaggcgcagggaaggacgtgaggaggggaagcgggctggggcggcagccgggcggaggggcagctgcgcaggcggaatgaggaacgcctttgctctaaggcgaccaccctggcagctcttcactgaggggcctcggtttccacatctgtcgctctccggtcccaagaccaccaggaccgacggggctctccgggagggtcagcccctccggtggccccagtcatgcatcaggggacggatcagaagggctaggaagaggggtcgtggggaaggccccagaaaaaagaggaaggagggaagattttgcctgaagcgggaaagccaagggctgggcggcgcgagacccccattcctagcgactggggctggctggtggcccgcggcagcccccgcgccgggaggattaggcctcccgccgctcccacccgtccggaccctcccacgtgtttaggtcctcccaaaagtattcggcctccggcccctgccccttcccccggctggcctggacctcggggacgtggggggaaccccgtgggagcagggggattctggacggggagggagtagcggttggggagaaggctgagcggggaaaggagagaggggctccggggacggcagggaggagagtgggtcgtgccggagacccagggagagacacaatgggcaagattaggggtgtagggtgggagtgcgaactgactgattcctagcgtgggcagggaactttgctaaaactgcaggccccagggaacagcgcgggcagggtgggagggaacggagagggccaggcggaccctaaggtcaatttggagaaagggccatttccaggctccttcacctgtgcccagcgttctacaggcctggaccccgcccccgctccccaccctccccccagagcagggcgcgggaggaggcggctcgggctggctcggagagctgaggggcgcacacccgcttcgcagggccagggtgacacggaagcatgcgacggctgctgatccctctggccctgtggctgggtgcggtgggcgtgggcgtcgccgagctcacggaagcccagcgccggggcctgcaggtggccctggaggaatttcacaagcacccgcccgtgcagtgggccttccaggagaccagtgtggagagcgccgtggacacggtgagtagcatggcccgggcaggagcggggagggtcgtaccccaggagaccagcgcattcccacgaagggggacagaagtgcttgggctctgagccccagccctttggagaaaaggccactgtccagcctgctggaatgtgactgcgtgagggaggtgcggatcacaccagggcttgctctgcaccctcagctggctaccggccatcctctgcctgcctgtctgtccgcagccctttcccagctggaatatttgtgaggctggaatttaagctgcagcagacaagctgccggaagagggactgggagaaacccgagtgcaaagtcaggcccaatgggaggaaacggaaatgcctggcctgcatcaaactgggctctgaggacaaagttctgggccggttggtccactgccccatagagacccaagttctgcgggaggctgaggagcaccaggagacccagtgcctcagggtgcagcgggctggtgaggacccccacagcttctacttccctggacagttcgccttctccaaggccctgccccgcagctaagccagcactgagatgcgtggtgcctccaggaccgctgcgggggtaaccagtggaagaccccagcccccagggagaggaacccgttctatccccagccatgataataaagctgctctcccagctgcctctc

SEQ ID NO: 3104 - DNA, 2400 bp, Homo sapiens
aatgtctgttgaactgaatgagtgagggtcatgttgctctctcgcttaaaaaccttccatggctccctattgccttcaacatgcctcctctgggcagcttggcgttcctgcctcatcttccactgccaccacccatcccacacacctcctcctgtagctgcgctgggtcggctccccgtcggctgagctctcgagtcctttctcatcatggtgctctgctcatatcatcccccttgctgcctcctccgtgttaccaagactcagttcaggcatgaagtctccgtgggctctgagggttcggggctcttccggggtagaatttgtcgttcccacctctgttttccatggcactttgtacagactcctgtacaaagacctctgtacatgtgtcacgctgttttgtgatcatgtgtttctgtgtctgtctccctcagtagactgtgagctcctcgagggcaggaaccgtgtcttactcatctctgtattcccagcgcctagcacagtgcctggcacagagtacgttgttcataaatgtgtgttgagtgcatgacggggtggggggagatgaggaggagttgctgggactgggaacattcgtgcctaggacagtgcctcgcattatgtaggttctcagtaagcgtgaatggtgtgtctgtgtgagtggggggccacgaggcatgcgcatgtccagcaaagggctcactacccctgcccccccagccctacctacaagtggaagcggcaggtgactcagcggaaccctgtgggacagaaaaagcgcaagatgtccctgttgtttgaccacctggagcccatggagctggcggagcatctcacctacttggagtatcgctccttctgcaagatcctgtttcaggactatcacagtttcgtgactcatggctgcactgtggacaaccccgtcctggagcggttcatctccctcttcaacagcgtctcacagtgggtgcagctcatgatcctcagcaaacccacagccccgcagcgggccctggtcatcacacactttgtccacgtggcggagaagctgctacagctgcagaacttcaacacgctgatggcagtggtcgggggcctgagccacagctccatctcccgcctcaaggagacccacagccacgttagccctgagaccatcaagctctgggagggtctcacggaactagtgacggcgacaggcaactatggcaactaccggcgtcggctggcagcctgtgtgggcttccgcttcccgatcctgggtgtgcacctcaaggacctggtggccctgcagctggcactgcctgactggctggacccagcccggacccggctcaacggggccaagatgaagcagctctttagcatcctggaggagctggccatggtgaccagcctgcggccaccagtacaggccaaccccgacctgctgagcctgctcacggtgtctctggatcagtatcagacggaggatgagctgtaccagctgtccctgcagcgggagccgcgctccaagtcctcgccaaccagccccacgagttgcaccccaccaccccggcccccggtactggaggagtggacctcggctgccaaacccaagctggatcaggccctcgtggtggagcacatcgagaagatggtggagtctgtgttccggaactttgacgtcgatggggatggccacatctcacaggaagaattccagatcatccgtgggaacttcccttacctcggcgcctttggggacctcgaccagaaccaggatggctgcatcagcagggaggagatggtttcctatttcctgcgctccagctctgtgttgggggggcgcatgggcttcgtacacaacttccaggagagcaactcttgcgccccgtcgcctgccgccactgcaaagccctgatcctgggcatctacaagcagggcctcaaatgccgagcctgtggagtgaactgccacaagcagtgcaaggatcgcctgtcagttgagtgtcggcgcagggcccagagtgtgagcctggaggggtctgcaccctcaccctcacccatgcacagccaccatcaccgcgccttcagcttctctctgccccgccctggcaggcgaggctccaggcctccagcagagatccgtgaggaggaggtacagacggtggaggatggggtgtttgacatccacttgtaatagatgctgtggttggatcaaggactcattcctgccttggagaaaatacttcaaccagagcagggagcctgggggtgtcggggcaggaggctggggatgggggtgggatatgagggtggcatgcagctgagggcagggccagggctggtgtccctaaggttgtacagactcttgtgaatatttgtattttccagatggaataaaaaggcccgtgtaatt

SEQ ID NO: 3105 - DNA, 2758 bp, Homo sapiens
tagtttggttcttgggggctagacaagtttcttccccggtggggcggctgaacactcttcccaagtacctgctttgggtccaagtttcctacctatgtctctagtctgtagggatttcttgatttctaactcactattttcaccaatcctggggaaaatatgtatcgacctaaggttaaattccacctggcccaggagcctcctttggaaaccaggaagccgggaatctcgttgcaaaggaatcctgggcctcagaggagtcgttgcctctgcctcatagcataccccgacactgtctctgttttgggatgcagggttctgtttctgtctttttgagaagttcctggtttaattcactctcccatgataaactgttgtgtctggtatgtgttacgcagctgcctttcagttagctcttgcccgggagtgcatcaagatgagagtgacccagtgaaaccagaaactgtcattgagtagcaggatgggaaagcaatgtctagggaccaggatccctttgtcagtttttcctttttcctctcctccggcccctcccaggccttctctgagggagaagaggaagggctatgcaaatgagcacccttttcttatataggggcctatcccagtccccccagtgcctttggttgctggagggaagaacacaatggatctggtgctaaaaagatgccttcttcatttggctgtgataggtgctttgctggctgtgggggctacaaaagtacccagaaaccaggactggcttggtgtctcaaggcaactcagaaccaaagcctggaacaggcagctgtatccagagtggacagaagcccagagacttgactgctggagaggtggtcaagtgtccctcaaggtcagtaatgatgggcctacactgattggtgcaaatgcctccttctctattgccttgaacttccctggaagccaaaaggtattgccagatgggcaggttatctgggtcaacaataccatcatcaatgggagccaggtgtggggaggacagccagtgtatccccaggaaactgacgatgcctgcatcttccctgatggtggaccttgcccatctggctcttggtctcagaagagaagctttgtttatgtctggaagacctggggccaatactggcaagttctagggggcccagtgtctgggctgagcattgggacaggcagggcaatgctgggcacacacaccatggaagtgactgtctaccatcgccggggatcccggagctatgtgcctcttgctcattccagctcagccttcaccattactgaccaggtgcctttctccgtgagcgtgtcccagttgcgggccttggatggagggaacaagcacttcctgagaaatcagcctctgacctttgccctccagctccatgaccctagtggctatctggctgaagctgacctctcctacacctgggactttggagacagtagtggaaccctgatctctcgggcacttgtggtcactcatacttacctggagcctggcccagtcactgcccaggtggtcctgcaggctgccattcctctcacctcctgtggctcctccccagttccaggcaccacagatgggcacaggccaactgcagaggcccctaacaccacagctggccaagtgcctactacagaagttgtgggtactacacctggtcaggcgccaactgcagagccctctggaaccacatctgtgcaggtgccaaccactgaagtcataagcactgcacctgtgcagatgccaactgcagagagcacaggtatgacacctgagaaggtgccagtttcagaggtcatgggtaccacactggcagagatgtcaactccagaggctacaggtatgacacccgcagaggtatcaattgtggtgctttctggaaccacagctgcacaggtaacaactacagagtgggtggagaccacagctagagagctacctatccctgagcctgaaggtccagatgccagctcaatcatgtctacggaaagtattacaggttccctgggccccctgctggatggtacagccaccttaaggctggtgaagagacaagtccccctggattgtgttctgtatcgatatggttccttttccgtcaccctggacattgtccagggtattgaaagtgccgagatcctgcaggctgtgccgtccggtgagggggatgcatttgagctgactgtgtcctgccaaggcgggctgcccaaggaagcctgcatggagatctcatcgccagggtgccagccccctgcccagcggctgtgccagcctgtgctacccagcccagcctgccagctggttctgcaccagatactgaagggtggctcggggacatactgcctcaatgtgtctctggctgataccaacagcctggcagtggtcagcacccagcttatcatgcctggtcaagaagcaggccttgggcaggttccgctgatcgtgggcatcttgctggtgttgatggctgtggtccttgcatctctgatatataggcgcagacttatgaagcaagacttctccgtaccccagttgccacatagcagcagtcactggctgcgtctaccccgcatcttctgctcttgtcccattggtgagaatagccccctcctcagtgggcagcaggtctgagtactctcatatgatgctgtgattttcctggagttgacagaaacacctatatttcccccagtcttccctgggagactactattaactgaaataaatactcagagcctg

SEQ ID NO: 3106 - DNA, 2982 bp, Homo sapiens
gttgctaatggtgtcatgcacccaccggccacccttggcgcgagcgcccccctctggacaccctgctccgtgcgcgctcacagttcgcctgtgcggggccggggccagggtcaggagccggggatagggaggaagagggcctgtggacaagctgagccgggacccctgggacctttgcggaggtggcctgggagcgctcagttcccaggctgaggcttcccgctgacgcctcctggccgcagcgggctccccccgccccaggaatgttcctctcccatccagtccgcctcccctagggcaggccccctgggggctgccgcagccccgcctcgccttcctgggctcccgggagggggcgaggcgagcaggacgcctgggttctctccccccacctcccataccagggagaaattcctccgaggtcccctcaggctctgggttcccaaaataaccctgcgggggaagggaggctgtggagggagggaagcgggaggggcgcagagccgagctgcggggtgctgcaggtgcctctggggagagggcgcgaggagaaggcgccctgcggggggctgggcgccagccagtcctgggatcttggttcgtccccatcctcgtgaagcccctcggccttcccgcgactccgagggtgggccggaagcctctctgcgggtccgtttcccaactggcgggttgcaccatcccgggccagaccgtttaaccccgggagtggccgcgggggacaactccgcccctgtccagcagggggcgtgcccgccccgccccgtttctgcccgcggggccgctcccccgcccgcgactccgcagactcccgctctgcctctcccgggacaggggttcggtccgagcccggtgggaggctcccggagcgcagcctgggcccagcccaccccgcgccggcggccatggcaggcaccctggacctggacaagggctgcacggtggaggagctgctccgcgggtgcatcgaagccttcgatgactccgggaaggtgcgggacccgcagctggtgcgcatgttcctcatgatgcacccctggtacatcccctcctctcagctggcggccaagctgctccacatctaccaacaatcccggaaggacaactccaattccctgcaggtgaaaacgtgccacctggtcaggtactggatctccgccttcccagcggagtttgacttgaacccggagttggctgagcagatcaaggagctgaaggctctgctagaccaagaagggaaccgacggcacagcagcctaatcgacatagacagcgtccctacctacaagtggaagcggcaggtgactcagcggaaccctgtgggacagaaaaagcgcaagatgtccctgttgtttgaccacctggagcccatggagctggcggagcatctcacctacttggagtatcgctccttctgcaagatcctgtttcaggactatcacagtttcgtgactcatggctgcactgtggacaaccccgtcctggagcggttcatctccctcttcaacagcgtctcacagtgggtgcagctcatgatcctcagcaaacccacagccccgcagcgggccctggtcatcacacactttgtccacgtggcggagaagctgctacagctgcagaacttcaacacgctgatggcagtggtcgggggcctgagccacagctccatctcccgcctcaaggagacccacagccacgttagccctgagaccatcaagctctgggagggtctcacggaactagtgacggcgacaggcaactatggcaactaccggcgtcggctggcagcctgtgtgggcttccgcttcccgatcctgggtgtgcacctcaaggacctggtggccctgcagctggcactgcctgactggctggacccagcccggacccggctcaacggggccaagatgaagcagctctttagcatcctggaggagctggccatggtgaccagcctgcggccaccagtacaggccaaccccgacctgctgagcctgctcacggtgtctctggatcagtatcagacggaggatgagctgtaccagctgtccctgcagcgggagccgcgctccaagtcctcgccaaccagccccacgagttgcaccccaccaccccggcccccggtactggaggagtggacctcggctgccaaacccaagctggatcaggccctcgtggtggagcacatcgagaagatggtggagtctgtgttccggaactttgacgtcgatggggatggccacatctcacaggaagaattccagatcatccgtgggaacttcccttacctcagcgcctttggggacctcgaccagaaccaggatggctgcatcagcagggaggagatggtttcctatttcctgcgctccagctctgtgttgggggggcgcatgggcttcgtacacaacttccaggagagcaactccttgcgccccgtcgcctgccgccactgcaaagccctgatcctgggcatctacaagcagggcctcaaatgccgagcctgtggagtgaactgccacaagcagtgcaaggatcgcctgtcagttgagtgtcggcgcagggcccagagtgtgagcctggaggggtctgcaccctcaccctcacccatgcacagccaccatcaccgcgccttcagcttctctctgccccgccctggcaggcgaggctccaggcctccagcagagatccgtgaggaggaggtacagacggtggaggatggggtgtttgacatccacttgtaatagatgctgtggttggatcaaggactcattcctgccttggagaaaatacttcaaccagagcagggagcctgggggtgtcggggcaggaggctggggatgggggtgggatatgagggtggcatgcagctgagggcagggccagggctggtgtccctaaggttgtacagactcttgtgaatatttgtattttccagatggaataaaaaggcccgtgtaattaaccttc

SEQ ID NO: 3107 - DNA, 2793 bp, Homo sapiens
tccatggcgctgtgcgaggccgcgggctgcgggagtgccctgctctggcctcgcttgttgctcttcggggactccatcacccagaaaatgtgatgttctgaatcgtggattttcaggttacaataccaggtgggccaaaattatccttccaagattaatcaggaaaggaaacagtttggacatcccagtagcagttacaattttctttggggccattgacagtgcactaaaagatgagaatcccaagcagcacattcccctggaggagtacgctgcgaacctaaagagcatggtgcagtacctgaagtccgtggacatccctgagaatcgagtcattctcatcacgccgaccccactttgtgaaacagcctgggaagaacagtgcatcatacaaggttgcaaactaaatcgcctgaactctgttgttggtgaatatgccaatgcgtgtttacaagtggcccaagactgtgggactgacgtacttgacctgtggaccctgatgcaggacagccaggtacggtggcttgctcggtcctctcggggtaaataggatcacacagaagtaaaccaggtgtgtgtgcagcagctttccctagaaaggccctgcttagctaagacagtcatccctttagccaatgaaaacaaacaggcttgggggaggggaggaatggaggttccaggatggctcacaagcccatcagcttaattcagccaggctccttggctaggagttagtgcgcagtgacatcaatgagcaacacatggctcatatttatgaacgtccaggccaagttcttctttcatacagagaatggcagaaagctaaaacttgttaataggtaaaacaatgaatttaaatacagtattggctaataaaactgtttgagatatgtagttctaattaagttactttgttttaaagcctgaaagcacaaatataaaaggtaaaaagcaggtcccatggaatggtgcactgactcaggagacagctggtttctgacgcagtcacacatacacttagggaggacctggcagtccactcctgggttatctgccctagagaaatgaaaactatgttcacacagaacctgggtgtaactgttgacagcagcattattcctacctgctggaaacacgccagtgtccttctgtgatgaatagggaaactggtgtgtccgtggaatgggatactactcggcaataaagaggaggaactgacaagcgcagcaacgtgggtgactctcgaggcgcttcactgagggaaggaagctggtctctgaaggttacttactacatgagtccatctgttttggtgtctcaaaaaggcaagacttgggctgggtgtggtggctcacacctgtaatcccatcactttgggaggccaaggcaggtggatcacttgagttcaggagttcaagaccagcctggccaacatggcgaaaccctgtctctactaaaaatacaaaaattagctgggcatggtggagcgcacctgtaatcccagctacccaggaggctgaggtgtgagaatcgcttgaacccgggaggcagaggtcacaccactgcactccggtctggaggatacagggagactgtctcaccctccccagcccaccccccaaaaaaaggcaagactgcagtaacagaacaggtccatggtggccagaggttagggcaaggaaaggtatggctaaattcaggttccacacagatactggtgaagaggggcagacaggcactggtcttttttaatttttctgtgaccttgtgctactcttttgtaaagagcttgttcagtagggcacattaaaggctatttcattgctatgctgggatccagagagaaagcttggacgggactgatgatatttgaagtactcaagggaaggaaggatccagtgtgcgggaagctctttggacaaacgggaagactcacagcctcaccggtttcctctattcctagctgttaggtttaggctacttggacaaagcaacatagaaaacagccaagaaactaacccaagtgccaactttttcctctcccctaaatattaatccataccaatcgttccaatgacctacacatttattatccatctgtaatagggaaaatggtcaccagtgggaaagtcatactaccacgtggatgccgagtcaccagtcacctttggaggccctgagagcctaagcagatctggagcctaggcctctagtcttcctctgaaaccctggagtactggaaccttccagaattccagattaggaggggccttggcagcttgagtgccaaaagggtcgacatctagagttctgttgtctaggaaaggaaactgcaaactattgggctagttttgctcacatgtctttttcaatttaatacaaaactgagagggtcgtccttagagatcatctcatctcaaactgcctagatgagaaaaccaaggccgaagaagaagtgctactattatatgatagcatctaaatttctggtctattaaaagtcacataaggccgggcgcggtggctcatgcctatcatcccaatatttcgggaggctgaggcaggtggatcacctgaggtcaggagttcgagaccagcctggccaacatgttgaaaccccatctctacttaaaaatgcaaaaattagccaggcgtggtggcggtcacctgtggtcccagctacttgggaggctgaggcaggagaatcacctgaacccgggaggcagaggttgaattaggccgagactgtgccatcgttctctagcctgggcaacaagagtgagactctagctc

SEQ ID NO: 3108 - DNA, 2077 bp, Homo sapiens
aaaaatctttttctttcctggctgatgatttgtcattctagtcacttcctgccttgtgaccacacacccaggcttgacaaagctgttctgcagatcagaaagaaggggttcctggtcatacaccagtactaccaaggacagcttttttcctgcaagatctgttacctaaagcaataaaaaatggccagaggatcagtgtccgatgaggaaatgatggagctcagagaagcttttgccaaagttggtgagtagacctggtaccccaaattgcatcattctcttcttcactgagtagcttcagggtagattcaatgaaatgggaacatgagcaaaatttcagagatgacaagaaaccagtagtatttgtttagaggagctgggagaacttatttttgaaaaatatgcttcaataaaatgactttctctatcaaaacatggaatatggactctactcttacatagtttgttcctggaaatggtttgtaagtctcatcttttatatcttgtcttctgttttgctgtttccttgattttaataccatcacatactttctcttactctttatcactaaacctgtggtttccttaagagtttctataagagttctttgtggaaacagaggtaccttatagaaattatgactcttttactgtggatgttgaaagtaatgctggtgcccctattcagtagcaacagtcatcttgtgagattctgactcttccctgggatcatgccttaatgtctgaatgatagcctctctcgtcccttcaccttccatctagtcttccctcacctctctaaaagctgttgcctgaatcgtcctgaagcttcagtatattgtgtacattacagatactgatggcaatggatacatcagcttcaatgagttgaatgacttgttcaaggctgcttgcttgcctttgcctgggtatagagtacgagaaattacagaaaacctgatggctacaggtgatctggaccaagatggaaggatcagctttgatgagtttatcaaggtgagtaccatgcagaatacaaggagacacatttgaaacttggaacttgaattctgttttaaaaaatatccagaaagacattccttacctccttgcttcgacattacatattctttcctttgtgattttcttgatcactgcttgagtttctaaagatacattatatttttgcagattttccatggcctaaaaagcacagatgttgccaagacctttagaaaagcaatcaataagaaggaagggatttgtgcaatcggtggtacttcagagcagtctagcgttggcacccaacactcctattcaggtaggctcaactcctgggttggagcaggatttcaggattacagattctaaacttggtattcaaacctaagggatgtaaacaaagacagaagcaaacacagctttatggatgactcccaattttcctgtgactaagtgggtcagttctgggtacataatataggagcagtcctagctctgggtagggtccaatacaaaatgatttgatcagcatttaaacaatcattaaaggctgcccagattcctttctaaatcttatggacaaaattagctactcaagcttctatctttaaacttcatgataatttttaacacctgctaagtgatcaaaaaattatgttttcattgatttggaataaatttgtaaatttattccgaaggctgccatccaacagccataatggaaacttccaacaggccaaacagtatagttgttgcaacatttccaaaactgaattattcaaaacgttagttgatcttaaagataaactcatgaggccgggcacagtggctcacgcgtgtaatcccagcactttgggaggccaaggcgggtggatcacctgaggtcaggagttaaagactagcctgggcaacatggtgaaaccccgttctactgggtgcagtggcgcatgcctgtaatctcatcgactcgggaagctgagacgggagaatcgcttgagcccaggaggcagaggttgcagtgagccgagattgcaccattgcactccagcctggcgacagaacaagactctgtctc

SEQ ID NO: 3109 - DNA, 2239 bp, Homo sapiens
acttcattaaatctagaggcagttgagcatgggagccgtctgtatgttgaattagggctcgcactcttgcgcaacacgtcaccagtcggaaactgggggtttgcttctgtgatttatttcattattgtgctggtaaaaggtttggaagggaattctttttgggggtagtactttagcattgtgtagcaagttttggggttttttttgtatgtgaccccccagcccccagcgctgagtttgagtcagttgagccagtttagtaaataattttttaaaataaaagaacagtttaaaatctccatgaataattttacttacatgcaggagtaatcttactctactctttatgtgcgaaaagcattgggaagtgtttagtgaattgatttccattagaaaaagacccttagaaatcacagaacataaagcactgcatatggatgtgtttggggtctttggggaggagggaagatgttttgtagctctctgcattcctgcataaaaccttagtttgaggggaataatgctgatgaagagactagcagctcgctgctttgctggcttgttaattttatccccactaactgtgatttctgatagccggcctgctgatagtggtaaggccatcgaagacggcgatttggaggaaatggaagaggaagtacggcttaagaagcgaaaaagacgaagaaatgtggataaagatcctgcaaaagaagatgtggaaaaagctaagaagagaagaggccgccctcccgctgagaaactgtcaccaaatccccccaaactgacaaagcagatgaacgctatcatcgatactgtgataaactacaaagatagttcagggcgacagctcagtgaagtcttcattcagttaccttcaaggaaagaattaccagaatactatgaattaattaggaagccagtggatttcaaaaaaataaaggaaaggattcgtaatcataagtaccggagcctaggcgacctggagaaggatgtcatgcttctctgtcacaacgctcagacgttcaacctggagggatcccagatctatgaagactccatcgtcttacagtcagtgtttaagagtgcccggcagaaaattgccaaagaggaagagagtgaggatgaaagcaatgaagaggaggaagagaaagatgaagaagagtcagagtccgaggcaaaatcagtcaaggtgaaaattaagctcaataaaaaagatgagaaaggccgggacaaagggaaaggcaagaaaaggccaaatcgaggaaaagccaaacctgtagtgagcgattttgacagcgatgaggagcaggatgaacgtgaacagtcagaaggaagtgggacggatgatgagtgatcagtatggacctttttccttggtagaactgaattccttcctcccctgtctcatttctacccagtgagttcatttgtcatataggcactgggttgtttctatatcatcatcgtctataaactagctttaggatagtgccagacaaacatatgatatcatggtgtaaaaaacacacacatacacaaatatttgtaacatattgtgaccaaatgggcctcaaagattcagattgaaacaaacaaaaagcttttgatggaaaatatgtgggtggatagtatatttctatgggtgggtctaatttggtaacggtttgattgtgcctggttttatcacctgttcagatgagaagatttttgtcttttgtagcactgataaccaggagaagccattaaaagccactggttattttatttttcatcaggcaattttcgaggtttttatttgttcggtattgtttttttacactgtggtacatataagcaactttaataggtgataaatgtacagtagttagatttcacctgcatatacatttttccattttatgctctatgatctgaacaaaagctttttgaattgtataagatttatgtctactgtaaacattgcttaatttttttgctcttgatttaaaaaaaagttttgttgaaagcgctattgaatattgcaatctatatagtgtattggatggcttcttttgtcaccctgatctcctatgttaccaatgtgtatcgtctccttctccctaaagtgtacttaatctttgctttctttgcacaatgtctttggttgcaagtcataagcctgaggcaaataaaattccagtaatttcgaagaatgtggtgttggtgctttcctaataaagaaataatttagcttgac

SEQ ID NO: 3110 - DNA, 2433 bp, Homo sapiens
aaatgcattaaccaattacaggtatccaagatgcaaagaaacatgatggaaaatagtctttgggaaaattaatctggcagcaggggtgttcaggggcctgtcttggctccaccaggggcagcccatggaaactactatgatcttgtttcacccccagtgattacatggggagggaggtgctcccaattctgatggaggagaattggagattggaatttagattgaattcagtatctctctctgtctctctctctctctctctcccattaacacttacaacgactgtgattgtatgaccttagaactcagtcattctggtatgaaattgtgtgatggagaatgaatttgctgggaagttgattttggtctcacttcagcatcttctcattatttatgcacatgaaacctttcatgtgcgacacttattctattctcaagtgctaaatgaaacatttaagacaggagtggaaactgttcactttctcatatgaaagcaagattcagtgattctgtaaggaggtagtcactggtattgtgttaggtattaaggggcatatgtgcttaaacagagaaatatgtctaaaatatttaaattctaatataaaaaagaaagtgactgtattatttagggctgcattttagttgtaagaaaaaagtccaactcaagcaaaaatggcccacacaatggaacagtcccaggacccaccggcttcaggggctgctccagcaatggcgcccggactccctcttgctccgcgtgccttcccatgcactggcttcgtgcttcagcggggtctctgctgatggtgccattgatgactgacctccatgagcttgctttaccccctgccagcttaagaacagtagtgaaagagaacatgtgtgtcctcccatttccagtaaaaacttcaggcaggagcctcactggctcagcttggtcccgtttccatctcccatgccatctccggccaggtgacaggctaccatgtcactgcctagggaagtttaggaagagagtggcaaagtggtgcattagaaagaacatggccaggtcaccccacctcctgggcggcaggcccaactccaccagtggtccactgtgtgacttccctgctccctctaagcaagtcactcctctcctctgggtctctgtttccttacctataaaatgagaacgtttcttcatgtgatctcaagtcccttttaaaatcgctaggattctttgaaaaccttttctatcatctagtgcagagaacttgttgaggaagttgggattggaatgagcctcagcagatgggcaaggtttgaataggaagagaagagacatttcaggagaaagaaacaacatagagagacagatgtaggtataagatatggtaataagccaaaatgtattaagagttataaatgcatgaaatcatcatcaaagcttgcttagtgattaactgcttatattttgccagtgcatatgatgtgacatttttctttaactcaaacactaaattacgatgtcctcaggttatcataaaccccatttgacttcatgcctctactctctcagggctggcgctgtgacaactgccgcagacctgggggtgaacccagtcccgaaggcactactggccagtcctacaaccagtattctcagagataccatcagagaacaaacactaatgttaattgcccaattgagtgcttcatgcctttagatgtacaggctgacagagaagattcccgagagtaaatcatctttccaatccagaggaacaagcatgtctctctgccaagatccatctaaactggagtgatgttagcagacccagcttagagttcttctttctttcttaagccctttgctctggaggaagttctccagcttcagctcaactcacagcttctccaagcatcaccctgggagtttcctgagggttttctcataaatgagggctgcacattgcctgttctgcttcgaagtattcaataccgctcagtattttaaatgaagtgattctaagatttggtttgggatcaataggaaagcatatgcagccaaccaagatgcaaatgttttgaaatgatatgaccaaaattttaagtaggaaagtcacccaaacacttctgctttcacttaagtgtctggcccgcaatactgtaggaacaagcatgatcttgttactgtgatattttaaatatccacagtactcactttttccaaatgatcctagtaattgcctagaaatatctttctcttacctgttatttatcaatttttcccagtatttttatacggaaaaaattgtattgaaaacacttagtatgcagttgataagaggaatttggtataattatggtgggtgattattttttatactgtatgtgccaaagctttactactgtggaaagacaactgttttaataaaagatttacattcc

SEQ ID NO: 3111 - DNA, 1853 bp, Homo sapiens
tgaggaggggcggcgggtggcgggctcgactgcccccagccgaggggcagccccggggccgggcccggcgcgcacccggccagcgcgccctcgccagctgcgctctgagttctgggccagctccccagaggcctaggcgccgccgccgcgagggcgcggggcagacaaaggaggcagacaaaggcgggcgcagcccagcagccgtgcgggcaccgggcgaggcaggcccactcctcccgtaatatcatctctgagggcccttacaggacttccagaccgagtccacgcccctgggggacttgggagcagtaaaatgtagtggcaggaggcacctcggccatcgcccaccccaccagctgggagactcgggcaggttattcacccttctgcacctcgcttgacttatctgtataaagagaacagtcacagtaactgcctcatggagttactcccaggactgagataatccacggacacacttagcccagtgcccagcactcggctggagctccaaaaagccctcttccggcgcctgctaaagcgagagaaatgccctcgggggaagatatgtagcgatccaatggaacgtggagatcaacgttgtgttttcttcgcgcccacccgaagttgaagggaggtggcgcggcgggtctcagcccctcccggacgccgaggcccggcccccgcccctcggagacccgcccccgcatgcggaaccgccctctgcgaggcccggtttgggccgtgcgggaatgggcgtggcctgggcggggcgggcgctaggacccaccggagcgccgtgaacgtcaccgagcggcgccgaggccccgggttgagcgggaggcgcgatcggtccggtcggtggctccccgcggcggggccgggcccgatctcgggcgggaaccgagcgcagagccggtagcgggaaggatgaccacgctcacacgacaagacctcaactttggccaagtggtggccgatgtgctctgcgagttcctggaggtggctgtgcatctcatcctctacgtgcgcgaggtctaccccgtgggcatcttccagaaacgcaagaagtacaacgtgccggtccagatgtcctgccacccggagctgaatcagtatatccaggacacgctgcactgcgtcaagccactcctggagaagaatgatgtggagaaagtggtggtggtgattttggataaagagcaccgcccagtggagaaattcgtctttgagatcacccagcctccactgctgtccatcagctcagactcgctgttgtctcatgtggagcagctgctccgggccttcatcctgaagatcagcgtgtgcgatgccgtcctggaccacaaccccccaggctgtaccttcacagtcctggtgcacacgagagaagccgccactcgcaacatggagaagatccaggtcatcaaggatttcccctggatcctggcggatgagcaggatgtccacatgcatgacccccggctgataccactaaaaaccatgacgtcggacattttaaagatgcagctttacgtggaagagcgcgctcataaaggcagctgagggggcacctgccaccccactgatgcccaaactgtcagactttgggggatccccgcctagggcagtgctgcatggctgccctgattccaagtgctcttatcgcctctgtgtgtggatcgcccgccccagcccggggccgctcaggtctgcttggaggatgcctcccccaggagggcagtgagggatgccgcaacctcgacttctcagcctcctggggttccgccggccaacactgtctgtctcaaatactgtgctgtgagttgtttcaataaaggggccccaagggc

SEQ ID NO: 3112 - DNA, 2110 bp, Homo sapiens
tattagataagatgcaccgttgacacaggtacagaagtttccatatagttcaactgattttttatttattttttatttttttgagatggggtctgactctgtcacccaggctggagtgcagtggcaccatctgagctcactgcaacctccatcttgcaggctcaaacgatcctcccacctcggcctcacaagtagctgggactacaggcatctgacaccacacccagctaatttttgtatattttgcagagacaggatctcgccatgttgcccaggctggtctccgactcctgagcccaagtaatctgcccccctcggccacccaaagtggtgggattacaggcatgagccaccatgctcggcccagatcaactgaatttaggatttgatattactttgactttcctgcaatccaagttccttttgccagtttacttcatttgcttctgcaaatataagtacagtggtttggctttctttttaagcctttaataaaatgtctaggtgttgagactaacatcagactctttctcattaatataatacaaagccagctcgattctaattaactagttggaatttcacatgttagctctacaaatcatttttcacgcattattcctatctctataggcttgttaaaaagtgatttataaatttgctccagactctcaaagatgaagacttttgtaaacgtgtatctttggctactgtggataaaacagttgaaactccatcgcctcattaccatcatgagcatcatcacaatcatggacatcagcaccttggcagcagtgagctttcagagaatcagcaaccaggagcaccaaatgctcctactcatcctgctcctccaggccttcatcaccaccataagcacaagggtcagcataggcagggtcacccagagaaccgagatatgccagcaagtgaagatttacaagatttacaaaagaagctctgtcgaaagagatgtataaatcaattactctgtaaattgcccacagattcagagttggctcctaggagctgatgctgccattgtcgacatctgatatttgaaaaaacagggtctgcaatcacctgacagtgtaaagaaaacctcccatctttatgtagctgacagggacttcgggcagaggagaacataactgaatcttgtcagtgacgtttgcctccagctgcctgacaaataagtcagcagcttatacccacagaagccagtgccagttgacgctgaaagaatcaggcaaaaagtgagaatgaccttcaaactaaatatttaaaataggacatactccccaatttagtctagacacaatttcatttccagcatttttataaactaccaaattagtgaaccaaaaatagaaattagatttgtgcaaacatggagaaatctactgaattggcttccagattttaaattttatgtcatagaaatattgactcaaaccatattttttatgatggagcaactgaaaggtgattgcagcttttggttaatatgtctttttttttctttttccagtgttctatttgctttaatgagaatagaaacgtaaactatgacctaggggtttctgttggataattagcagtttagaatggaggaagaacaacaaagacatgctttccatttttttctttacttatctctcaaaacaatattactttgtcttttcaatcttctacttttaactaataaaataagtggattttgtattttaagatccagaaatacttaacacgtgaatattttgctaaaaaagcatatataactattttaaatatccatttatcttttgtatatctaagactcatcctgatttttactatcacacatgaataaagcctttgtatctttctttctctaatgttgtatcatactcttctaaaacttgagtggctgtcttaaaagatataaggggaaagataatattgtctgtctctatattgcttagtaagtatttccatagtcaatgatggtttaataggtaaaccaaaccctataaacctgacctcctttatggttaatactattaagcaagaatgcagtacagaattggatacagtacggatttgtccaaataaattcaataaaaacctt

SEQ ID NO: 3113 - DNA, 1712 bp, Homo sapiens
gaagcagggcctggaactgcaggatacactcccctcctgctacctaggcaggcgtgagggtgtgacggccgcgcattcgccagacgagagcgatggctgagaacgccgcaccaggtctgatctcagagctgaagctggctgtgccctggggccacatcgcagccaaagcctggggctccctgcagggccctccagttctctgcctgcacggctggctggacaatgccagctccttcgacagactcatccctcttctcccgcaagacttttattacgttgccatggatttcggaggtcatgggctctcgtcccattacagcccaggtgtcccatattacctccagacttttgtgagtgagatccgaagagttgtggcagccttgaaatggaatcgattctccattctgggccacagcttcggtgagtacagtggccaggagctgaccgggcccggagtagggctgggagggaaggataggagctgctgccccacccctttcccctgcacttatgagatctgcaaagagagatgagagggtcagtcagaggttgaccactgtaccctctgacctcaggcaactgccgcaagggacacagggatgagggaaatgtggtcttttgagtggtcaggtctgatgaaggggacatcatggcccagatgctgagcccccagccacccatatggtgccccccccccaactggtgggaagaagctttagggtatgcagctggggggggagtgagggaatgtcacccacagctcttttgtcccccaggtggcgtcgtgggcggaatgtttttctgtaccttccccgagatggtggataaacttatcttgctggacacgccgctctttctcctggaatcagatgaaatggagaacttgctgacctacaagcggagagccatagagcacgtgctgcaggtagaggcctcccaggagccctcgcacgtgttcagcctgaagcagctgctgcagaggcagagaacagcattgacttcgtcagcagggagctgtgtgcgcattccatcaggaagctgcaggcccatgtcctgttgatcaaagcagtccacggatattttgatccaagagagaattactctgacaaggagtccctgtcgttcatgatagacacaatgaaatccaccctcaaagaggactacttcggatacaatcacagcaaccctggcctcggccctgccctgtccctgccatgcaacttcacaactcagctggcctagacccctgggaggcctccaagtccctaagcggttccagtttgtggaagtcccaggcaatcactgtgtccacatgagcgaaccccagcacgtggccagtatcatcagctccttcttacagtgcacacacacgctcccagcccagctgtagctctgggcctggaactatgaagacctagtgctcccagactcaacactgggactctgagttcctgagccccacaacaaggccagggatggtggggacaggcctcactagtcttgaggcccagcctaggatggtagtcaggggaaggagcgagattccaacttcaacatctgtgacctcaagggggagacagagtctgggttccagggctgctgtctcctggctaataatctccagccagctggaggaaggaagggcgggctgggcccacctagcctttccctgctgcccaactggatggaaaataaaaggttcttgtattctc

SEQ ID NO: 3114 - DNA, 2070 bp, Homo sapiens
atcatcaacatgcattcccagaaatgccatgaaaggaaagaccaagtcttgactgagaaacggaccgggcagatgagggactcccacatatacctgtttcctgctcttcccgaagacattttgccacaagcatataattcagcttctgaaaaatacggtcttcctcactgcagacaccatgccagcgttttaaatcaagttggctactcgtgctgtttagagtatgcagtttgcctgtggcaatattaaactcatctggaagaaagcacttaaacctatccagttcctcatcggtgatgttatccaggctggttagcaagagtatctccttatatttactctccatctcacgacttttcagcttataagggatccaaactatgtaagattataccaccaaaagtgattcaacattcaaaatgaagcaagatacttcattttcttagcgtttctggagattacaacatcctgcggttccgtttctgggaactttactgatttatctcccccctcacacaaataagcattgattcctgcatttctgaagatctcaagatctggactactgttgaaaaaatttccagtgaggctcacttatgtctgtaaagatgggaaaaaaatacaagaacattgttctactaaaaggattagaggtcatcaatgattatcattttagaatggttaagtccttactgagcaacgatttaaaacttaatttaaaaatgagagaagagtatgacaaaattcagattgctgacttgatggaagaaaagttccgaggtgatgctggtttgggcaaactaataaaaattttcgaagatataccaacgcttgaagacctggctgaaactcttaaaaaagaaaagttaaaagtaaaaggaccagccctatcaagaaagaggaagaaggaagtggatgctacttcacctgcaccctccacaagcagcactgtcaaaactgaaggagcagaggcaactcctggagctcagaaaagaaaaaaatcaaccaaagaaaaggctggacccaaagggagtaaggtgtccgaggaacagactcagcctccctctcctgcaggagccggcatgtccacagccatgggccgttccccatctcccaagacctcattgtcagctccacccaacacttcttcaactgagaacccgaaaacagtggccaaatgtcaggtaactcccagaagaaatgttctccaaaaacgcccagtgatagtgaaggtactgagtacaacaaagccatttgaatatgagaccccagaaatggagaaaaaaataatgtttcatgctacagtggctacacagacacagttcttccatgtgaaggttttaaacaccagcttgaaggagaagttcaccccaaagaagatcattgccatagcaaattatgtttgccgcaatgggttcctggaggtatatcctttcacacttgtggctgatgtgaatgctgaccgaaacatggagatcccaaaaggattgattagaagtgccagcgtaactcctaaaatcaatcagctttgctcacaaactaaaggaagttttgtgaatggggtgtttgaggtacataagaaaaatgtaaggggtgaattcacttattatgaaatacaagataatacagggaagatggaagtggtggtgcatggacgactgaccacaatcaactgtgaggaaggagataaactgaaactcacctgctttgaattggcaccgaaaagtgggaataccggggagttgagatctgtaattcatagtcacatcaaggtcatcaagaccaggaaaaacaagaaagacatactcaatcctgattcaagtatggaaacttcaccagactttttcttctaaaatctggatgtcattgacgataatgtttatggagataaggtctaagtgcctaaaaaaatgtacatatacctggttgaaatacaacactatacatacacaccaccatatatactagctgttaatcctatggaatggggtattgggagtgcttttttaatttttcatagtttttttttaataaaatggcatattttgcatctacaacttctataatttg

SEQ ID NO: 3115 - DNA, 3236 bp, Homo sapiens
aatacattaaatattaggtgcctatgggatgtgatgtctaattattagttagaaacccaaatttggaacttagatgaattagggataggaaatgtttgtgtggtagatcagtatgtaaactatagtagacaacttaactcagggagatcatgtagagtaaaaagaggactaaagtgaaagttcaaggaaaacctaacacttagagggagggaagatgaggcaagacaagtaaactcaaaaatgaaagtgggttcaaatttcgactctgccaccgaactagatgaggaccaaggccaagttcctttacctcctatacctcagtgtcctcatccaaaaaatggaggtgagcataacagttatttcataccattgttatacaaacttagaaggataaaatctataaaacatttaaagtctggcaaatggtaagaatttaattaatggtcactatctttttgttttagtgtgagcacaggagcttgaggaaataagtaaataaatgccaactttaccccaaaatgttcttttagaaagtagtttaatatgttagtccacataattataaaaacaagcttttcttctgccagctgacttagaggaataccatgttttactctttgttttaagttatcagaaaagaatgtagcatgtgctttgaagcattgtgtgtataataatgagatctttcaagtagaaagtcacttaactgtgctttcttttgttatgtcattagatatgaaatccgagatgatcataccttgaaaattaggaaggtgacagctggtgacatgggttcatacacttgtgttgcagaaaatatggtgggcaaagctgaagcatctgctactctgactgttcaagttgggtctgaacctccacattttgttgtgaaaccccgtgaccaggttgttgctttgggacggactgtaacttttcagtgtgaagcaaccggaaatcctcaaccagctattttctggaggagagaagggagtcagaatctacttttctcatatcaaccaccacagtcatccagccgattttcagtctcccagactggcgacctcacaattactaatgtccagcgatctgatgttggttattacatctgccagactttaaatgttgctggaagcatcatcacaaaggcatatttggaagttacagatgtgattgcagatcggcctcccccagttattcgacaaggtcctgtgaatcagactgtagccgtggatggcactttcgtcctcagctgtgtggccacaggcagtccagtgcccaccattctgtggagaaaggatggagtcctcgtttcaacccaagactctcgaatcaaacagttggagaatggagtactgcagatccgatatgctaagctgggtgatactggtcggtacacctgcattgcatcaacccccagtggtgaagcaacatggagtgcttacattgaagttcaagaatttggagttccagttcagcctccaagacctactgacccaaatttaatccctagtgccccatcaaaacctgaagtgacagatgtcagcagaaatacagtcacattatcgtggcaaccaaatttgaattcaggagcaactccaacatcttatattatagaagccttcagccatgcatctggtagcagctggcagaccgtagcagagaatgtgaaaacagaaacatctgccattaaaggactcaaacctaatgcaatttaccttttccttgtgagggcagctaatgcatatggaattagtgatccaagccaaatatcagatccagtgaaaacacaagatgtcctaccaacaagtcagggggtggaccacaagcaggtccagagagagctgggaaatgctgttctgcacctccacaaccccaccgtcctttcttcctcttccatcgaagtgcactggacagtagatcaacagtctcagtatatacaaggatataaaattctctatcggccatctggagccaaccacggagaatcagactggttagtttttgaagtgaggacgccagccaaaaacagtgtggtaatccctgatctcagaaagggagtcaactatgaaattaaggctcgccctttttttaatgaatttcaaggagcagatagtgaaatcaagtttgccaaaaccctggaagaaggcaagtatgatgaagcgtttgatttccatgcattgcagtatatttgttagaattttattagcttaatttaaattgttataatgttaatagtggcattaattactaactttcttgatattgaacatacattttgctaacagtatttgtttatttagaaaactagaaaagcaaaatgctataatagttgacttgcttcaatagtggcctacctcaaatgtgtaaatgtgaacattatattacttaatggcatatagaaatttaattattcagaactaaaattcacatttaaaaatgaaattgttttccgtttggtttattttccattcagcattttctatttgtttattttgatccatgatttgaataatgtgttgatttgcccaggacttcgtgggattagcattttcttcctaaatctcatctcttttaaaacacctcagttctagacaaatcactatagctgaccaccctattcctagaaattaaacaatatttacataaaggtaaaagattacattaactaacaacaggatttttcccaacatgtctttgtcactttggctgtataagtaattatcatgaatgattaatattcattttcatacttttgaacatttcgggggagaacatgagactagagttacacggtagaagaaataggaattgtcctgggatgtttggtggaaacaaggtatttaactttggttatggaaaattcaccgtggcagtgaattagcattgagtgaggaacaacttaggtagtttgggactattcagacttggatgagatacatctttaaaacatatgcagctgggcacagtggctcacgcctgtaaccccagcactttaggaggctgaggcgggcggatcacctgaagtcacgagttcgagaccagcctggccaaggcggtgaaaccccatctctattaaaaatacaaaaattagtggggcatggtggtgggtgcctgtaatcccagctactcagggggctgaggcaggagaatcgcttgaacccgggaaggggaggttgcagtgagccgagatcatgtcacagcactacagcctagatgacagagcgagcctccgtctc

SEQ ID NO: 3116 - DNA, 2643 bp, Homo sapiens
aaaaacaaagggcgaagagaggggcgtggggaggctggaaagcatggttgccccgcctggcccggcgacgcccgctcagcagcctgctgaggagtggggacgaagagcagcctaaacttagggctcgggatatttcgatgccacccaaattgccgtcctaccccaacgaggcagggaaaggagcggagcgcgcgcgcgagctgagtgagtgcttacgtcgcagcgagatctgtgctgggataattagagaggagttgggctgagccgagtcctctttcagcagcagcagccggagccgccgccgcagcccggtggggcacccctgactcggaccgctcgggagagccccaggagaggccagcgccgcgcagcagccgccccgctgcgcccacctccccggctgctcccggagggctcacaaaggcggtggccgcccgagtggccttctccatccaggcgttcgcgtcctcctccccaccttctctcccgaaggcgaaaatggcagggccaggcgagaacctgggacagcggtggccctagccctgcgatcctcacccctcctgctaggagaggctgcgggctgcccgcggacgatgtggccgcggctgctcccgagcgcatcttcggcccgggtccccgccgccacccctcttctctgctccttccatcccgcccagaggagttgatgccgctgtcgccgccgccgccgctgctgaagccgcggctgatggatgccagggagtgccgcattgcttagcgaccccgcctctgggtttgctgatgatctctctccgccctggagctcagcgctgaagagctaccttattattaatcagaatttccatcgccacccctggcaggcgtatccttcagcagggaccgcaggaacattcacagtgcaggggctgagatgtgcgtgggggttgtttttgttacatcttggaagagaagagaagaggacagtaccaagatcagaaacacccgtgctaggtggaattaggggtgatttgttaggaaagagaaaggacaagaagaggagtgcggagcccttcaggggttcacatctctttaaaggaaaggaaagagggagccaaagtagggtgttgtattttagggggcagaggaagaagtttacaccccccggcccccccagctttgctgggggaaagcaggagcaacagggcacttgattggacaccaagattattaatttcctgtaggggagaggaagcaggcagcaggaggtctgggggctggagtctggtggtggcaaggaccaggtttgctttgggacagtcaacaaggtcttctgagggaaagctcagagataggcagaacaatgactcatttgcaagccggtctctcccctgagaccctggagaaagctcgcctggagctcaatgaaaacccagacacgctgcaccaggacatccaggaggtgagggatatggtcatcaccaggccggacattggctttctgcgcacggatgatgccttcatcttacgcttcttgcgggctaggaagtttcatcactttgaggccttccgcctcctggcgcagtactttgagtaccggcagcagaacctggacatgttcaaaagctttaaggccaccgaccctggcatcaagcaggcactgaaggatggcttccctgggggcctggccaatctggaccactatggcaggaagattctagtcctttttgctgccaattgggatcagagcaggtacacactggtggatattttgcgtgccatcttactttctttagaagccatgattgaagatcctgagcttcaagtgaatgggtttgttttgatcatagactggagtaacttcactttcaagcaagcctctaaactcacaccaagtatgctgcgattagctattgaaggcctgcaggatagtttcccagcgcgatttggaggaattcattttgtcaatcaaccatggtatatccatgccctgtacaccgtgatccggcctttcctgaaggagaaaactcggaaaaggatatttttgcatggtaacaacctgaacagtctacaccaactaattcatcctgagatcctgccctctgagtttggaggaatgctgcctccttatgacatggggacatgggcaagaacactgctagaccatgaatatgacgatgacagcgagtacaatgtagactcctacagcatgcctgtgaaggaagtagagaaggaactctccccaaagtccatgaagagatctcaatcagtagtggatcctacagtactaaaacgcatggataaaaatgaggaagaaaacatgcaaccattgctttctctggactaataacttctctacatccccttcatggattagaaatggaaagtattggttttcagcaacagggacaacactgtagaggaattaccagctggaaaccgacttattcatgttaatgtagcataatatataacaaggcatcaggctttccttggcctgaaccatgggggccctgggctggatttttaaaatgtcaataatttattctgtaagtgccaagttctttgtaaatataatgtaatcttcatgtcaagtttgtaaatttcagtagtaactcagtttggaaaaaggttggctcaaaagtccatgccagtgttatgaactat

SEQ ID NO: 3117 - DNA, 3773 bp, Homo sapiens
tgagtaaacagggtagcatccttttagctggttgtgctttgactaactgatctgttctttcttacttgtagaagattccaagcaagaaagtattcagcagtggctggactctggattctttgtctctgcaaatgaaaactttcaacaagtcattgaccgcactgtttctttgtatgaacaagggatggttcaaatgactgtgaaagactacatgagatctttgcatcagttttcagaaactcccatcctatccagagggaccagtttcaactcttgctattctactgcaagtgtaccacaaagcattcctgaatggctggaattttgggagatagatccagtggagattctcttggatctggggtttggtgctgatgagccagacatctgcatgcaaatcccagccagattccttggttgtggctcagcagccagaggaatcaacatccgtgtttttcttgaagctcaaaagcagcgaatggacattgagaaccccaacttgtacggtcgtttccgacagctggaaatcctggaccatgtgaccaatgccttctcatctctgctgagtgatgtcagcatcctgccaaacagagctgaagagaaagctggaggagagagtgtgcaaagaacctcagtgagtgccgccaaagagcatcgaagaagaatgggtaaactcttaaggagagcttccaaacagaacatcaggcgggattgtaacccagaggtatcagagtccttcaaggtgaaggatgaagtttttgtcccctttacaaaaccatgggattgtggagcagagctagcagcaacctcaatcaaccacaagcaaaatcatttgtctctgtcagtagaacatcagtctctccaagcctgtgatgatttgctaccttatcctcctcatggtcttctgagcaagcagtggccttgctcatctatgccggccaagcaggctcctccttcctgtgtgtctgaggggtcagtcaagggcagaactcagaaggagaacttatttcagactaacaagctcaagagcttgtctcgtcttgcaggcaaaggaccagactcatttgaaatggaagaggtccaaagctttgaagaagagactggtaatcctcttgacatgacttcaggaactgtaggtgccagggtggacagagcaaatagctgccagtctgacagcagcgggttcctggaggagccgctggaaccgctgcccctccagatgccttccttgccaaacagccagagtcctgctgagaatggaggtagaaagccaagagatcagagccacagcttagtatcatcccaggactgtcagctagagtcggatgggccagattccaaaagtagggcgagcatgtctttttcaagccaagaagtgaatgccttggaacaaagggcctcagtatctgtgatggaggaagagtttctgcttgaggccatggaggggccaccagagctgtatatcccagacatggcctgtgccaagaccaccacgaggggagaatgcccaaggaaagacagccatctgtggcagcttctgccaatgccccatgctgagtatgaggtcaccagacccacagccacttccaaatatgatcatcctctggggtttatggtaacccacgtcacagaaatgcaggacagttttgtgaggcctgagggagctggcaaagtgcaaagccaccacaatgagtctcaaaggtcacctggaaatgatcatactcaagacaagttccttcatgttgactctgaggccccacgagaagaggaaagcagtggattctgtcctcacaccaaccacagcttactcgtaccagaaagctcatcacagtgtatccccaagcacagtgaaatcacaccttatgcaactgaccttgctcaaacatctgaaaagctcattccccacctccataaactgcctggagatcctgcccaggtgaagtcaaggtctggtactttgggtcagatactacctgggacagaagctgagatggaaaaccttcctctaaatactggcagctccaggtctgtaatgacccagatgtcctccagcctggtgtcggctgctcagagggctgtggccttggggactggtcccagaggaacatctttagaatgcactgtgtgtgatcctgttaccgcaacagaaacaagactggggacaaaagcaagacagttaaatgatgcttccattcagacttcagctctaagcaacaagaccttgacacatgggccccagcccctcaccaaatccgtctctctagactcaggcttctctagtatctgcccaatgggcacctgccatgctatacctgcccactgctgcatctgctatcatcaccaccctcactgccacggggagaggcaaagccctggccctgaaccctcagtctgtaggcactgcctgtgttcactaactggtcaccaggaagcccagttcatgacgactttgaaagcccttcaggacactacagtgagggagctatgttcctgcacagtccatgagatggaagccatgaagacgatatgccaaagtttccgggagtatttagaagaaattgaacagcaccttatgggacagcaggccctcttttccagggacatgtcagaggaggaaagggaggaggccgagcaactgcaaacgttacgtgaggccctgaggcagcaggtggcagagttggaatttcagttaggagaccgggctcagcaaatcagagaagggattttactgcagctggaggttctcacagcagagccacctgaacactattcaaatctgcatcaatataactggatagaagaaagcaatgggcagacttcatgttctaaaatccacccaggcatggccccgaggactgtgtttcctcccgatgatggccaggaggctccctgttcaggtgggacccagttggctgccttcactccacccaccttggagaacagcaccaggatgtctccttcatcatcagcttgggcaaagttaggtccaacccctttgtcaaattgtcctgttggagaaaaggatgcagatgtcttcctctagatcagagcaggttgggcttttgacctccccttctccatgtagactccgagctctcctgcagtttcttccttgctccttccctgtaacgcctacggaatgaagaggaacacctggctctaggatgtccctcacccggcagccatctgctttaccagtctcatttcctgctcatccctcagatgaatctccaattctattcccctaaaccacctcctgtgttcctgtttcctctcctttgctgaaacaaatgaagtatctcaccagtaagtcctagggcagaccccatctcctacacaggctttccttgatgatctgtggcagaagtgatccttattttttgaaactcctatatcactttgcttttttgttaaaacactgaaaacctcctgtcttgtgttaccattatctgtgtaggtcatatcttctccagtaaacttaaagctatttgaggactgtgtagtacctactaccctgtgtttaagagagactatctggaggaaagtacagactcctttctttatcatgtgtgacctcgggcacttgctctctttaccctagtttcttcctctgtaaaatagagagaagaaaaacaacatagagttgttggacagaataaataccatgaatcctgtgcagtgtttaatccaatgtccatcacgtagtaagtgttcaatgcatgttggctattattacaagtgcacataccaagaactcaataaatgctaactgt

SEQ ID NO: 3118 - DNA, 2213 bp, Homo sapiens
aatgagaatggagaaggtccaggacacgtgggtgggggaagctgagcgctgagaccaagggctaaagctgggagactgaaaaaatgcagaccgccggggcattattcatttctccagctctggtaaggtgccgcgccgcggtgctctgtagtaccaggtgtatggtgtggacgccatcagtgtttaatgaatgaacccaggggagcttggcgtcctgatgatgtaggctctttgaggtggctgtaggatgtgatgaaggtaacccctgtttatctgggcctgtgaaccaagctatcttggctttggaatgtggtcagagagtctggatttgatttttatctccagtctgtcctggccatagagacagcccactaaaacagtggttttcaacagtggctgcacgttagaatcatccagggaactttttaaaatcctgatgcctgggctgcaccttagaccatttgcatcagactttgggaatgggggtggaacccaggcatctgtatcttttaagacttctccagatgattccaccgtgcagccaagtttgagaaccactgcactaaaaattatttcaaaaaagccatgttacagatggctctccttggatggctattccagtcggtttccggggctgactggcccactccatttagggtgtgtagctgtgagtgtattttagcagaataaaatttcccccatctgattacttggtgatctgggtataaacctttcctgtacctgctttggtattagtgtgggttcttgttccattctgagaagctgattaaagctgtgcccaaagaagtgaactttggtttggttttgaatggtgaaggttgccactgctgactatatcaagctattgagacagctgtctctggggcaggcctatctgataggaacaggaataaattgaccttgaaatacattgaacttattctgtttatgaaatctgtagtcatttttgacagctcagcaattaggattttttttccttgactgatttggtaggatgtggctttctgattttacagatccgctgttgtaccaggggtctaatcaggcctgtgtctgcctccttcttgaatagtccagtgaattcatctaaacaggtaagggaggaatagctctcttaggaatgttcccaaggcccaggatggtggctcacacctgtaatcccagctctttgagaggctgaggcgagaggatcacttgagcccagttgttcaagaccagcctgggcaacacagtgaaaccccatctctacaaaaaaaataaaaaaattagccatgtgtggtggcatgtggctgtagtcccagttactccagggctgagatgagaggattggttaatcccagaggtcgagactgctgtgactatgccactgcactccagactgggtgacagagcaagaccctgactcataaaaacccattaattaattttttttaaatcaaggaatgttcccagacaggggtccttcagcttaagttgcctttagaccaaagtgggaggagagttggagaatctgtatgctttaatagttctaagtcccccaaggtaagccttgtaggtaagaaacttataaaagtgaggtgtgcctaacccatgaaatttccctagtcctgtctgctgtctgacaacagactctaagactaattcccagcatactctgcaatcagagtattctgcatttaccaggcagtttgccaacagtttcagagctcaggtgggtggggtgaaggaggtagagtcagccacctgtccttatgccatactatctctctgctatctcgcctgccttgcttctctttctagccttcctacagcaacttcccactccaggtggccagacgggagttccagaccagtgttgtctcccgggacattgacacagcaggcaagtttattggtgctggggcagccacagttggtgtggctggttcaggggctggcattggaaccgtgtttggcagcttgatcattggctatgccaggaacccgtctctcaagcagcagctcttctcctatgccattcttggctttgccctgtctgaggccatggggcttttctgtttgatggtcgccttcctcatcctcttcgccatgtgaggctccatggggggtcaccggcctgttgctactgcaactccacaccattcttggtgctggggtgtgttaagctttaccattaaacacaacgtttctct

SEQ ID NO: 3119 - DNA, 2445 bp, Homo sapiens; identical to SEQ ID NO: 1850

SEQ ID NO: 3120 - DNA, 2183 bp, Homo sapiens
gatgcgccgctgacgcctgcgggagccgcgcgcctggggcgggaggatgctccagaggggcctctggccgtggcgcacgcggctgctgccgacccctggcacctggcgcccagcgcgcccgtggccgctgccgcctccgccccaggttttgcgtgtgaagctgtgtggaaatgtgaaatactaccagtcacaccattatagtaccgtggtgccacctgatgaaataacagttatttatagacatggccttcccttggtaacacttaccttgccatctagaaaagaacgttgtcaattcgtagtcaaaccaatgttgtcaacagttggttcattccttcaggacctacaaaatgaagataagggtatcaaaactgcagccatcttcacagcagatggcaacatgatttcagcttctaccttgatggatattttgctaatgaatgattttaaacttgtcattaataaaatagcatatgatgtgcagtgtccaaagagagaaaaaccaagtaatgagcacactgctgagatggaacacatgaaatccttggttcacagactatttacaatcttgcatttagaagagtctcagaaaaagagagagcaccatttactggagaaaattgaccacctgaaggaacagctgcagccccttgaacaggtgaaagctggaatagaagctcattcggaagccaaaaccagtggactcctgtgggctggattggcactgctgtccattcagggtggggcactggcctggctcacgtggtgggtgtactcctgggatatcatggagccagttacattcttcatcacatttgcaaattctatggtcttttttgcatactttatagtcactcgacaggattatacttactcagctgttaagagtaggcaatttcttcagttcttccacaagaaatcaaagcaacagcactttgatgtgcagcaatacaacaagttaaaagaagaccttgctaaggctaaagaatccctgaaacaggcgcgtcattctctctgtttgcaaatgcaagtagaagaactcaatgaaaagaattaatcttacagttttaaatgtcgtcagattttccattatgtattgattttgcaacttaggatgtttttgagtcccatggttcattttgattgtttaatctttgttattaaattcttgtaaaacagaagtattgtttgaagttctcaactgagatttttactttttggatttttatgacttgctaatgttagaaagggcttgtatgcgtctatcaaagcaacagtggctgctgttagctaaaaatccttgtcagcttgtcccacgtttattctctatgtggaggtgaaagggtctgtgcttggcattcacttccattcttagacttaatttggaatcatccttttaaaaaaatcagagaccaggtcttgccaaatcaaactcctgggctcaagcaaccctcctgcctcaacctcccacggaatcgtcttgtcattaacttctttttttaatatgcattagttgggagtaagatctttttatcatttatcaaaaaggcataaatgttccaccaaccataaagtatagttggtactttttgaacttcaactgaaacagtgtatataaacgattgcttttgaacctgcaaatcacaagtttcaggtatcgaagccaaaacagttaactttcttcagcctctggcagattattaacaaaacagtattattcagattctatatcatattaataagaattgaaccttgaaagtaacatctgttattctattaatgtgattgtgtgtgaatgggtctgatgactgttggactgtttgtaggaacttaacatggaagatgctgacagaatcagattttgcaggtgttcaacctatagtggctaagaattatgttttctatttcatcctcagaatgccatacaacaattctggaatgctgattttttttaaagtaggaattaaagtcatacacaaaatgtggtaattcatatgtagatgaaatattaaacatttaaatgaccgagtaaaaaacatctatcaattacacaaatgaacaagaatgtgagttagaaaaatgtaataaaatatgaattttgaatattttattaagggatgatttaattcctggatttcaaaaacctttaaaaacatcaaacaataaacttttataaaaaagtg

SEQ ID NO: 3121 - DNA, 2204 bp, Homo sapiens
acagacaggcaggtgcaggagacggggtgagcgcttttgggctctagccccatggcagcatctaggggtgtgttacaattaatgctcttttagcagttgctgttcgcggatggctaagtgttaaaccagctcagtggagagtcagggtggcagccttttacgccctgtcctcttggtacccgggtctttgtctagcatccaggaagaatcaggtcctacagacttgaaggatggtgaatacagagattttattgaatgatggaggaggctttcagcaggatggatggggagctggaaagcggatggagtgagaagataatcttcccctggggtttggccatcccatggctgatctctctgacagtccccagccgaactcctctcgatgttcagacactctttctcctctctcctctgccacactgctctgctgctcttctgctcatggagcctgaggacaaccccagcaatgtggagaagcctggggcttgccctggctctctgtctcctcccatcgggaggaacagagagccaggaccaaagctccttatgtaagcaacccccagcctggagcataagagatcaagatccaatgctaaactccaatggttcagtgactgtggttgctcttcttcaagccagctgatacctgtgcatactgcaggcatctaaattagaagacctgcgagtaaaactgaagaaagaaggatattctaatatttcttatattgttgttaatcatcaaggaatctcttctcgattaaaatacacacatcttaagaataaggtttcagagcatattcctgtttatcaacaagaagaaaaccgaacagatgtctggactcttttaaatggaagcaaagatgacttcctcatatatgatagatgtggccgtcttgtatatcatcttggtttgcctttttccttcctaactttcccatatgtagaagaagccattaagattgcttactgtgaaaagaaatgtggaaactgctctctcacgactctcaaagatgaagacttttgtaaacgtgtatctttggctactgtggataaaacagttgaaactccatcgcctcattaccatcatgagcatcatcacaatcatggacatcagcaccttggcagcagtgagctttcagagaatcagcaaccaggagcaccaaatgctcctactcatcctgctcctccaggccttcatcaccaccataagcacaagggtcagcataggcagggtcacccagagaaccgagatatgccagcaagtgaagatttacaagatttacaaaagaagctctgtcgaaagagatgtataaatcaattactctgtaaattgcccacagattcagagttggctcctaggagctgatgctgccattgtcgacatctgatatttgaaaaaacagggtctgcaatcacctgacagtgtaaagaaaacctcccatctttatgtagctgacagggacttcgggcagaggagaacataactgaatcttgtcagtgacgtttgcctccagctgcctgacaaataagtcagcagcttatacccacagaagccagtgccagttgacgctgaaagaatcaggcaaaaaagtgagaatgaccttcaaactaaatatttaaaataggacatactccccaatttagtctagacacaatttcatttccagcatttttataaactaccaaattagtgaaccaaaaatagaaattagatttgtgcaaacatggagaaatctactgaattggcttccagattttaaattttatgtcatagaaatattgactcaaaccatattttttatgatggagcaactgaaaggtgattgcagcttttggttaatatgtctttttttttctttttccagtgttctatttgctttaatgagaatagaaacgtaaactatgacctaggggtttctgttggataattagcagtttagaatggaggaagaacaacaaagacatgctttccatttttttctttacttatctctcaaaacaatattactttgtcttttcaatcttctacttttaactaataaaataagtggattttgtattttaagatccagaaatacttaacacgtgaatattttgctaaaaaagcatatataactattttaaatatccatttatcttttgtatatctaagactcatcctgatttttactatcacacatgaataaagcctttgtatcttt

SEQ ID NO: 3122 - DNA, 3634 bp, Homo sapiens
tatttctaattatttgcttatgctgggcactgaattttctcttaggctgaccatatattttattaaagtagtcttgaattcaggagtggaaaaaaaaaagttatgttttagacctcaatgtaagctgaaaggaaataaaggaacttctatatttccatttctcaggctgattttccttcccctgttctcttatctgtatcatgacatgagatgtgaacctcagaaatgtaaaaacaaaaagtctagaataaagcattccttgaattttaaatgaacatgcttttagcagctggatacgaagcagactattttcaacaaattgaatgtttcccacttgtgtgagagccaaacaagtgccatacagaaagggacctcttcaatgttaccaaagctttgtggcagcatttaagtgtggtggctccatagaagtcactatagcatggacgagccacttggcttgctttttcctgctaatcaaagttttaagaagataaaaagctatctttgttatatatgttttgtctaatttgcaatattacagtctcctggggggaaatccaacttccaataataattgtaaaaaaaaaaaaagaatgcactgtacttattcttttaatctgtctttctagaggccaatattttatttatcatgtgcatggtgatcatacttcaaggctggagcttttggagttgttgtgagtctgccctactttccaccaaaggcaccaattatacatgcacagtagttgcccttgtatcttttaaaaattgttcaagaggttgttctgtgtaagccaataactccacttgaaaatcacgaggaggtcatattttatttctgccagagagaacaggtatcattgtgccagcttggatcaaagcacctgatacaatctgtatttaaccttgtggaatgatggagggagagcttacgaacgaattcacaggaaatggctagagtttctgctgtaactctcaacctagccattcttctcatattatcctatggtagcttatctgaacctcagaaatctatccttttctaatttgaatcattttagtcaacgcagcctcagaaacggaaaccatctattgaaataatacacaaaagggacagccgtaatagcgtgtagccgttgaagcctccattccaatgaaaagacagtgggaatagatccctttggaaaccactaactaatcccagaaagaggaatgcctgtgaagttgagttgaacctgaagactagacacactgtagaacctccataggaagggtgcagagtaactgagttacttgtgatagggacaagacttacccactaccagaaacctgccccatcggtcacaaatgggattcccagagtggacactttctgtgtttagtgctgccatgggaatatcaaagaaggacactggcctttcttgagcacctatgtgtcagacactgtgcaagatgctttcaccattatgtcactatcctcccaacaccgagaggtatctttatccccactgggtgcacaggaagaggttaagtgattccctgaggcccacccagcaagtatgagagataggatctggcccttcattttctaactacaagttcaatgggctttctgctgaacacaccccacaccaccaccaccaccaccaccaccaccaccactaagccgtgtcatttctagggccatctcctctcagtcttacagccagcttgggtgtcccacctccaggcctctgcgcaaagggaatgtgggtctctctggtgatgttttcctaactgtatttgtgatgaaaacagggcattccagttccctcttgcccagcacaaccacatcagattcgacggctcaagaggggtatgagtctaggggaggaatgctggactggaagcatctgcttgactcacctgacagcacagaccctttgggggcagtgtcttcccataatcaccaagacaagaagggagtgattcgggaaagttacctcaaaggccacgaccagctggttcccgtcaccctcttggccattgcagtcatcctggctttcgtcatgggggccgtcttctcgggcatcaccgtctactgcgtctgtgatcatcggcgcaaagacgtggctgtggtgcagcgcaaggagaaggagctcacccactcgcgccggggctccatgagcagcgtcaccaagctcagcggcctctttggggacactcaatccaaagacccaaagccggaggccatcctcacgccactcatgcacaacggcaagctcgccactcccggcaacacggccaagatgctcattaaagcagaccagcaccacctggacctgacggccctccccaccccagagtcaaccccaacgctgcagcagaagcggaagcccagccgcggcagccgcgagtgggagaggaaccagaacctcatcaatgcctgcacaaaggacatgccccccatgggctcccctgtgattcccacggacctgcccctgcgggcctcccccagccacatccccagcgtggtggtcctgcccatcacgcagcagggctaccagcatgagtacgtggaccagcccaaaatgagcgaggtggcccagatggcgctggaggaccaggccgccacactggagtataagaccatcaaggaacatctcagcagcaagagtcccaaccatggggtgaaccttgtggagaacctggacagcctgccccccaaagttccacagcgggaggcctccctgggtcccccgggagcctccctgtctcagaccggtctaagcaagcggctggaaatgcaccactcctcttcctacggggttgactataagaggagctaccccacgaactcgctcacgagaagccaccaggccaccactctcaaaagaaacaacactaactcctccaattcctctcacctctccagaaaccagagctttggcaggggagacaacccgccgcccgccccgcagagggtggactccatccaggtgcacagctcccagccatctggccaggccgtgactgtctcgaggcagcccagcctcaacgcctacaactcactgacaaggtcggggctgaagcgtacgccctcgctaaagccggacgtaccccccaaaccatcctttgctcccctttccacatccatgaagcccaatgatgcgtgtacataatcccagggggagggggtcaggtgtcgaaccagcaggcaaggcgaggtgcccgctcagctcagcaaggttctcaactgcctcgagtacccaccagaccaagaaggcctgcggcagagccgaggacgctgggtcctcctctctgggacacaggggtactcacgaaaactgggccgcgtggtttggtgaaggtttgcaacggcggggactcaccttcattctcttccttcactttcccccacaccctacaacaggtcggacccacaaaagacttcagttatcatcacaaacatgagccaaaagcacatacctaccccatcccccacccccacacacacacacacatgcacacaacacatacacacacacgcacagaggtgaacagaaactgaaacattttgtccacaacttcacgggacgtggccagactgggtttgcgctccaacctgcaaaacacaaatacattttttaaaatc

SEQ ID NO: 3123 - DNA, 3364 bp, Homo sapiens
tgacgcccccttctcggccgccagccctccacacctcatctgccttgctccacctccctagtgcacccgctccagccccgtctgcccaggagggcgcttggatttccttctccgcggcgcgtatctaacccttcctgcatgtatttcactgcaggctgaagaaagctcagtctcaattgtgtttcctgcctgtcagcctcttgcctcctaaacgtgtaccatttccacttgatgtcatcacgcagaaggggtgaaagagactcggtgacagatacagaaatgaacacacctgtgagtactggatgcctgtgagcttgccattacctgcactgcaaagacacagggcggtggcctctgagaagcagctccttccccttcaccttggccttgcccttcctgctcacggtccaccatggagacgctgtcccaggactctctgctggaatgtcagatctgtttcaattactacagcccccggcgcaggcccaagttgctggactgcaagcacacctgctgttcagtgtgcctgcagcagatgaggaccagccagaaggatgtgcggtgcccctggtgccgcggtgtcaccaagctgcctcccggcttctccgtgtcgcagctcccggacgacccggaggtcctggctgtcatcgccattccacacacttccgaacacaccccggtcttcatcaaacttcccagcaatgggtgctacatgctgcccctgcccatctccaaggagcgtgcgctgctgcccggagacatgggctgccgcctgctgcccgggagccagcagaagtccgtcaccgtggtgaccatccctgctgaacagcagcctctgcaaggtggggctccccaggaggcggtggaggaggagcaggacaggcggggcgtggtgaaaagctccacctggtcgggggtgtgcactgtcatcttggtggcttgcgtcttggtcttcctcctcggcatcgtgcttcacaacatgtcttgcatttctaagcgcttcactgtgatatcctgtggctgaagagggctgcagggaagtctcttgtgggtgccaacttaggggttgagcaggttgatgatgagatcccagtgagaagatggggggcaacactgaccatttggtgctgagcgctggcctctgggttgcctcttgattaccccaagacagacacaaagggcagaaggtgcggtctcaacaagataccaggtgaattgttctgagtgttgatggcaacagcttggaagatgattgcatgcatcctcataatcatgtattcaatggactgtaatttatgatttttcaaaatcatgttacaagatagacatattctacttagacgttaaactgtacaagtgcgtacaatgtgaccttctctaaatgcggtagattcaaacaaagatgctctgtagacaagtagaattaaacctgcgaatccgtgtaaaaattcagtgaagacatgcactgctggcttctttattttttttttctttttattgaaacccagtcttcatttagttgctaaggcttttaatacattttgaatggcaccaaaacaaaataagtcaaaatggacagtcattttatttggaggaaatatttgaacaagtgtctccaatgtgttgtgttttgtcatgaaccttcattttcttcacttgtaattagagcttgctacgtgtttatggaactgaaagctcaacaggggagcaataaaccgagaaatcatgagaaatgtctaatcccatgggaaaacctgtatgccgattttcctcaagccatctcacaaaataagaatttcaaatgtaaatattgtgtatttgtgtgtgtatgtgtgtgtgtctaatttgatttacctcaggtgtttgagtctttgctgaagaatcctgggatgaagacttcattgggcatgaatgagtcaagtctctgaagcggtggccacttcttggacatcttgacccagcgagtggtctcctacacgtcacctgcaacactcgctcctcttctgtgtatttaagtcctgcattttgtaagaggcaaatggagagtaacagaagagtgtcttttctcctggttttggagtcttgcactggccatgagtgttgtgactgatggtcaacccaggcgggcattttaataaatggcctgtgattcttttttgaaagatgctcttccacaagagttaagccagttagaattcctgtttcctcttgttgatatgagagaagatctcctgtattttaacacgtttttaccaagaaaggtggcaaggtaaactaacagctcaaattcccaatataagtggaccagttcctcataaactgtcaaatgttcttaaatgtgtaatgatctatagatgctcatgaagaaagatctgctacaagtacgtgataaattcctatccctgggtgcatgtgcattcagaaatagctgtgagctttacagctctcatctaacttcttttatggaattcatgaagcaagtggtatgtgacaaggactccacttataaatataactgtttttatgttccactgaatccctgaaaatggtgaggagggttggggggaagtgaaggaaagacaagcagggctaattccaaaaagcaaggctagaaaatagccctgtgaggtcaagacaatttaatttatttacatgctgtctgttatcttcaagcagcacaaaatatgcatataaaagtgatggaattaatgtgaaataaaacaaaaatataatggctagaatacaaagctaatactgctaattggcatgagaattcaacataaaattgtgagctctgatttttcaaattgatcataaaacctttaggaaatgtatttgaaagctcaaaatagaaattaggttaaaatgccattttattgtgtaagctcttgggcattatacaacaaataatctaggatttatttggtattaataatttaggtgtcatattagctgaatactatcctctattacatttcgaatagactttgcccttgcaattttaagctatgccatattcagattaattttgtgagtgatatctgcatatgtttctgtacagtgtgaaatgactgaccctgtagtatagtacgtgatagagttctacttgttaaagtaggttagatatagacactaatgtgtgtgatgatagtgtcctgtgtttcttagtgcaaatctgtagagtaaaaatgtccatagaacttttacttaaaaacaatcccatgctagagttgccattaagcagtgcaaaattaatcggctgtatggtagattcttgaccttaaatttaacaacaacaaccaaaatcagattttttttgtgagtcttactgacctaagaaacattgtttaaattgtttaaatgg

SEQ ID NO: 3124 - DNA, 3783 bp, Homo sapiens
gcatgaccctgacatcggcagcgggagcggcggccagactctcttggaagtttaggatatttcacagttctgaatgttagccactgaaaatgccagtagatgatgaagcctctgaagatgacacggattcatttttctcaaacagcccaagaacctttattttccaataagagaatataacaatttctgtacactatggaagagtttgacttggtgaaaaccttacacaaaacttcatcttctgtaggatctgatgaaaattctcttcattctcttggactgaacttaaatactgatagaagtagtccccaccttagtacaaatggggtatcctctttctcagggaagaccagaccatctgtaattcaaggtacagttgaagtcctaacttctttaatgcaagagctacaaaacagtggaaagactgattcggaactttggaaaaactgtgagaatgtagagtaagcgaaatgaaagattacctggtttaagaattcgatagcagcaactgctaaggaccaggtggttacagctattcaatttggtggaaaaacaatgccaagaacagatagttgcccagcaggagcagttccacaaccaaattcaacatatacaggaggagataaaaaatttagtcaaattacagactagtagtgcttccttagcttcctgtgaaggaaattcttcaaacaaacaagtatcttcggaaagtcaaatgggttttttttctctaagcagtgagagaaatgaatctgttatccattatcctgaatccacagaacctgaaatacagcaagaaatgtccacgtcacaaccagactgcaatgtggatagttgctcagtaagcagtggatatggcaccttttgtatctcagaattaaatctgtacaaatctaaagaccctaaggagttcatggagcacatagatgttcccaaaggacagtatgtagcacctgcggtgccggctgagtcacttgtagatggtgtgaaaaatgagaatttttatatacagactcctgaagagtgtcatgtgtctttaaaggaagatgtatccatttctcctggtgaatttgaacataattttcttggtgaaaataaggtttctgaagtatacagtgggaaaacaaatagtaatgctataacatcatgggcacaaaaactgaagcagaaccaaccaaagagagcacatgtagaagatggaggttcaagatctaaacaaggaaatgagcaaagtaagaagacaccaattgagaaatctgattttgctgctgctacacatcctcgtgctttttacctcagtaaaccagatgaaactccaaatgcttggatgtctgattcaggaacaggattgacttactggaaactagaggaaaaggatatgcaccactctttgcctgaaactttagagaagacgttcatatcattgtcttccacagatgtgtcaccaaaccagtctaatactagtaatgagatgaagctaccgtcactgaaggatatttattataaaaaacaaagggaaaacaagcagttacctgagaggaatctcacttctgcttccaacccaaatcatccaccagaggtaaagttgtccacattctgccgagtgaacgtgaacaatgcttcctgactctaacttttacctcaagcttcattttccctaggagatctaaagcctactcacttcaaaacaagcaaaacaaagccgagttctgagggattaggcagaatctgaaggaaaagcatgctcgacacatagcagatcttcgagcttattatgaatcagaaataaatagtttgaaacagaagctggaggcaaaagaaatctctggagttgaagattggaagataaccaatcaaattcttgtagacagatgtggccaattagatagtgctttgcatgaagctactagtcgcgtgagaacacttgaaaataagaataacttactggaaattgaagtgaatgatttgagagaacgcttcagtgcagccagcagtgcttccaaaattttgcaggaacgaattgaagaaatgagaacaagcagtaaagaaaaagacaataccatcattcgactaaaatctagactgcaagatttagaagaagcatttgagaatgcttacaaactctcagatgataaagaagctcaactaaaacaagagaacaaaatgtttcaagatcttttaggagagtatgagtcccttggaaaagaacacaggagagtaaaggatgcattaaatacaactgagaataaattgcttgatgcatatactcagatttctgatttgaaaagaatgatttcaaaacttgaagctcaggtcaagcaagtagaacatgaaaatatgttaagccttcgtcataattctagaattcacgtgagaccctcgcgtgccaacacactagcaacttcagacgtcagcaggcggaaatggctgattccaggtgcagagtattccatctttactggccagcctctggacacccaggacagtaacgtggataaccagctggaggaaacctgtagcctagggcaccgttcacctctggaaaaggattcttcacctggaagttcatcaacaagcttgttgataaaaaagcaaagagagacttcagacacgccgatcatgagagctttaaaagaactcgatgagggaaaaatatttaaaaattgggggacacagacagagaaagaggacacctcaaatataaatcctcggcaaactgaaacttcagttaatgcaagtcgttctccagaaaagtgtgcccaacagagacaaaagagacttaattcggcctcacagagatcatcatctttaccaccttcaaatcgtaaatcaagtactccaacaaaaagagagattatgctaacaccagtgactgtggcttatagtccaaagcgatcccctaaagaaaacttgtccccaggatttagtcatctgcttagcaaaaatgagagcagtccaattcgatttgatatacttttggatgatttagatactgttcctgtgtctacattacaacgtaccaatccaagaaagcaactccagtttcttcctctagatgactcggaagaaaaaacttattctgagaaagccaccgataaccatgttaatcatagctcttgccctgaaccggtgccaaatggagtgaagaaagtatctgtgagaacagcctgggagaagaataaatcagttagctatgaacagtgtaagccggtttcagtcactccacaggggaatgattttgaatatacagcaaaaattcggaccctagctgaaacagaacgattttttgatgaacttacaaaagaaaaggaccagattgaggcagcactaagcaggatgccttctcctggaggacgaatcactttacagacaagattaaatcaggaagccttggaagatcgtttggaaaggattaatcgagaactgggttcagttcgcatgacgctaaagaaattccatgttttgcgcacctctgcaaatctttgagatttgtagccattaaattttgagacatttttgtttgcactaatgtataattatgcagtcagaaaaggcaaactattttgtactgtttataagccttcaaacagtagttttacaatcatgctattcttacacttgctattttatacttcaaatagccacatattttcaagatatttttgttatgctcaggaatctcttgtatattttactatttaaaaagcattatttttaaatagtatctgtctccaatttatatcaagaataaggaaatataaacagaggaagcagcttgtttct

SEQ ID NO: 3125 - DNA, 2392 bp, Homo sapiens
cttctgctccggccctgtcctcaaattggggggctgatgtccccatacacctggctctgggttcccctaaccccagagtgcaggactaggacccgagtggacctcaggtctggccaggtcgccattgccatggagacagcaacagtccccagccgcgggttccctaagtgactggttactctttaacgtatccacccaccttgggtgattagaagaatcaataagataaccgggcggtggcagctggccgcactcaccgccttcctggtggacgggctcctggtggctgtgctgctgctgtgagcgggcccctgctcctccatgcccccagctctccggctgggtgggcttggccatggtcagcgtgaacgcgcccctcggggctccagtggagagttcttacggtaagtggggctgggggaagactggacagggcgggactgcggtcagctttgggaggccatgggacacctccccgtgtgtttcttacgggcccaaagctcctcctggagctcctctggaagggcaggaagccccacggaggcaatgtgaccgcttccctaagctctcaagccggggcatggcctgcttggtgcgagaagtgctgggaggggccgagaagccctggggcagaggcttggctcattttgtctgtccagaggccttcctgggaatgcatctcaggggtctttccaaaaccccacagagggtggggcttggaagcaccgtcctgtttcgatgcggggcaaattgaggtccaccaggagaggcttgctgggcctaggtcacgttgctggtgcattatcaagctgggcgtgggaccgggcagctcggtcgctccgcacctccgttggctctggataatggggaggaggtagaaagcgccgcgcagggtggagcgttggaaaatgagaatatcttgtgcggacgtgtgaaactcagatgcagggctagaaagcatgtgttactgagagtgaaaggctcaggctcactccttagggtgacccccacattggaagcaacccaatgtccctcagcagagggaagacgggtaaataaagcgtgagacgtctttacagtggaatgctatcccattgttcaaggaaacaacgcacatctgtgtgtgacagggaagaacctctcagttaaattaagtgaaaacggtacactgaagaactgtgtagttgctgatagcgaaacggatatagatgtatatatgtacacacgcgtatacgtgtacattccacgcatagaaaattcgtggaatgacacaataaaattggtgacaggtttgtttctgaggagggaaattcaagagaatgttttatcttttggggacacattttggattttttaaaagttgggtgccttttataaacctgtttaaatcacacacccgcacagaacttggtctctggaatccagcagacctcggggtctagttgtgactctgtcacacggctcaacattcacgtgcctcttgctttctttctgaagtggagacaggactaggatgtgtcttaagatcatggtggatgccgtggggaacaaggatgtaaagcccttgataccacgtgcattgcaaagacacaatcaacatttatgtcatcaattgctgaggacagagggccagggaatgacagaatcagggcctgatctcctgactctagtcaggaagaatcttctttgctttgacccccatcaaacaggaatatgtgatgcactggaaatggcagaggctgaagaaaccaacagcctgggaacccatcccacacaccagctgtgtgaccttgggcaagacatttcccctctctgaacctatttcctcatctgtaaaatgaagataacaacaggacctatctcccagagagcggggagattagaggagatagcatagaggagattaagggtgaggccacccttaatccacaattttaagacctggagtatagatgccaatggatgacttggttgaacctgtggctaggggaagacattgtctctcaaaggggccagacagcttctggggaaggacagcccaggtcataaggctaagctaggggtgaacagaaggccccacagtgtctcttaaaggatgatacaataatataacctgacagcctttcactgtctcccacgtctctgcaccttgtaggatgtcctcatgtctcttcatctctgctcctgtgtcatactcattatatagcaaacattcagcaattattagaatggttgcttctatcgacaggtaggtgggtgaatggatggatgaatgggttagtgaatgttctactattatctctcagacagctgtttcattttccaaacggctgtctgagataaataatattgtaatctccaaggacagaagaaaaaactaaggttcaagatt

SEQ ID NO: 3126 - DNA, 2432 bp, Homo sapiens
attttaacagaattacaggcgtgagccaccgcgcctggccaaggtcaggatattatacatttttcctcttttgttccttgtcaaaatgttactgtagttgaaatgtagtctgcaaacttttcctagcacacatgtttattcagttctgtgactctttctgctatgctgctatgtagcccaagagaatactcctggtgtgagtatcaaaagtggcagcacgtgctgtagtggctcgcgcctgtaatcccagtgctttgggaggctgaggcaagagcttctcttgaggccgggagttcaagcccagcctgggcaacatggtgagacccctgtctctacaaaaaaaaaaaaaaaaacttaacttaaaaaaaggcaggagctgaagaggtctccaaggacaaataatacacttgataatgatcacgagactagccagcaagtctgatgctttgtcagaatctttggttgagccaaaatttgtccacaaaagtgtgaggatgctggtgactgactccagccactgcaggagtgagttctgtcctgactatggaacgactgtgactgtgaccctccagggtcccattcgtgttgtgtttctcaggctctccttatttttcctcttttctcccctttagatatgccatctctatggcccgaaaaattggagcaagagtgtatgccctgccagaagacctggttgaagtgaaccccaaaatggtcatgaccgtgtttgcctgcctcatggggaaaggaatgaagagggtgtgaggcccaatggggctgggtgggaggcggtgcactcactcctgactgcccggcacagatgctccagggatgattcaagccattccaaagttcaacttggtgacactctataagattccaaaaagcacatattagtgcagccaagtagcctctcctgtatttaacaaaaagtgcttcattctttgcaggaggcccaacctcctatatataggtttctattcttgatttatttgcttcttcgaaaatctagaggaaaagaaagaagttattttccaggtacccttctcgcttttgccattagccaaggatagaagctgcagtggtattaattttgatataatctttcaaaccagcttcttgtggcttcccttttctttgttcaagatgagggccaggaggggaaacatcacacctgccctaaaccctgttcctggaggtcagcatttgatctgttgcaagcccctctttctgtcccctcttcctaccctgcctcccatgactttgctcctcacacttttggaaccatgccttccgggggggcccatctcttctggccgtccttgtctctgggccacttggagtgtgtgataaatcagtcaagctgttgaagtctcaggagtctctggtaacctgcagaagtaagcctcatcatcagagcctttcctcaaaactggagtcccaaatgtcatcaggttttgttttttttcagccactaagaacccctctgcttttaactctagaatttgggcttggaccagatctaacatcttgaatactctgccctctagagccttcagccttaatggaaggttggatccaaggagggtgtaatggagcatcaagccactcggcggcagcatggagctataactaagcatcctttagggttctgcctctccaggcatttagccctcacattagatctagttactgtggtatggctaatacctgtcaacatttggaggcaatcctaccttgcttttgcttctagagcttagcatatctgattgttgtcaggccatattatcaatgtttacttttttggtactataaaagctttctgccacccctaaactccaggggggacaatatgtgccaatcaatagcacccctactcacatacacacacacctagccagctgtcaagggcagaatgaatctatgctggataagaaatggtggaactgcgttatgaagagctaatttactggacaaagaattccaaagcaaaaccagaacagtatgaatttgagcaggtctcataggttgagcaatttccccctaaaccaactgaaggctaaaaagcaacaggccattgtgaaccaatgcaagacgccctctatcatggtgaaaagctccatcaatgaggtatcttctttagtggtggtatgtaatggaacttagccatttttcaaagcaattgaaatgcattgctctggatctgttccttggcagtggactcagaaagccaacatgtggctcctcccagcccataaccagtatttttgctgcttctgaatacaaattggttggttttgacttcagattgaacttactgtagcctcagatgatttcccccctccgcctccaggaagaaagaatgttactgccttaataaaaaatgaaaagagaatgatgctcaaaatctttccaaataaaatgttccttat

SEQ ID NO: 3127 - DNA, 3076 bp, Homo sapiens
tttacaaagccataatgactgccgttgtctgtcaactaaaatctgctacctggtatccaaagatccccaattctgaatccttcttccagataggcttatctcattgggctgtacaacacacacccctgaccaaaccagttcctgatgttcttaatagagaccttgcctgttgctccctttgtatgcatatttatactaccttctactcccaccccttgctatctccccaaatcctctactctttcctttttctgatccagattttgctagctatccaaggacaagttcaaattccaccccttccaagttcagtccatactgttcttttccctgtctcaattcaaataacaaatatatctacctcataagtgagttctgtagcttgtatgatctctgtttgatgcctaaaagtcctgttttttccagcaagaaggtaagcctttgagagccaactgaacagctaccccacacaggattccacacactattaatagatactatagaaatacatgcggaattgaaatggaaaagaaaaattaacacagtataagaaccctcgtccaaatccaatacagtttattttatttctttctttcattctactttcagtttttattgcatcctctttagttaaactttggtcataaaaaagctatgttttcttcggtcccaaaagataacccatcttcattcatctaggtgagacgagagaagagcggacatttaggaactggatgaactccctgggtgttaaccctcgagtcaatcatttgtacagtgacttatcagatgccctggtcatcttccagctctatgaaaagatcaaagttcctgttgactggaacagagtaaacaaaccgccataccccaaactgggaggcaatatgaagaagcttgagaattgtaactacgcggtagaattggggaagaatcaagcgaagttctccctggttggcatcggtggacaagatctcaatgaaggaaaccgcactctcacactggccttgatttggcagctaatgagaaggtatacactgaatatcctcgaagaaattggtggtggccagaaggtcaatggtgacattattgtcaactgggtgaatgaaacattgagggaagcagagaaaagttcatccatctctagtttcaaggacccgaagattagtacaagtctgcctgttctggacctcatcgatgccatccaaccaggttccattaactatgaccttctgaagacagaaaatctgaatgatgatgagaaactcaacaatgcaaaatatgccatctctatggcccgaaaaattggagcaagagtgtatgccctgccagaagacctggttgaagtgaaccccaaaatggtcatgaccgtgtttgcctgcctcatggggaaaggaatgaagagggtgtgaggcccaatggggctgggtgggaggcggtgcactcactcctgactgcccggcacagatgctccagggatgattcaagccattccaaagttcaacttggtgacactctataagattccaaaaagcacatattagtgcagccaagtagcctctcctgtatttaacaaaaagtgcttcattctttgcaggaggcccaacctcctatatataggtttctattcttgatttatttgcttcttcgaaaatctagaggaaaagaaagaagttattttccaggtacccttctcgcttttgccattagccaaggatagaagctgcagtggtattaattttgatataatctttcaaaccagcttcttgtggcttcccttttctttgttcaagatgagggccaggaggggaaacatcacacctgccctaaaccctgttcctggaggtcagcatttgatctgttgcaagcccctctttctgtcccctcttcctaccctgcctcccatgactttgctcctcacacttttggaaccatgccttccgggggggcccatctcttctggccgtccttgtctctgggccacttggagtgtgtgataaatcagtcaagctgttgaagtctcaggagtctctggtagcctgcagaagtaagcctcatcatcagagcctttcctcaaaactggagtcccaaatgtcatcaggttttgttttttttcagccactaagaacccctctgcttttaactctagaatttgggcttggaccagatctaacatcttgaatactctgccctctagagccttcagccttaatggaaggttggatccaaggagggtgtaatggagcatcaagccactcggcggcagcatggagctataactaagcatcctttagggttctgcctctccaggcatttagccctcacattagatctagttactgtggtatggctaatacctgtcaacatttggaggcaatcctaccttgcttttgcttctagagcttagcatatctgattgttgtcaggccatattatcaatgtttacttttttggtactataaaagctttctgccacccctaaactccaggggggacaatatgtgccaatcaatagcacccctactcacatacacacacacctagccagctgtcaagggcagaatgaatctatgctggataagaaatggtggaactgcgttatgaagagctaatttactggacaaagaattccaaagcaaaaccagaacagtatgaatttgagcaggtctcataggttgagcaatttccccctaaaccaactgaaggctaaaaagcaacaggccattgtgaaccaatgcaagacgccctctatcatggtgaaaagctccatcaatgaggtatcttctttagtggtggtatgtaatggaacttagccatttttcaaagcaattgaaatgcattgctctggatctgttccttggcagtggactcagaaagccaacatgtggctcctcccagcccataaccagtatttttgctgcttctgaatacaaattggttggttttgacttcagattgaacttactgtagcctcagatgatttcccccctccgcctccaggaagaaagaatgttactgccttaataaaaaatgaaaagagaatgatgctcaaaatctttccaaataaaatgttccttat

SEQ ID NO: 3128 - DNA, 1312 bp, Homo sapiens
ttagagatagtttttctcatcctcaagtattgggagtccaactttgagtggaatctggactaaacttcagagtgttgccagggacggcagtatctctttgtgtgaccctggcggcttatgggacgttggcttcagacctttgtgatacaccatgctgcgtgggacgatgacggcgtggagaggaatgaggcctgaggtcacactggcttgcctcctcctagccacagcaggctgctttgctgacttgaacgaggtccctcaggtcaccgtccagcctgcgtccaccgtccagaagcccggaggcactgtgatcttgggctgcgtggtggaacctccaaggatgaatgtaacctggcgcctgaatggaaaggagctgaatggctcggatgatgctctgggtgtcctcatcacccacgggaccctcgtcatcactgcccttaacaaccacactgtgggacggtaccagtgtgtggcccggatgcctgcgggggctgtggccagcgtgccagccactgtgacactagccagtgagtctgctcctttgcctccctgccatggtgcggtccctcctcatctctcccaccctgaagcccccaccattcatgctgcctcttgttactcttagcataaaatgggccttaactgcagaaatgtcaaatcagaacagtagctgcctagtaatgcccagtgatgggggacccttgtgcccttggaaaacctcactccaagtagaggctgtatctggagtgagtgtctacagagaggggaattggtcagtgcatggcagaacttgacatggcagaactgttccgtgggccccagagcagggccgtgccgtgccttcctacttggtcatcctgtggctgtaggtgcactgtcccaactgctcacacaccttccagtcccctccctccattctcaccacagttacagtcggagcagggagagacaggacaccaagagacatgggcagggccacgtgtagtctggacagagcccacccagcccagacttggcctcctgtctctctgtgaggggcaagcatagtccgaaggcctggattataaatattagaacataatgaaaaggaaactgtgtggcaaagggataaagggatacagagaaaagaaacaaggaagagatgaggtgacagtttggaccaaggaaaatgccaagagaagacttcacactaccttttttttttctggttttgccattcttttattcatgttgttacactcagtataggatagtttattaaaatcattatgtctgtagacattctaaaaaaaaaaaaaaaaaaaaaaaaaaa

SEQ ID NO: 3129 - DNA, 1006 bp, Homo sapiens
ttatgcgaacacaagtatatgaggggttgtgtaaaaattatttttctcttgctgtactacaaagagatagaatcaaactgctttttttcgacatactggtttttctttctgtttttcttctctttcttctatttcttgtggatattatggctaataacacaacaagtttagggagtccatggccagaaaacttttgggaggaccttatcatgtccttcactgtatccatggcaatcgggctggtacttggaggatttatttgggctgtgttcatttgtctgtctcgaagaagaagagccagcgctcccatctcacagtggagttcaagcaggagatctaggtcttcttacacccacggcctcaacagaactggattttaccgccacagtggctgtgaacgtcgaagcaacctcagcctggccagtctcaccttccagcgacaagcttccctggaacaagcaaattcctttccaagaaaatcaagtttcagagcttctactttccatccctttctgcaatgtccaccacttcctgtggaaactgagagtcagctggtgactctcccttcttccaatatctctcccaccatcagcacttcccacagtctgagccgtcctgactactggtccagtaacagtcttcgagtgggcctttcaacaccgcccccacctgcctatgagtccatcatcaaggcattcccagattcctgagtagggtggcttttggtttttgtttctttcttgtcttgtcttttattgaaaggaaatcaaaaataggctaaacagaattttgagggcatggcccaaataactcatgagttccaagttgaaacatggttgtgcaagttggacattacaatgtaaaacacattttcttcaaacacgttttcccttttgtttcaaaaaatgtaatattttcccccaagcgttttatatttatgtattttgtattcaatgtgaggcttattaaaaatagtgattctaatgtaagaatcagctaagatgca

SEQ ID NO: 3130 - DNA, 1270 bp, Homo sapiens; identical to SEQ ID NO: 2342

SEQ ID NO: 3131 - DNA, 790 bp, Homo sapiens; identical to SEQ ID NO: 2411

SEQ ID NO: 3132 - DNA, 1900 bp, Homo sapiens; identical to SEQ ID NO: 1899

SEQ ID NO: 3133 - DNA, 1081 bp, Homo sapiens; identical to SEQ ID NO: 2965

SEQ ID NO: 3134 - DNA, 4033 bp, Homo sapiens
agcggggggccgtttctccgcgccgctgttggtgctgccgctgcctcctcctcctccgccgccgccgccgccgccgccgcctcctccggctcttcgctcggcccctctccgcctccatgtgccggatagcgggagcgctgcggaccctgctgccgctgctggcggccctgcttcaggcgtctgtagaggcttctggtgaaatcgcattatgcaagactggatttcctgaagatgtttacagtgcagtcttatcgaaggatgtgcatgaaggacagcctcttctcaatgtgaagtttagcaactgcaatggaaaaagaaaagtacaatatgagagcagtgagcctgcagattttaaggtggatgaagatggcatggtgtatgccgtgagaagctttccactctcttctgaacatgccaagttcctgatatatgcccaagacaaagagacccaggaaaagtggcaagtggcagtaaaattgagcctgaagccaaccttaactgaggagtcagtgaaggagtcagcagaagttgaagaaatagtgttcccaagacaattcagtaagcacagtggccacctacaaaggcagaagagagactgggtcatctctccaatcaacttgccagaaaactccaggggaccttttcctcaagagcttgtcaggatcaggtctgatagagataaaaacctttcactgcggtacagtgtaactgggccaggagctgaccagcctccaactggtatcttcattatcaaccccatctcgggtcagctgtcggtgacaaagcccctggatcgcgagcagatagcccggtttcatttgagggcacatgcagtagatattaatggaaatcaagtggagaaccccattgacattgtcatcaatgttattgacatgaatgacaacagacctgagttcttacaccaggtttggaatgggacagttcctgagggatcaaagcctggaacatatgtgatgaccgtaacagcaattgatgctgacgatcccaatgccctcaatgggatgttgaggtacagaatcgtgtctcaggctccaagcaccccttcacccaacatgtttacaatcaacaatgagactggtgacatcatcacagtggcagctggacttgatcgagaaaaagtgcaacagtatacgttaataattcaagctacagacatggaaggcaatcccacatatggcctttcaaacacagccacggccgtcatcacagtgacagatgtcaatgacaatcctccagagtttactgccatgacgttttatggtgaagttcctgagaacagggtagacatcatagtagctaatctaactgtgaccgataaggatcaaccccatacaccagcctggaacgcagtgtacagaatcagtggcggagatcctactggacggttcgccatccagaccgaccaaaacagcaacgacgggttagtcaccgtggtcaaaccaatcgactttgaagcaaataggatgtttgtccttactgttgctgcagaaaatcaagtgccattagccaagggaattcagcacccgcctcagtcaactgcaaccatgtctgttacagttattgacgtaaatgaaaacccttattttgcccccaatcctaagatcattcgccaagaagaagggcttcatgccggtaccatgttgacaacattcactgctcaggacccagatcgatatatgcagcaaaatattagatacactaaattatctgatcctgccaattggctaaaaatagatcctgtgaatggacaaataactacaattgctgttttggaccgagaatcaccaaatgtgaaaaacaatatatataatgctactttccttgcttctgacaatggaattcctcctatgagtggaacaggaacgctgcagatctatttacttgatattaatgacaatgcccctcaagtgttacctcaagaggcagagacttgcgaaactccagaccccaattcaattaatattacagcacttgattatggcattgatccaaatgctggaccatttgcttttgatcttcctttatctccagtgactattaagagaaattggaccatcactcggcttaatggtgattttgctcagcttaatttaaagataaaatttcttgaagctggtatctatgaagttcccatcataatcacagattcgggtaatcctcccaaatcaaatatttccatactgcgcgtgaaggtttgccagtgtgactccaacggggactgcacagatgtggacaggattgtgggtgcggggcttggcaccggtgccatcattgccatcctgctctgcatcatcatcctgcttatccttgtgctgatgtttgtggtatggatgaaacgccgggataaagaacgccaggccaaacaacttttaattgatccagaagatgatgtaagagataatattttaaaatatgatgaagaaggtggaggagaagaagaccaggactatgacttgagccagctgcagcagcctgacactgtggagcctgatgccatcaagcctgtgggaatccgacgaatggatgaaagacccatccacgctgagccccagtatccggtccgatctgcagccccacaccctggagacattggggacttcattaatgagggccttaaagcggctgacaatgaccccacagctccaccatatgactccctgttagtgtttgactatgaaggcagtggctccactgctgggtccttgagctcccttaattcctcaagtagtggtggtgagcaggactatgattacctgaacgactgggggccacggttcaagaaacttgctgacatgtatggtggaggtgatgactgaacttcagggtgaacttggtttttggacaagtacaaacaatttcaactgatattcccaaaaagcattcagaagctaggctttaactttgtagtctactagcacagtgcttgctggaggctttggcataggctgcaaaccaatttgggctcagagggaatatcagtgatccatactgtttggaaaaacactgagctcagttacacttgaattttacagtacagaagcactgggattttatgtgcctttttgtacctttttcagattggaattagttttctgtttaaggctttaatggtactgatttctgaaacgataagtaaaagacaaaatattttgtggtgggagcagtaagttaaaccatgatatgcttcaacacgcttttgttacattgcatttgcttttattaaaatacaaaattaaacaaacaaaaaaactcatggagcgattttattatcttgggggatgagaccatgagattggaaaatgtacattacttctagttttagactttagtttgtttttttttttttcactaaaatcttaaaacttactcagctggttgcaaataaagggagttttcatatcaccaatttgtagcaaaattgaattttttcataaactagaatgttagacacattttggtcttaatccatgtacacttttttatttctgtatttttccacttcactgtaaaaatagtatgtgtacataatgttttattggcatagtctatggagaagtgcagaaacttcagaacatgtgtatgtattatttggactatggattcaggttttttgcatgtttatatctttcgttatggataaagtatttacaaaacagtgacatttgattcaattgttgagctgtagttaggatactcaatttttaatttttttaatttttttattttttattttctttttggtttggggagggagaaaagttcttagcacaaatgttttacataatttgtaccaaaaaaaaaaaaaaggaaaggaaagaaaggggtggcctgacactggtggcactactaagtgtgtgtttttttaaaaaaaaaatggaaaaaaaaaagcttttaaactggagagacttctgacaacagctttgcctctgtattgtgtaccagaatataaatgatacacctctgaccccagcgttctgaataaaatgctaattttggaaaaaaaaaaaaaaaa

SEQ ID NO: 3135 - DNA, 3564 bp, Homo sapiens
agcggagagaacgccggccaccttcccgcttccgagctgggtgcgcgccgagcacaggagggtgcaatacctgccttgcgtcgcccgtgccgctccagccaccgtcaaatccgggtagcgacccggggcgtttgcagcggtgccgaggaagaggacgggaacggtgttacgattgcctgcgtttaggaggtggctgcgttgtgggaaaagctatcaaggaagaaattgccaaaccatgtctttttttctgttttcagagtagttcacaacagatctgagtgttttaattaagcatggaatacagaaaacaacaaaaaacttaagctttaatttcatctggaattccacagagacaaggccactttatgtttcccaggctggactggaacccctgggctcaaatgatcctcctacctaagcctgcagagtagcgaggacttcagttttcttagctccctggacccggttgacctgttggctcttcccgctggctgctctatcacgtggtgctctccgactactcaccccgagtgtaaagtcttgctgctctgttgcccaggctggagtacagtggcaggatctcagctcactgcaatctccgtctctcaggtttaagcagttctcctgcctcagcctcccaagtaggtgggactacagaaccttcggctcgcgtgcttctgagctgctgtggatggcctcggctctctggactgtccttccgagtaggatgtcactgagatccctcaaatggagcctcctgctgctgtcactcctgagtttctttgtgatgtggtacctcagccttccccactacaatgtgatagaacgcgtgaactggatgtacttctatgagtatgagccgatttacagacaagactttcacttcacacttcgagagcattcaaactgctctcatcaaaatctatttctggtcattctggtgacctcccacccttcagatgtgaaagccaggcaggccattagagttacttggggtgaaaaaaagtcttggtggggatatgaggttcttacatttttcttattaggccaagaggctgaaaaggaagacaaaatgttggcattgtccttagaggatgaacaccttctttatggtgacataatccgacaagattttttagacacatataataacctgaccttgaaaaccattatggcattcaggtgggtaactgagttttgccccaatgccaagtacgtaatgaagacagacactgatgttttcatcaatactggcaatttagtgaagtatcttttaaacctaaaccactcagagaagtttttcacaggttatcctctaattgataattattcctatagaggattttaccaaaaaacccatatttcttaccaggagtatcctttcaaggtgttccctccatactgcagtgggttgggttatataatgtccagagatttggtgccaaggatctatgaaatgatgggtcacgtaaaacccatcaagtttgaagatgtttatgtcgggatctgtttgaatttattaaaagtgaacattcatattccagaagacacaaatcttttctttctatatagaatccatttggatgtctgtcaactgagacgtgtgattgcagcccatggcttttcttccaaggagatcatcactttttggcaggtcatgctaaggaacaccacatgccattattaacttcacattctacaaaaagcctagaaggacaggatactttgtggaaagtgttaaataaagtaggtactgtggaaaattcatggggaggtcagtgtgctggcttacactgaactgaaactcatgaaaaacccagactggagactggagggttacacttgtgatttattagtcaggcccttcaaagatgatatgtggaggaattaaatataaaggaattggaggtttttgctaaagaaattaataggaccaaacaatttggacatgtcattctgtagactagaatttcttaaaagggtgttactgagttataagctcactaggctgtaaaaacaaaacaatgtagagtttatttattgaacaatgtagtcacttgaaggttttgtgtatatcttatgtggattaccaatttaaaaatatatgtagttctgtgtcaaaaaacttcttcactgaagttatactgaacaaaattttacctgtttttggtcatttataaagtacttcaagatgttgcagtatttcacagttattattatttaaaattacttcaactttgtgtttttaaatgttttgacgatttcaatacaagataaaaaggatagtgaatcattctttacatgcaaacattttccagttacttaactgatcagtttattattgatacatcactccattaatgtaaagtcataggtcattattgcatatcagtaatctcttggactttgttaaatattttactgtggtaatatagagaagaattaaagcaagaaaatctgaagtattgtcttgtttttaaaaaatacagttcctagtgtttttagaagtcacttaatttgtctcatttttccacctggaaattaggaataatgtagaatgcaaggcagtaatttccttttggaaaggactctgaaggcagaaaagaagggagagaacctcatgggcagaatattataaaaagagtgtcatattccagcatttgaattggaaagagaagagtgaagatccaagttgcattattaatctgccctgtgttttttccttttaacaatcagtttgagctgctgctgttatgagtttctcatcaagatgaaagccctaatatgtaaagtcaaatccgatttaaattttgtgcttttatagaaagaaatttcttcatagacgtggtgatatatcatttgttggacctgctaatagtaggtcaaaggggagcactccttgccccctgttcctgggtttatgcagttttctttttagagtttatatagggcaagtggttctttttctctgaattacaggatggaaaaaggtcatatcctttgtcaggaaatataaacttgaaagtatgtagtcagctcttgtaatactcatatttatgattgtcctatatgaaaaacaacttcagttaaaactataatgtgtgattctgtataacaaggtgatgtctgtttcccagggctcagacctaatccagttataataaaatcaattaaatgaaatattctatagaatcgatctatgcccttgttaatctccatccatataggagtcacgttctttaagacagatggtggtagttatttttgtggcatggttagatttgactggttttgcagaagattacagttatgtactgcataatgacatatacaatagtggtcccataaaattataatggagcagaaaatctattgcctcatgatgttttagccgttttaatgtcatagcctagtgcattactcacgtgtctgtggagatgctggtgtaaacaaacctactacactgccagttgtataaaagtacagcacattcagttatgtacagtatgtaatactgataatgacaataaatgacaccggtttgtgtacaaaaaaaaaaaaaaa

SEQ ID NO: 3136 - DNA, 4818 bp, Homo sapiens
agcggggaagcggatcgggtggagtgtaggtcatatcgccgcgttgactagataacgaaggacaatgcatatatacaaaattgctgtattgcctggtgatatgcaactgtacctgtgacatcataattgcaccctccgacatgatatctcttccaaatgcttgatgaaaaaggtgggaggatcacttgagccagggagttgaaggctgcagtgagccctgtttttgccaccacactccagcttggagaggtgaggggctgtcctctggatggcaattgatgaaggatgagtctgtgccctgaaggggagatcagtccagcccagctccccactgctgcctcgtgtgtggtggcttctccaggagagaggattgattcctaaagactcatgttacgtgaggaagcagctcagaagaggaaaggaaaggagccaggcatggctcttcctcagggacgcttgactttccgggatgtggctatagaattctcattggcagagtggaaatgcctgaacccttcacagagggctttgtacagggaagtgatgttggagaactacaggaacctggaggctgtgggctgaagtgcaatggcacaatctgagttcaccgcaacctccacctcccggattcaaatggttctcctgcctcagcctcccgagaagctgggattacaggtagagtctcactttgtcacccaggctggagtgcagtggtgtgatcctggctcactgcaacctctacctcccagatatctcttccaaatgcatgatgaaggaggtcttgtcaacagggcaaggcaatacagaagtgatccacacagggacattgcaaagacatgaaagtcatcacattggagatttttgcttccaggaaattgagaaagaaattcatgacattgagtttcagtgtcaagaagatgaaagaaatggccttgaagcacccatgacaaaaataaaaaagttgactggtagcacagaccaacatgatcacaggcatgctggaaacaagcctattaaagatcagcttggatcaagcttttattcacatctgcctgaactccacatatttcagatcaaaggtgaaattggtaatcaacttgagaagtctactaatgatgctccctcagtttcaacattccaaagaatttcctgtaggccccaaacccagatttctaataactatgggaataatcccctgaattcttcattactcccacaaaaacaggaagtacacatgagagaaaaatctttccaatgtaataagagtggcaaagcctttaattgtagctcactcttaaggaaacaccagataatccatttaggagacaaacaatataaatgtgatgtatgtggcaagctctttaatcacgagcaataccttgcatgccatgatagatgtcacactgttgagaaaccttacaagtgtaaagagtgtggcaagaccttcagtcaggagtcatcccttacctgccatcgtagacttcatactggagtaaaacgttacaattgtaatgagtgtggcaagatctttggtcaaaattcagcccttctaattgataaggcaattgatactggagaaaatccttacaagtgtaatgaatgtgacaaggcttttaatcaacaatcacaactttcacatcatagaattcatactggagagaaaccttacaaatgtgaagaatgtgacaaagttttcagtcggaaatcaaccattgagacacataagagaattcatactggagagaaaccatacagatgtaaggtttgtgacacagctttcacgtggcattcacagctggctcgacatagaagaattcatactgcaaagaaaacttataaatgtaatgagtgtggcaagaccttcagtcacaagtcatcccttgtatgccatcatagacttcatggtggagagaaatcttacaaatgtaaggtttgtgacaaggcttttgtgtggagttcacaactggcaaaacatactagaattgactgtggagaaaaaccttacaagtgtaatgaatgtgggaagacctttggtcaaaattcagatcttttaattcataagtcaattcatactggggagcaaccttacaaatgtgatgaatgtgaaaaggttttcagtcgtaaatcaagccttgagacacataagataggtcatactggagagaaaccatacaaatgtaaggtttgtgacaaggcttttgcgtgtcattcctatctggcaaaacatactagaattcatagtggagagaaaccttacaagtgtaatgagtgcagcaagaccttcagtcacaggtcataccttgtatgccatcatagagttcatagtggtgagaaaccttacaagtgtaatgagtgcagcaagaccttcagtcgcaggtcatcccttcattgccatcgtagacttcatagtggtgagaaaccttacaagtgtaatgagtgtggcaataccttccgtcactgctcatcccttatataccatcgtagacttcatactggagagaaatcttacaaatgtacaatttgtgacaaggctttcgtgcgtaattcactcctgtcaagacataccagaattcacactgcagagaaaccttacaagtgtaatgaatgtgggaaggcttttaatcaacaatcacacctttcacgtcatcatagaattcatactggagagaaaccttagaaatgtgaagcatgtgacaaagtttccatttggaaatcacaccttaaagacataggagaatttatactggagagaaagcttacaaatgtaaggtttctgacaagacttgggagtgattcacacctggaacaacatactggacttcacactggagagaaaccttacaagtgtaatgagtgtggcaaagcctttggcaagcagtcaacacttattcaccatcaggcaattcatggtgtagggaaacttgactaatgtaatgattgtcacaaagtcttcagtaatgctacaacgattacaaatcattggagaatccataatgaagagagatcttacaagtgtaataaatgtggcaaatttttcagagatcgttcacatattgcaggtcatcggtgaactcatactggagagaaaccttacaaatgtcatgactgtgccaaggtcttcagtcaagcttcatcctatgcaaaacataggagaatttatacaggagagaaacctcacaagtgtgatgattgtggcaaagcctttgcttcacgttcacacgtcattagacatcagagaatctatactggacagaaatcttacaaatgtcatcagtgtggcaaggtcttcagtccaagatcactccatgcagaacatcagaaaattcatttttgagataaccgttcccaatgaaatgagtatagcaaaccatcaagcattaattgacattggagtcaattcagcattgacttgagtttgtgttgacttaacattgagttcaagcctttattgacattcaagtgtttatgttaagaggatggggccaggtgtggtggctccgacctgtaatcccagcacgtcgggaggccaaggcacataggtcacttgaggtcaggagtttgaagccagcatggccaacagatgtgagccacttttctcagcctgttttttgtttcttattttctattatttttttgagccagtactttttaaagagatagtacttttttcagttagtactttttaaaagggatatatcatagtaatttttaaaagggatatgaggccaggcacggaggctcatgcctataatcccagcactttgggaggccgaggcaggcagatcacggggtcaggagatcgagactttcctggctaacagggtgaatccctgtctctactaaaaatacaaaaaattagctgggtatggtggctggcgcctgtagtcccagctactccagatgctgaggcaggagaatggcatgaacctgtgaggcggagcttgcagggagtcgagatcgcaccactgggctccagcctgggcgacagagtgagagtctatctcaaaaaaaaaaaaaaaaaaaaaggatatcaaagcctcggtacgtggtggctcatccctgcaatcagagtactttggtcgacccatgtgaactggtcacctaaggtcacaatttcaaaagcaccctaacatggtgaaacctcatctctactaaaaatacaaaagttagccgggggtgttggtgtgcacctttagttccagctacttgggaggctggggcatgagaattgcttaaacctaggaggtagaagttgcagtgaaccaaaattgtgccactatactgcagcctgggtggcagagtgagtctccatctcaaacaaacaaaaaataacaaaaaaagacctcaaaaatgcttttcttctcgtataatggacttccttctttttctttctggttcctcttcatttctctctttattttttatttatttatttatttattttgcagtttgagtttgagataaatctaagttataaaagttgtatttcttaatacataatgacttctgaaagatgcctttgcagcatcctataatcagctcacattcgtttctgtacttgtatattttccagttattttccggttgaccccagaattcgttagatttttttaaaaaacaatttcaaaatagttgctgttttaaattagttgcatccagttcatatcaatgtctgcatgctttctagtctttgttatttattgaaaacctttggtacctaaacttaagtttgattgtttcagtgtgtacttggtaaatatgtcagtggccttttaactaaacatcaaaatgtactttaaaacaaaaaaaaaaaaaaaa

SEQ ID NO: 3137 - DNA, 3421 bp, Homo sapiens
agcgtggaggttcgcgagtctctgggtcgcgacgggaaggagtgaaacacctctctgcgcctgcgcgctccgtgcctgcgaagcaaacccggcctcaccttttcctgcccgaagcagaagattctcgcagtcctggtttctccctccagaagaccccccacccaaatcctctgtagctcctggtagtgccctgacccctgctgccaccgtccttcagagagcaacggaagagcttcccggagggcgaggaaaagagggaaagtagccagcaatgtcgaacgcaatgtataataagatgtggcatcagacccaagaagccctcggtgctttactcgataaagagcctcagaagatgattgaaccacaaagaaatcaggttttcatctttcaaacattagccaccttctacgtaaagtatgtgcagatctttagaaacctagagaatgtctacgaccagttcgtccacccccagaaacgaatactgatcaggaaagtcctggacggggtgatgggccgcatcctggagctgaagaacgagatggtggagctggaactcacggagttccattatttcgatgatatcctgcaggatctcaagctggccccccaacaattagatattcccatacccaagtattttttgaaggagaagttggaagtaataaaaggaagagagaaaattcttgctcaaatattagcggacagcggaatagatacatctgacatgaaataccctgtaaagagtatccctttcgatgaggctgttaaattaatccagattgctgagagggcacggcaaggtcgcctaagggctttattcatgaagcaaatctatctgcaagaatatagagcaaagcaatccaagatgcttggcaagaaagtgacagatacctgggctgctgcactccgcattcagaaggtttggcgacgtttccatcaacgtaaggaaactgaaaaactgagagaagaggagatgatcttcctgggtatgaatccacctcctctctttaatgaagtcagtgctacagtaatccaggctgaaaaggtggaccgcctgcggaatgaggtgcagataaagcatgaagaggactacagggaagccctggttaccatcaagaatgacctaaagttgatagaaggcgtggatatcaaggagaaccttcaagaccagatccggcattggttcatcgaatgcagaaatttaaccgggacatttcctgactaccctgacgttgaagaaggagggtcagctattattttttctgacaagaccatacaacaggttattgaggatatcatagcaaaccaagaggaagaagaaaaaaacaaaaagaagaagaagaaaaaggaaaaacaacccaagaaagccaaaaaacaaaagaaaggaacaaaggagaaaaataaggaagaagacgaaaaatggaaaatgtcaccaagtctttttcttcctgcaatgaaggaaggatgtaacgcatacaaagaaatctggatgaaaaaagatgagtcttggaatttctctcaggactatgatccagaactgatcaaagaggagaaacgaaaagaattacagtcagagatcaggatacaggttgatgagttgatgagacaggaacttaaaaacttaaagctagctgtggacagagaaagggagcgcccagtgaaagcaggaaagaaaaaggacaagaagaaaggaaagaaaggcaaaaagaaagagaagaaggcaaagaaggataaagatctgacagctgacaggaccatcgagtctctgtataaggaactggtggaagaaggattactgatccaggctctgaaagtcaacctctctgattacattggtgagtacagctacctggggactactcttcgccaggtgtccatagaacccatgccctccctcctggatgtcagacagctcatcacattgtacggaatctggccattaggttctgcagcagtgcatgagaaagctcctttggtgaaatcgctactgttagccgggccgtctggggtagggaagaaaatgctggtccatgccatctgcaccgaaacgggagccaacctcttcaacttgtcctcctctaacattgctgggaaataccctggcaaaaatggcctccaaatgatgctgcatgcagtcttcaaggtggctcgacagctccagccctccgtggtgtggattgaagacacagaaaaaaccttctacaaaaaagttcccaacgcagaaaagatgttcactccctctgctggcgaagttgctgcattgcagaaaaacttgaaaaggtccacaagtagaatgaacctaaacgcctgaaaaaacaccttccccaaatcctgaaactcctgaaaccagatgaccggattctgattgtggggaccacacggcgtcccttcgatgctgaactccaatctttctgcaaagtttaccaggaaattattttggtgcccagaccagactatgcttccagatacgttctgtggaagcaaatcattgaacgcaatggaggagtcctcaccagtgccttgaatgtcagctgcctggcgaaggtcactgacggcttcacccaaggacatatagtcgaagtggttaaaggcgtgctcacagatcagagaatccggcggcaaattcataaacctctcactgcagttgagtttattacggcgataaccagcatgaatccagtgtacaaagaggaagaagagagctttaagaactggtatgccaaaactcctctgggtaaaaaacgtgccttggcgataacaggaggcagcacagaaaaggcaaaggacaaagggaaaaggaaataaaagaaagagaaaaaggcaaaaaagaaaaagtaatgcctttctgaagaaccatgcttgagtctctctgggatggagaggaccccaactcgccaaagaaaagattcaccattgcccgcctgaagaagccctcaggggaaggaacttagcagtgtgcaggtgagctgatgccgcaaacccgctaaccactgcatgtgctgttatgcctttcccaggctggacacctagctgggtgttcatcataactttccacagctttaatccacgccaagtttgtatataactgaaattcactcttgacaccctccacagtctttccaagttggactcttcctctcatcagtactagttgtcaaatttaaaatgtgacagttaaagaatattctagtttgacaattagtaagcaatgagtatatcatcagtacactagctttttattaatccatgtacactgtatagtatcttgcatctattttaatgaattaattctttgctctagtaatagattttatataatgaaataaaggtgttgtccttgaaaaaaaaaaaaaaaaaaaaaaaaaaaaaaaaaaaaaaaaaaaaaaaaaaaaaaaaaaaaaaaaaacaaaaaaaaaaaaaa

SEQ ID NO: 3138 - DNA, 2190 bp, Homo sapiens
atgggaaaaaaatacaagaacattgttctactaaaaggattagaggtcatcaatgattatcattttagaatggttaagtccttactgagcaacgatttaaaacttaatttaaaaatgagagaagagtatgacaaaattcagattgctgacttgatggaagaaaagttccgaggtgatgctggtttgggcaaactaataaaaattttcgaagatataccaacgcttgaagacctggctgaaactcttaaaaaagaaaagttaaaagtaaaaggaccagccctatcaagaaagaggaagaaggaagtggatgctacttcacctgcaccctccacaagcagcactgtcaaaactgaaggagcagaggcaactcctggagctcagaaaagaaaaaaatcaaccaaagaaaaggctggacccaaagggagtaaggtgtccgaggaacagactcagcctccctctcctgcaggagccggcatgtccacagccatgggccgttccccatctcccaagacctcattgtcagctccacccaacacttcttcaactgagaacccgaaaacagtggccaaatgtcaggtaactcccagaagaaatgttctccaaaaacgcccagtgatagtgaaggtactgagtacaacaaagccatttgaatatgagaccccagaaatggagaaaaaaataatgtttcatgctacagtggctacacagacacagttcttccatgtgaaggttttaaacaccagcttgaaggagaaattcaatggaaagaaaatcatcatcatatcagattatttggaatatgatagtctcctagaggtcaatgaagaatctactgtatctgaagctggtcctaaccaaacgtttgaggttccaaataaaatcatcaacagagcaaaggaaactctgaagattgatattcttcacaaacaagcttcaggaaatattgtatatggggtatttatgctacataagaaaacagtaaatcagaagaccacaatctacgaaattcaggatgatagaggaaaaatggatgtagtggggacaggacaatgtcacaatatcccctgtgaagaaggagataagctccaacttttctgctttcgacttagaaaaaagaaccagatgtcaaaactgatttcagaaatgcatagttttatccagataaagaaaaaaacaaacccgagaaacaatgaccccaagagcatgaagctaccccaggaacagagtcagcttccaaatccttcagaggccagcacaaccttccctgagagccatcttcggactcctcagatgccaccaacaactccatccagcagtttcttcaccaagaaaagtgaagacacaatctccaaaatgaatgacttcatgaggatgcagatactgaaggaagggagtcattttccaggaccgttcatgaccagcataggcccagctgagagccatccccacactcctcagatgcctccatcaacaccaagcagcagtttcttaaccacgttgaaaccaagactgaagactgaacctgaagaagtttccatagaagacagtgcccagagtgacctcaaagaagtgatggtgctgaacgcaacagaatcatttgtatatgagcccaaagagcagaagaaaatgtttcatgccacagtggcaactgagaatgaagtcttccgagtgaaggtttttaatattgacctaaaggagaagttcaccccaaagaagatcattgccatagcaaattatgtttgccgcaatgggttcctggaggtatatcctttcacacttgtggctgatgtgaatgctgaccgaaacatggagatcccaaaaggattgattagaagtgccagcgtaactcctaaaatcaatcagctttgctcacaaactagaggaagttttgtgaatggggtgtttgaggtacataagaaaaatgtaaggggtgaattcacttattatgaaatacaagataatacagggaagatggaagtggtggtgcatggacgactgaccacaatcaactgtgaggaaggagataaactgaaactcacctgctttgaattggcaccgaaaagtgggaataccggggagttgagatctgtaattcatagtcacatcaaggtcatcaagaccaggaaaaacaagaaagacatactcaatcctgattcaagtatggaaacttcaccagactttttcttctaa

SEQ ID NO: 3139 - DNA, 2116 bp, Homo sapiens
agcggaggggcggtgtccaggcttccgggcgggtagtccttcggctccggagccgcgactgcgctcgcctaggtggtgggcggggagggaaggaagggagcgggcgcaaggcggcggcggcggctgcgggtgaggaacttgttgcgcccgcggctgcgcggtgcccctccctccgctccagttcgtcggggcgggcgcggcggcggcggcgaaggaggagcgcggccggggcgatgcggcgctacctgcgcgtcgtggtgctgtgtgtggcctgcggcttctgctcgctcctttacgctttcagccagctcgccgtgtccctggaagaaggaacgggcggcggtggcgggaagccgcaggccgcggtggcttcctggctcgcgggcggcggacgcggcgccgtgagaggcgccggcgtcgcgggccccgcagcgcatcccggcgtgtcggacaggtgtaaagatttctctctgtgttactggaatccctattggatgctgccctctgatgtttgtggaatgaactgcttttgggaagcggcttttaggtacagtctgaaaatacagcctgttgagaaaatgcatctagctgtagttgcctgtggtgaaagactggaagaaactatgaccatgttgaagtcagctatcattttcagcatcaaacctcttcaattccatatttttgctgaagatcagctacatcatagctttaaaggcagacttgacaactggtcatttctacaaacatttaattatacgttataccccataacctttccaagtgagaatgcagcagagtggaaaaaactctttaaaccatgtgcttcgcagagattgttcttgccgttaatcctgaaagaagttaactcactattgtatgtcgacactgatatcctttttttacgaccagttgatgatatttggtctttactaaagaaatttaattccacacaaattgctgcaatggcaccagaacatgaggaacctcgaataggatggtataatcgctttgctaggcatccatattatggaaaaactggagtaaactctggagttatgttgatgaacatgactcgaatgagaaggaagtatttcaagaatgatatgacaactgtacgactacaatggggagatatacttatgccattgcttaaaaaatacaaactaaacatcacatggggtgatcaagatctattgaatatcgtgttttttcataatccagaaagcctttttgtttttccgtgtcaatggaattatcgaccagatcattgtatatatggaagcaattgccaagaagcagaagaaggaggaatctttattcttcatgggaacagaggtgtttaccatgacgataagcaaccagcatttagagctgtttatgaagcactgagaaattgttcttttgaagatgacaacatccgttccttattaaaacctttagaactggaactacaaaaaacagtgcatacatactgtggaaaaatttacaaaatatttatcaaacaactagcaaaaagtgtaagagatcgttatgccagatcaccaaaggaaaagtgattcttggtgactgcttaatcaaatggatgaaaacaaagaatcagaagataagtgtgaaggaatcgtcttggatgaagtattcaggaaggaattactcatctccagaataattttttttttcctaaagaagttaagtaagcagtattttcaggtaatgaagaataagttaaaatcttgggcctcaacattgaacattttttatctctgatgttttgtaatgttacttgctatcattccagtattgatgaaaatactattgaatgggtttaacctgcagacttctgttgactcatactctcaagagtggtaggggtgtgtagatggagaaaatgtacctcaaacagtgccaacactcaagactgtgagtagagcaataattttatgtcagcactaacctcactttaaaagtgtgagaaaaaagtttgtttacaggagcagaaacaggtctgttgtttctgaagaaatgtgatgtaactgatgtaaccattgacaatctatgtgtgcctttatacatttcatctctgttttaaaatatttttatgacaaaaaaaaaaaaaaaa

SEQ ID NO: 3140 - DNA, 2756 bp, Homo sapiens; identical to SEQ ID NO: 1528

SEQ ID NO: 3141 - DNA, 4145 bp, Homo sapiens
agcgggagtggcggcggcggggcgctggggcggagactgcgacccggagccgcccggactgacggagcccactgcggtgcgggcgttggcgcgggcacggaggacccgggcaggcatcgcaagcgaccccgagcggagccccggagccatggccctgagcgagctggcgctggtccgctggctgcaggagagccgccgctcgcggaagctcatcctgttcatcgtgttcctggcgctgctgctggacaacatgctgctcactgtcgtggtccccatcatcccaagttatctgtacagcattaagcatgagaagaatgctacagaaatccagacggccaggccagtgcacactgcctccatctcagacagcttccagagcatcttctcctattatgataactcgactatggtcaccgggaatgctaccagagacctgacacttcatcagaccgccacacagcacatggtgaccaacgcgtccgctgttccttccgactgtcccagtgaagacaaagacctcctgaatgaaaacgtgcaagttggtctgttgtttgcctcgaaagccaccgtccagctcatcaccaaccctttcataggactactgaccaacagaattggctatccaattcccatatttgcgggattctgcatcatgtttgtctcaacaattatgtttgccttctccagcagctatgccttcctgctgattgccaggtcgctgcagggcatcggctcgtcctgctcctctgtggctggtaggtgtggaatgcctgagtgagttcgtgaggggccccttgcagagtgagctggactcattcagggaattcaggtattggtggtggttggggtgctggggattcttggagaaggcacccactttcctcttgggttctgcttggtcttacattttagtgaatctgacaggtttgggaagatcacaaggctggctggagagggaaggcgagtcacgcattattcttttgctgttccccggagctggcctgttgactatttctttccctgtgtagggatgggcatgcttgccagtgtctacacagatgatgaagagagaggcaacgtcatgggaatcgccttgggaggcctggccatgggggtcttagtgggcccccccttcgggagtgtgctctatgagtttgtggggaagacggctccgttcctggtgctggccgccctggtactcttggatggagctattcagctctttgtgctccagccgtcccgggtgcagccagagagtcagaaggggacacccctaaccacgctgctgaaggacccgtacatcctcattgctgcaggctccatctgctttgcaaacatgggcatcgccatgctggagccagccctgcccatctggatgatggagaccatgtgttcccgaaagtggcagctgggcgttgccttcttgccagctagtatctcttatctcattggaaccaatatttttgggatacttgcacacaaaatggggaggtggctttgtgctcttctgggaatgataattgttggagtcagcattttatgtattccatttgcaaaaaacatttatggactcatagctccgaactttggagttggttttgcaattggaatggtggattcgtcaatgatgcctatcatgggctacctcgtagacctgcggcacgtgtccgtctatgggagtgtgtacgccattgcggatgtggcattttgtatggggtatgctataggtccttctgctggtggtgctattgcaaaggcaattggatttccatggctcatgacaattattgggataattgatattctttttgcccctctctgcttttttcttcgaagtccacctgccaaagaagaaaaaatggctattctcatggatcacaactgccctattaaaacaaaaatgtacactcagaataatatccagtcatatccgataggtgaagatgaagaatctgaaagtgactgagatgagatcctcaaaaatcatcaaagtgtttaattgtataaaacagtgtttccagtgacacaactcatccagaactgtcttagtcataccatccatccctggtgaaagagtaaaaccaaaggttattatttcctttccatggttatggtcgattgccaacagccttataaagaaaaagaagctttctaggggtttgtataaatagtgttgaaactttattttatgtatttcattttattaaatatcatacaatatattttgatgaaataggtattgtgtaaatctataaatacttgaatccaaaccaaatataattttttaacttacattaacaaacatttgggcaaaaatcatattggtaatgagtgtttaaaattaaagcacacattatctctgagactcttccaacaaagagaaactagaatgaagtctgaaaaacagaatcaagtaagacagcatgttatatagtgacactgaatgttatttaacttgtagttactatcaatatatttatgcgttaaacagctagttctctcaagtgtagaggacaagaacttgtgtcagttatcttttgaatccataaatcttagctggcattagttttctatgtaatcacctacctagagagagttgtaaattatatgttaacatgttatctggttggcagcaaacactaaagccaataaaggaaaaacagtaaatgttccgaaagcagagaaaagcaaccaaacatattgttatgaactaaaagctttccctttaagatgcatacttgtcttactggatgaagaaaattgagggtacatgtaccttatactgtcaaggttgtttaaacatgataaggttaatcgccatctacttcaagttttagaaaaggaaacaagaagctaaaaacagctgctctgactttaatatctgactatatctttgatctgtttgcaggtcatccaagtgttttctaggaatatatttattttaggttgtctgaaactactattttttagactcctgaaagttgttcacatcaatgtgaagacaaattttaaatgaaaatgaagaatgaaattatgtcttgaatcatatattaagaagtaaaaataatagtgatcaggcagaaaagaaaaatggaacatctaaaaatgtatgtgctaactatatcatccagtgtgcagtgttgtgtatttttctaagcatgacaacattgatgtgccttttcagtgtaacagcaaatactgttagtgaacattgtcaatttatgtcattttgttaagagatatgactggagtgtgcagtgtggaatgtctctaatactacttgagaatcccgcagttctataatcataaacaaaaattacttagtttcgttaagctaagattgtgtttgtgttaacttcgacatcaaggagcaaagaactttagaacagactcctcaatcttgtgactttcttattctctaggaaagtaacacttcgtttcatgaagcttttctgtggggcttcgattatttcaagtctggtttctaagtgcagtgtgtttgaagcaaacgaacttccaactcacttatttggcattgggcaacttggccaagtctgctactttggaagatggctctggaggaaactctcatatggctaaaaaggcaggctagtttcttacttctacaggggtagagccttaaaaaagaacgtgctacaaattggttctctttgagggtttctggttctccctgcccccaataccatatactttactgcaattttatttttgcctttacggctctgtgtctttctgcaagaaggcctggcaaaggtatgcttgctgttggtccctcgggataagataaaatataaataaaaccttcagaactgttttggagcaaaagatagcttgtacttggggaaaaaaattctaagttcttttatatgactaatattcttggttagcaagactggaaagaggtgtttttttaaaatgtacataccagaacaaagaacatacagctctctgaacatttattttttgaacagaggtggtttttatgtttggacctggtaatacagatacaaaaactttaatgaggtagcaatgaatattcaactgtttgactgctaagtgtatctgtccatattttagcaagtttacttaataaatcttctgaaccatgaaaaaaaaaaaaaaaa

SEQ ID NO: 3142 - DNA, 2705 bp, Homo sapiens
agtcttcggggaggagctgcattacacacaggcttcggaggcttccgtggagaagcttggaggtaatggctgtcgtaaatgctagttattttcagagagttctcgaagatttggaataaagccgagccccagaaagacaggtcaaccacagaagtgctgagccaggtaaagaccctgctggacaagcagctggagtgagaatcaagacagctggaccacaggaccagacccagcagtatccatgtgacacataggttaatatcagagaagcacatgacctgggcaatctgcatgtgatgccaaccaagccttggaaagacagtgcaaccacagaagtgccgagctgggtaaaggccctgctggacaagcagttggagtgagaatcaagacagccggaccacaggaccagacccaccaggatccacatgacagtggtatcttccggtatcatcctattcaaacaacgtgttcaagcatccttggaaaattgaggtggagaacaggccacacaagctgtaaaccctttgtagtcataagacgaaagaggatttgttaagagtattgttttgggtagaacttgcattagcagtgacaaagatagccacctcaacctttggtaataacccttggcacacaaatataaaccataatggagtctgagtatgtcctatgcaactggaaagaccagttgtggccagcaaaagttttgtccagatctgaaacttcatcaaacagtaagaggaaaaaggcattttctctagaagttcaaatactctcactagatgaaaaaattaaattggacagcacagaaacaaagatcctaaataaatctcaaattgaagccattgctgcctcattaggactacagtcagaggacagtgctccacctacagaggaaactgcctatggaagatcactaaaagtggcactgggtattctgaatgagagaacaaatttgagtcaagcaagcacttcagatgaagaggagatcactatgctgtctcaaaatgtaccacaaaaacagtccgattcaccccctcataaaaaataccggaaggatgaaggtgacttaccagggtgtcttgaggaaagggaaaactcagcatgcttgttagcatcttcagagagtgatgattccctgtatgatgataaatcacaagcacccacaatggtcgatactattccaagtgaagtggaaacaaagtcattacaaaactctagctggtgcgagactttcccttcactttcggaagataatgatgaaaaagagaacaagaataagattgatatctcagcagttatgtctgtgcattctgcagtcaaagaggaaagtgcatgtgttaaagatgaaaagtttgctccacctttgtcacctttgtcatcagatatgctcattatgcccaaagctttgaaagaagagagcgaggatacctgcctagagaccctggctgttccctctgaatgctctgctttctcagagaatattgaggatcctggagagggtccctcaaatccatgcttagataccagccagaatcaaccttccatggaatcagagatgggggctgcagcatgccctgggagttgttcaagggaatgcgaggtttcatttagtgcctctaaccctgtctgggattattcacatcttatgagtagtgaaagaaattttcagagactggattttgaagaacttgaggaagaaggtcaagcctctgacaagtcattgcttccaagtcgcattaatctttctctattagatgatgatgaggaagacgaagaacttccacgcttcattttacattatgagacacatccgtttgaaacaggaatgatagtctggtttaaatatcagaaatatccatttttggccagcagtgataaaaagtatcagacgaaaagagaggaaagcaagtgtgctttttgttgaggcaaacatgaattctgaaaagaagggcattagagtaaattttagaagattaaagaaatttgattgtaaagagaaacaaatgctagtggacaaagccagggaggattatagtgagagtattgactggtgcatctcactaatttgtgactacagagttagaataggttgtggttctttcacgggctctttgcttgagtattatgctgctgatattagttacccagttaggaaagaaacaaaacaggatactttcaggaacaaatttccaaagctgcataatgaagatgccagggaaccgatggctgtaacttcccagaccaagaaaatgtccttccaaaaaattctccctgaccggatgaaggctgctcgggaccgagccaacaagaacctggtggacttcattgtgaatgcaaagggaacagagaaccatcttctggccattgtaaatggcacaaaaggatccagatggctgaaatcatttttgaatgcaaataggttcacaccctgtattgaaacatactttgaggatgaagatcagttggatgaagtggtgaaatatttacaagaagtctgcaatcaaatagatcaaataatgccaacttggataaaagatgataaaattaaatttatcctagaagttcttctgccagaagcaattatttgttcaatttctgctgttgatgggttagattacgaggcagctgaagcaaagtatctaaaaggaccatgtctaggctacagggaaagagaattatttgatgcaaaaaaaaaaaaaaaa

SEQ ID NO: 3143 - DNA, 2034 bp, Homo sapiens
atgagagaagaccattcttttcatgttcgttacagaatggaagcttcttgcctagagctggccttggaaggggaacgtctatgtaaatcaggagactgccgcgctggcgtgtcattctttgaagctgcagttcaagttggaactgaagacctaaaaacacttagcgctatttacagccagttgggcaatgcttatttctatttgcatgattatgccaaagcattagaatatcaccatcatgatttaacccttgcaaggactattggagaccagctgggggaagcgaaagctagtggtaatctgggaaacaccttaaaagttcttgggaattttgacgaagccatagtttgttgtcagcgacacctagatatttccagagagcttaatgacaaggtgggagaagcaagagcactttacaatcttgggaatgtgtatcatgccaaagggaaaagttttggttgccctggtccccaggatgtaggagaatttccagaagaagtgagagatgctctgcaggcagccgtggatttttatgaggaaaacctatcattagtgactgctttgggtgaccgagcggcacaaggacgtgcctttggaaatcttggaaacacacattacctccttggcaacttcagggatgcagttatagctcatgagcagcgtctccttattgcaaaagaatttggagataaagcagctgaaagaagagcatatagcaaccttggaaatgcatatatatttcttggtgaatttgaaactgcctcggaatactacaagaagacactactgttggcccgacagcttaaagaccgagctgtagaagcacagtcttgttacagtcttggaaatacatatactttacttcaagactatgaaaaggccattgattatcatctgaagcacttagcaattgctcaagagctgaatgatagaattggtgaaggaagagcatgttggagcttaggaaatgcatacacagcactaggaaatcatgatcaagcaatgcattttgctgaaaagcacttggaaatttcaagagaggttggggataaaagtggtgaactaacagcacgacttaatctctcagaccttcaaatggttcttggtctgagctacagcacaaataactccataatgtctgaaaatactgaaattgatagcagtttgaatggtgtacgccccaagttgggacgccggcatagtatggaaaatatggaacttatgaagttaacaccagaaaaggtacagaactggaacagtgaaattcttgctaagcaaaaacctcttattgccaaaccttctgcaaagctactctttgtcaacagactgaaggggaaaaaatacaaaacgaattcctccactaaagttctccaagatgccagtaattctattgaccaccgaattccaaattctcagaggaaaatcagtgcagatactattggagatgaagggttctttgacttattaagccgatttcaaagcaataggatggatgatcagagatgttgcttacaagaaaagaactgccatacagcttcaacaacaacttcttccactccccctaaaatgatgctaaaaacatcatctgttcctgtggtatcccccaacacggatgagtttttagatcttcttgccagctcacagagtcgccgtctggatgaccagagggctagtttcagtaatttgccagggcttcgtctaacacaaaacagccagtcggtacttagccacctgatgactaatgacaacaaagaggctgatgaagatttctttgacatccttgtaaaatgtcaaggatccagattagatgatcaaagatgtgctccaccacctgctaccacaaagggtccgacagtaccagatgaagactttttcagccttattttacggtcccagggaaagagaatggatgaacagagagttcttttacaaagagatcaaaacagagacactgactttgggctaaaggactttttgcaaaataatgctttgttggagtttaaaaattcagggaaaaaatcggcagaccattag

SEQ ID NO: 3144 - DNA, 3743 bp, Homo sapiens
ccacgcgtccgctcagctgcgttacgcgccgctccggctgccggccgcgcgccttgcccgccggctcccgcccgcaatcggcggctcagggcggacccgggtctctgcgttctcgcgagaagcgcggcgctgcggggccgtgggcgcctgagcccgcgcggccctcgagggccgaatatggggggatgcacggtgaagcctcagctgctgctcctggcgctcgtcctccacccctggaatccctgtctgggtgcggactcggagaagccctcgagcatccccacagataaattattagtcataactgtagcaacaaaagaaagtgatggattccatcgatttatgcagtcagccaaatatttcaattatactgtgaaggtccttggtcaaggagaagaatggagaggtggtgatggaattaatagtattggagggggccagaaagtgagattaatgaaagaagtcatggaacactatgctgatcaagatgatctggttgtcatgtttactgaatgctttgatgtcatatttgctggtggtccagaagaagttctaaaaaaattccaaaaggcaaaccacaaagtggtctttgcagcagatggaattttgtggccagataaaagactagcagacaagtatcctgttgtgcacattgggaaacgctatctgaattcaggaggatttattggctatgctccatatgtcaaccgtatagttcaacaatggaatctccaggataatgatgatgatcagctcttttacactaaagtttacattgatccactgaaaagggaagctattaacatcacattggatcacaaatgcaaaattttccagaccttaaatggagctgtagatgaagttgttttaaaatttgaaaatggcaaagccagagctaagaatacattttatgaaacattaccagtggcaattaatggaaatggacccaccaagattctcctgaattattttggaaactatgtacccaattcatggacacaggataatggctgcactctttgtgaattcgatacagtcgacttgtctgcagtagatgtccatccaaacgtatcaataggtgtttttattgagcaaccaaccccttttctacctcggtttctggacatattgttgacactggattacccaaaagaagcacttaaactttttattcataacaaagaagtttatcatgaaaaggacatcaaggtattttttgataaagctaagcatgaaatcaaaactataaaaatagtaggaccagaagaaaatctaagtcaagcggaagccagaaacatgggaatggacttttgccgtcaggatgaaaagtgtgattattactttagtgtggatgcagatgttgttttgacaaatccaaggactttaaaaattttgattgaacaaaacagaaagatcattgctcctcttgtaactcgtcatggaaagctgtggtccaatttctggggagcattgagtcctgatggatactatgcacgatctgaagattatgtggatattgttcaagggaatagagtaggagtatggaatgtcccatatatggctaatgtgtacttaattaaaggaaagacactccgatcagagatgaatgaaaggaactattttgttcgtgataaactggatcctgatatggctctttgccgaaatgctagagaaatgactttacaaagggaaaaagactcccctactccggaaacattccaaatgctcagccccccaaagggtgtatttatgtacatttctaatagacatgaatttggaaggctattatccactgctaattacaatacttcccattataacaatgacctctggcagatttttgaaaatcctgtggactggaaggaaaagtatataaaccgtgattattcaaagattttcactgaaaatatagttgaacagccctgtccagatgtcttttggttccccatattttctgaaaaagcctgtgatgaattggtagaagaaatggaacattacggcaaatggtctgggggaaaacatcatgatagccgtatatctggtggttatgaaaatgtcccaactgatgatatccacatgaagcaagttgatctggagaatgtatggcttcattttatccgggagttcattgcaccagttacactgaaggtctttgcaggctattatacgaagggatttgcactactgaattttgtagtaaaatactcccctgaacgacagcgttctcttcgtcctcatcatgatgcttctacatttaccataaacattgcacttaataacgtgggagaagactttcagggaggtggttgcaaatttctaaggtacaattgctctattgagtcaccacgaaaaggctggagcttcatgcatcctgggagactcacacatttgcatgaaggacttcctgttaaaaatggaacaagatacattgcagtgtcatttatagatccctaagttatttacttttcattgaattgaaatttattttgggtgaatgactggcatgaacacgtctttgaagttgtggctgagaagatgagaggaatatttaaataacatcaacagaacaacttcactttgggccaaacatttgaaaaactttttataaaaaattgtttgatatttcttaatgtctgctctgagccttaaaacacagattgaagaagaaaagaaagaaaaaacttaaatatttatttctatgctttgttgcctctgagaataatgacaatttatgaatttgtgtttcaaattgataaaatatttaggtacaaataacaagactaataatattttcttatttaaaaaaagcatgggaagatttttatttatcaaaatatagaggaaatgtagacaaaatggatataaatgaaaattaccatgttgtaaaaccttgaaaatcagattctaactggatttgtatgcaactaagtatttttctgaacacctatgcaggtcttatttacagtagttactaagggaacacacaaagaattacacaacgttttcctcaagaaaatggtacaaaacacaaccgaggagcgtatacagttgaaaacatttttgttttgattggaaggcagattattttatattagtattaaaaatcaaaccctatgtttctttcagatgaatcttccaaagtggattatattaagcaggtattagatttaggaaaacctttccatttcttaaagtattatcaagtgtcaagatcagcaagtgtccttaagtcaaacaggttttttttgttgttgtttttgctttgtttccttttttagaaagttctagaaaataggaaaacgaaaaatttcattgagatgagtagtgcatttaattattttttaaaaaactttttaagtacttgaattttatatcaggaaaacaaagttgttgagccttgcttcttccgttttgccctttgtctcgctccttattctttttttggggggagggttatttgcttttttatcttcctggcataatttccattttattcttctgagtgtctatgttaacttccctctatcccgcttataaaaaaattctccaacaaaaatacttgttgacttgatgttttatcacttctctaagtaaggttgaaatatccttattgtagctactgtttttaatgtaaaggttaaacttgaaaagaaattcttaatcacggtgccaaaattcattttctaacaccatgtgttagaaaattataaaaaataaaataattttagaaaaaaaaaaaaaaa

SEQ ID NO: 3145 - DNA, 2269 bp, Homo sapiens; identical to SEQ ID NO: 1928

SEQ ID NO: 3146 - DNA, 2370 bp, Homo sapiens; identical to SEQ ID NO: 563

SEQ ID NO: 3147 - DNA, 2792 bp, Homo sapiens; identical to SEQ ID NO: 2521

SEQ ID NO: 3148 - DNA, 6875 bp, Homo sapiens
ccacgcgtccgggagacgccagccaaagtaggcggagttgcggaaggagagtccgatctgcgcaatccagtccgggacttggctccgcccgggagcggcggcctctccggtgacagaggagtagtgagcggcacggggtgaggctgcagccaactccgctccccgcgcactcggctgcccaggcgctcggaacccagcagcggcgctcctccgcggtgccggtcgcccgcgatgcccgcttagcagcgtgtagcagcggccagcatcaccacacccgcggcaccgcgctgccggccgcagagccgggccagagccttgcacccctgcctcagcccccaccccgccccccgccctgaattgacttgttaatcggcgcagacaccaccaaggggactcaccggagtggaatccaagtggaatttggatttggagaagagtttcttgaacatttaccctcttccttgttggttttctttttctttttcttctttttttttttggcttcttttttcctctccccttctccgctcgtcattggagatgaacacatcgcgtttgcatcccagaaagtagtcgccgcgactatttcccccaaagagacaagcacacatgtaggaatgacaaaggcttgcgaaggagagagcgcagcccgcggcccggagagatcccctcgataatggattactaaatgggatacacgctgtaccagttcgctccgagccccggccgcctgtccgtcgatgcaccgaaaagggtgaagtagagaaataaagtctccccgctgaactactatgaggtcagaagccttgctgctatatttcacactgctacactttgctggggctggtttcccagaagattctgagccaatcagtatttcgcatggcaactatacaaaacagtatccggtgtttgtgggccacaagccaggacggaacaccacacagaggcacaggctggacatccagatgattatgatcatgaacggaaccctctacattgctgctagggaccatatttatactgttgatatagacacatcacacacggaagaaatttattgtagcaaaaaactgacatggaaatctagacaggccgatgtagacacatgcagaatgaagggaaaacataaggatgagtgccacaactttattaaagttcttctaaagaaaaacgatgatgcattgtttgtctgtggaactaatgccttcaacccttcctgcagaaactataagatggatacattggaaccattcggggatgaattcagcggaatggccagatgcccatatgatgccaaacatgccaacgttgcactgtttgcagatggaaaactatactcagccacagtgactgacttccttgccattgacgcagtcatttaccggagtcttggagaaagccctaccctgcggaccgtcaagcacgattcaaaatggttgaaagaaccatactttgttcaagccgtggattacggagattatatctacttcttcttcagggaaatagcagtggagtataacaccatgggaaaggtagttttcccaagagtggctcaggtttgtaagaatgatatgggaggatctcaaagagtcctggagaaacagtggacgtcgttcctgaaggcgcgcttgaactgctcagttcctggagactctcatttttatttcaacattctccaggcagttacagatgtgattcgtatcaacgggcgtgatgttgtcctggcaacgttttctacaccttataacagcatccctgggtctgcagtctgtgcctatgacatgcttgacattgccagtgtttttactgggagattcaaggaacagaagtctcctgattccacctggacaccagttcctgatgaacgagttcctaagcccaggccaggttgctgtgctggctcatcctccttagaaagatatgcaacctccaatgagttccctgatgataccctgaacttcatcaagacgcacccgctcatggatgaggcagtgccctccatcttcaacaggccatggttcctgagaacaatggtcagataccgccttaccaaaattgcagtggacacagctgctgggccatatcagaatcacactgtggtttttctgggatcagagaagggaatcatcttgaagtttttggccagaataggaaatagtggttttctaaatgacagccttttcctggaggagatgagtgtttacaactctgaaaaatgcagctatgatggagtcgaagacaaaaggatcatgggcatgcagctggacagagcaagcagctctctgtatgttgcgttctctacctgtgtgataaaggttccccttggccggtgtgaacgacatgggaagtgtaaaaaaacctgtattgcctccagagacccatattgtggatggataaaggaaggtggtgcctgcagccatttatcacccaacagcagactgacttttgagcaggacatagagcgtggcaatacagatggtctgggggactgtcacaattcctttgtggcactgaatgggcattccagttccctcttgcccagcacaaccacatcagattcgacggctcaagaggggtatgagtctaggggaggaatgctggactggaagcatctgcttgactcacctgacagcacagaccctttgggggcagtgtcttcccataatcaccaagacaagaagggagtgattcgggaaagttacctcaaaggccacgaccagctggttcccgtcaccctcttggccattgcagtcatcctggctttcgtcatgggggccgtcttctcgggcatcaccgtctactgcgtctgtgatcatcggcgcaaagacgtggctgtggtgcagcgcaaggagaaggagctcacccactcgcgccggggctccatgagcagcgtcaccaagctcagcggcctctttggggacactcaatccaaagacccaaagccggaggccatcctcacgccactcatgcacaacggcaagctcgccactcccggcaacacggccaagatgctcattaaagcagaccagcaccacctggacctgacggccctccccaccccagagtcaaccccaacgctgcagcagaagcggaagcccagccgcggcagccgcgagtgggagaggaaccagaacctcatcaatgcctgcacaaaggacatgccccccatgggctcccctgtgattcccacggacctgcccctgcgggcctcccccagccacatccccagcgtggtggtcctgcccatcacgcagcagggctaccagcatgagtacgtggaccagcccaaaatgagcgaggtggcccagatggcgctggaggaccaggccgccacactggagtataagaccatcaaggaacatctcagcagcaagagtcccaaccatggggtgaaccttgtggagaacctggacagcctgccccccaaagttccacagcgggaggcctccctgggtcccccgggagcctccctgtctcagaccggtctaagcaagcggctggaaatgcaccactcctcttcctacggggttgactataagaggagctaccccacgaactcgctcacgagaagccaccaggccaccactctcaaaagaaacaacactaactcctccaattcctctcacctctccagaaaccagagctttggcaggggagacaacccgccgcccgccccgcagagggtggactccatcccggtgcacagctcccagccatctggccaggccgtgactgtctcgaggcagcccagcctcaacgcctacaactcactgacaaggtcggggctgtagcgtacgccctcgctaaagccggacgtaccccccaaaccatcctttgctcccctttccacatccatgaagcccaatgatgcgtgtacataatcccagggggagggggtcaggtgtcgaaccagcaggcaaggcgaggtgcccgctcagctcagcaaggttctcaactgcctcgagtacccaccagaccaagaaggcctgcggcagagccgaggacgctgggtcctcctctctgggacacaggggtactcacgaaaactgggccgcgtggtttggtgaaggtttgcaacggcggggactcaccttcattctcttccttcactttcccccacaccctacaacaggtcggacccacaaaagacttcagttatcatcacaaacatgagccaaaagcacatacctaccccatcccccacccccacacacacacacacatgcacacaacacatacacacacacgcacagaggtgaacagaaactgaaacattttgtccacaacttcacgggacgtggccagactgggtttgcgttccaacctgcaaaacacaaatacattttttaaaatcaagaaaatttaaaaagacaaaaaaaaaagaattcattgataattctaactcagactttaacaatggcagaagtttactatgcgcaaatactgtgaaatgcccgccagtgttacagctttctgttgcagcagataaatgccatgttgggcaactatgtcatagatttctgctcctcctctcttttaatgaaataacgtgaccgttaacgcaagtaactctttatttattgttcaccctttttttccttaaggaaaggactcttccaaatatcatcctatgaacagctcttcagaaagcccattgaaagttaaactatttaacgtgaaatccattaactggaataattgagtttctttatttttacaataaattcactgagtaaataagttggagctggaattctgagctttgtgtttggactgtctggtctgtagctaaaggaaaaagttaggaggggaatatttatttaaatctatcagttcattgcctggtcaggtctctggcctataaacatgcaaaaaaactaattcatgttaaagtccttccagatcctaatttctaaagcaatcaggagagaaagcttttagaatggcacatcatatctcattgatgccaacatggttttgtccatggttctgactttctgtgaaggcaccagcttgcaatatgccatcccatttcaccttgcatgtgagacagcaaacaaaatccacaaatggtgtgaactaatatgctggctgctaccttgcataaattaatgatttgatcacacgggttcttcgtggggttacatctgtgaatagcctgttttccacatgtaaatttgtgccttacaccttgagttgtgtacacttgtaaactctttatgatcaactgttcccccttttgaaataagtgcagatatttatttaaccctcccttccccaccctctgccccacttccagccctctgaaagattggagtcaagcagatggaagaatgcagtggtgatagttgtcatgcgacagcctgagaacgctgggcagcaccacaccctccaattcacactgccttctagttgtgccaactggaaccaccctttggctgtgctgcgaagcatggaccccagtgttgttgtgggtgtgtcaaatcccctttcatcctcaagagctccctgcttcccttagattatttcaatacggtgatatccttatttgctagcagaaaagggactaacgtcccattcctcttttctgctgcgtccactggctagagagcaggcggtgcgcggttgggcagacacctgggaggagtctccaagccatgtgcacagcacacacgtgcagtgcacacaaagaaatgacatggaaatagatgcaggcaggctggtccctgctgtgattaacgagtaactccaagtacaaggccgaccacaatggatgctgcaaaaacgttgactggggcaaaggattttttattttattttttattttgttaattatgtttttaggggatgggaggtggtgtgtgtttttctcctcttggttttcatttgctcaagcacacaaaagggacttttgtttactctatcatgaacaaaggaactgtccacatactgtaaaccatgagcagtgttgttgttgtttttttaaacagtatatttggtggtctctttgtctgcttttatttccagttcgatcttctgggtttagttttgtctttaaaaagaattcaaaaaaagactgacaatgacagttttgagttggatagtgaaaaagtggagcctccataatcagtgtggttgccttcagacctgagtacttagctgagggtgggtgagagccctttgttccaaaagtccattagttttgctgttgtttaggagtaggtggttgttgttgtttttactttttttttttttggcttttgtaatggaatccatgttcacatcctgtgaactctgtctcctgaaaccctgaagtatttcctagaacctgaaatattgttttcttccttgaattttctctagaaatgcagaaattaggaaggtgatgggtctgtatccccctgcccccttctttcccatgcttgactcccgagagtactggcagtgcagcacccatcattgacgtaagcggctgtcttgtccagtgtttgtaggcatcactgcctcagctgttaaggagacctgtgtcaaaacttacatccacattcctacacccccacaacccatcacttctggtgttaaccctaaaatacccacatgtattgagctggtcttctgcatttaagtatttctccccagtttttttccccactgtgtgtggggggagggtccataaacccgagtgtgcctttgctttccacccttgctagacactggtagatgcaacaaactcagatttatatttgttgtaaagttgtaaaaatattgtgatgtcaccaattttccttccatctccacatcccctaacatctgattcacgacttaatgtatgttgtaagaaaagaaaaaagaaaagaaaaaaaaaaaaaaaa

SEQ ID NO: 3149 - DNA, 2247 bp, Homo sapiens
attttcccagagcccttccccaggctggcggaggctggctttggccctggagtcctcagaaaaccccccagcatctctgcctgtgtagtggggactccgagtggattttagttgtaatgctggcaagagttgtccccgtgcagacgtcaccttggaggaaaaggggtgtgcttcccaggtccccagccacagccccaagaaggaattgcctgcggaagagccttcagtgctgggcccatcggatgagcctccccgaccccagccaagggctgcccagcctgctgagccgggacagtggaggcttcccccaagttcaaagcagccgctgagcccggggccccagaagacattccaggccctgcaagaaagcagtccccagggcccctcaccatggccagaggagagttcccgagatcaggagctggcggctgtgctggagtgcctgacctttgaggatgtgccagagaataaggcgtggcctgcacaccccctgggattcggaagcagaaccccagacaaggaggaatttaaacaagaagagcccaaaggggctgcctggcccactcccatcttagcagagtcccaggcagatagtcctggggtgccgggagagccttgcgcccagtcgctcggacggggcgctgcggctagcggccctggtgaagatgggtcccttcttggcagcagtgaaattttggaggtcaaagtggctgagggcgtccccgagcccaatccggagttgcagttcatctgcgcggactgcggggtgagcttcccgcagctgtctcgcctgaaggcgcaccagctgcgctcgcacccggctgggcgctccttcctgtgcctttgctgcgggaagagcttcggccgcagctccattctcaagctgcacatgcgcactcacacggacgagcggccgcacgcctgccacctgtgcggccaccgcttccgccagagctcgcacctgagcaagcacctgctgacccactcctccgaacccgccttcctgtgcgcagagtgcggccgcggcttccagcgccgcgccagccttgtgcagcacctgctggcgcacgcccaggaccagaagccgccctgcgctcctgagagtaaggccgaagcgccgccactgaccgatgtcctgtgctcccactgcggccagagcttccagcgccgctccagcctcaagcgccacctgcggatccacgccagggacaaggaccgccggtcctccgaaggctccggcagccgccgccgggactccgaccggaggcccttcgtgtgcagcgactgcggcaaggccttccggcgcagcgagcacctggtggcccaccggagggtgcacacgggcgagcggcccttctcctgccaggcttgcggccgcagcttcacgcagagctcgcagctggtcagccaccaacgggtgcacacgggcgagaagccctacgcctgtccgcagtgcgggaagcgctttgtgcgccgggccagccttgcccgccacctgctgacccacggtggccctcggccccaccactgcacccagtgcgggaagagtttcggccagacccaggatctggcccgccaccagcgcagccacacgggcgagaagccctgccgctgcagcgagtgcggtgagggcttcagccagagcgcccacctggcgcgccaccagcgcatccacacaggggagaagccccacgcctgcgacacctgcggccaccgtttccgcaatagctccaacctggcccgccatcgccgcagccacacgggcgagcggccctacagctgtcagacgtgcggtcgcagcttccggcgcaacgcgcatctgcggcggcacctggctacccatgcggagcccgggcaggagcaggccgagcccccgcaggagtgcgtggagtgcgggaagagcttcagccgcagctgcaatctgctgcgacacctgctggtgcacacgggcgccaggccctactcctgcacgcagtgtggccgcagcttcagccgcaactcccacctgctgcgccacctgcgcacccacgcccgcgagacgctgtactagcttggcccgccttccgccagccgcgccctgcgccacctacccggggtcctccacagcggaggcctgcaggaatgtcccttcccaccacaccccacttccctctccttccactttcacagctgtccttccctggccgaggcattgctttctggcctcagctatgtaattaaaacgcccgaagtaaaatggccttctcc

SEQ ID NO: 3150 - DNA, 1122 bp, Homo sapiens
ctgggccgaccaatcagcgaggagcgcgggcagccggggcggctgctgctctcgtgagaacagaggacccaggccctcggaggagcttcgcggtgccagcctctgcaggtcctctgagggagcaacatcagggctccctcaggttcagaggtcgcctctagcttcccaggccagtcagccacggagcccgtgggcaggaagggcagcaggatggctgccaaggaccagttggaggttcaagttatggccgcccaggaaatggagcttgcaggaaaggatccagtaagtcatgagcatgaggaaagaaaacctgttacagagacaaaggagggagatgtaactgatgagcatggggaaagaggatcttttgctgaaacagatgaacacacgggggttgataccaaggagctagaagatattgcagctgacattaaagagcatcttgctgcaaagagaaaaaggattgaaaagattgcaaaagcttgcagcgaaataaagaacagaattaaaaatgttttgagaacaacacaactaaaaaggcagaaacgtgattatagaatttctctgaagttgccgaatgtccttgaagagttcatcacagatgagcagaaagatgaggaaggagatggagaaaaggaagaacaaattaaaatatttcaagagcaacaaaagaggtggcaacaagatgggaaaggaactgaaagagattgagccaccacacgagcaattcacaaagctgcagcaagagttggcacttattcagatgtatcttcaacctctgttattctggtgactgacaaaagaacttgaacctatgttatatgatacatgcataacttgagctacactaaaccacatgacagtgtttagttaattcttgtataaattagtatatctcttctattattagtctgtttgttaaatgccagaccacgtttctatgatctgttgaatgaaccctagacagttctgtgagaaagcagcaattgcacagttacatacacagtcaattaaattttaacattaaagataatttagttttaggtttggcctctgtggatctgtatcagttccaaaatgtggaaagcacgggcatggaaaagtacatttttctctaataaa

SEQ ID NO: 3151 - DNA, 3020 bp, Homo sapiens
ccacgcgtccgggccggattctcggcaccctgcgggggtggaggagggcgggcggggccttcaggcccaggagcgccagagacctatggggttcgcctgaagcccccggaatgtgtgagacacttcttactagtaaatgggcttcagtatcccccctccctgcactcctgcaggaaggtgagaatcgggacagtcgcaggctgggagacgctctgcttttcctgcgtcctgctgggagctgcgcgctccaggtatcctggcctgccgccctagccggcccaaggtgaagtggaggttctggatccgaacgaccctttaggaccccttgatgggcaggacggcccgattccaactctgaaaggttactttctgaattttctggagccagtaaacaatatcaccattgtccaaggccagacggcaattctgcactgcaaggtggcaggaaacccaccccctaatgtgcggtggctaaagaatgatgccccggtggtgcaggagccgcggcggatcatcatccggaagacagaatatggttcacgactgcgaatccaggacctggacacgacagacactggctactaccagtgcgtggccaccaacgggatgaagaccattaccgccactggcgtcctgtttgtgcggctgggtccaacgcacagcccaaatcataactttcaggatgattaccacgaggatgggttctgccagccttaccggggaattgcctgtgcacgcttcattggcaaccggaccatttatgtggactcgcttcagatgcagggggagattgaaaaccgaatcacagcggccttcaccatgatcggcacgtctacgcacctgtcggaccagtgctcacagttcgccatcccatccttctgccacttcgtgtttcctctgtgcgacgcgcgctcccggacacccaagccgcgtgagctgtgccgcgacgagtgcgaggtgctggagagcgacctgtgccgccaggagtacaccatcgcccgctccaacccgctcatcctcatgcggcttcagctgcccaagtgtgaggcgctgcccatgcctgagagccccgacgctgccaactgcatgcgcattggcatcccagccgagaggctgggccgctaccatcagtgctataacggctcaggcatggattacagaggaacggcaagcaccaccaagtcaggccaccagtgccagccgtgggccctgcagcacccccacagccaccacctgtccagcacagacttccctgagcttggaggggggcacgcctactgccggaaccccggaggccagatggagggcccctggtgctttacgcagaataaaaacgtacgcatggaactgtgtgacgtaccctcgtgtagtccccgagacagcagcaagatggggattctgtacatcttggtccccagcatcgcaattccactggtcatcgcttgccttttcttcttggtttgcatgtgccggaataagcagaaggcatctgcgtccacaccgcagcggcgacagctgatggcctcgcccagccaagacatggaaatgcccctcattaaccagcacaaacaggccaaactcaaagagatcagcctgtctgcggtgaggttcatggaggagctgggagaggaccggtttgggaaagtctacaaaggtcacctgttcggccctgccccgggggagcagacccaggctgtggccatcaaaacgctgaaggacaaagcggaggggcccctgcgggaggagttccggcatgaggctatgctgcgagcacggctgcaacaccccaacgtcgtctgcctgctgggcgtggtgaccaaggaccagtccctgagcatgatcttcagctactgttcgcacggcgacctccacgaattcctggtcatgcgctcgccgcactcggacgtgggcagcaccgatgatgaccgcacggtgaagtccgccctggagccccccgactttgtgcaccttgtggcacagatcgcggcggggatggagtacctatccagccaccacgtggttcacaaggacctggccacccgcaatgtgctagtgtacgacaagctgaacgtgaagatctcagacttgggcctcttccgagaggtgtatgccgccgattactacaagctgctggggaactcgctgctgcctatccgctggatggccccagaggccatcatgtacggcaagttctccatcgactcagacatctggtcctacggtgtggtcctgtgggaggtcttcagctacggcctgcagccctactgcgggtattccaaccaggatgtggtggagatgatccggaaccggcaggtgctgccttgccccgatgactgtcccgcctgggtgtatgccctcatgatcgagtgctggaacgagttccccagccggcggccccgcttcaaggacatccacagccggctccgagcctggggcaacctttccaactacaacagctcggcgcagacctcgggggccagcaacaccacgcagaccagctccctgagcaccagcccagtgagcaatgttgtaaggatgcgaggcagcgggaggcagtgctggatgacggagacgccaaacgctttgttgtggcataatgtgtctggagttggttcctgccggtgggttcgtggtctcgctgacttcaaggatgaagccaccgactttcgcgttatgccacgggaccccagcctgcactgccatgtgacttcaaccgcatgagagaccctgggcccagagcactcagactcatgaacaaaatagattcagcattcccatatttgaaatgggaagaagtttcatgtccattctggcttcatgtggttggaagaggaagccccatgaatatttttatggatgccccagtgctgttgagtgcctatcaacaccaccacgagcttggccacttcacatcaacagcagatttaatttgggatctctaaacactatttgtggttgtgtagacagaaagaatttttctaataaaataaaaattaaatgtgaaaaaaaaaaaaaaaaaa

SEQ ID NO: 3152 - DNA, 2048 bp, Homo sapiens
ggtgggggacacccgcccccgctctccgcagccgcccgccgtccgcgcccgccgaggtgagcccggcgcgcgggccgcgcccgccgccacgacccttccacatccgcggaaaccgctgcaggctccaccggctccccgcgctgcggtcgcctcttctctgcccctttcatcatcccctgcttccttgccctctggtcggaaatctcattctcttcatccccagttccttggcttttacctctttctggcttttgctcccttccccctactcctgtccttcctctttttcgcattataaccccctactttcttcctctcaccttgtaagctttttttctaggccccccattttttttcttaaaaaaaaaaagggaaacaaaaaccctattgctacaaatgagaattttgagggtaactcttcgctagagccagagaccttttaaaggaatgcatcggtgtgcaggaatcgtggtggtgaggagactgaggtcctcagtatctgggaaatcttattgaggggaccctgtttcggtcatgtcacttgtgtcttcagtttggagatcctgaggttgtctgaagcgagtggatctatttttctaagtccaatagacgaccgcagtgagacacggtgcggggacggccaccgattactgaatgggaattgtgttatcatttgctaaatatattgtgacatacttcgtgcctcggtgaacagctcccttgaccttgtgcggctcctcctccctcgctctctgtcctcctctggaatttcccctgagagatcaccgagaaagacaggacggagtccagtgtgagaatggctataactttggaagaagctccgtggctgggctggctcttggtgaaagcactgatgaggtttgccttcatggtcgtcaacaacctggttgctattccatcctacatctgctatgtaattatacttcagccccttcgagtgctggacagtaagcggttctggtatatcgaaggaatcatgtataaatggcttttaggaatggtagcttcctggggatggtatgctggatatacagtgatggaatggggagaagatattaaagcagtttcaaaagatgaagcagtgatgttggtgaatcatcaggcaacaggagatgtgtgcacactgatgatgtgcctccaggacaaaggactggttgttgctcagatgatgtggttgatggatcatatttttaagtacacaaactttggaattgtttctctagttcatggagacttctttataagacagggaagatcttatcgtgaccaacagctgctgcttctcaagaagcacttagaaaataattacaggagcagagatcgaaaatggattgttttgtttccagaagggggcttcctcaggaagaggcgagaaacaagtcaggcatttgccaagaaaaataacttgccatttcttacaaatgttactctgccaaggtctggggcaacaaaaattattttgaatgcacttgtagcacaacagaaaaatggaagtccagcaggaggagatgctaaagaattagacagcaaatcaaaaggcctccagtggataatagatacaacgatagcttatcccaaagctgaacctatagatattcaaacctggatccttggatacaggaaaccaacagtcacacatgtacattacaggatctttccaattaaagatgtacccctggagactgatgaccttaccacttggctctatcagcggtttgttgaaaaagaagacctcttatcacatttttatgaaacaggagcttttccaccttccaagggccataaggaagctgtttccagggagatgaccctcagcaacttgtggatatttctcatacagtcttttgcatttttgtcaggctatatgtggtacaacatcattcagtatttttaccattgcctgttttaggaattgacgtggacttgtcaaggtcaccgtaggagttcagactttctttcataagtgtgcattattttacatgtgcaaatcagaatatatttaaaaaaaagcaaaaaaaaaaaaaaaa

SEQ ID NO: 3153 - DNA, 2669 bp, Homo sapiens
tgagagttagaaggttcagtgttgatggagttattgaagaaatgatggagtaagagactcttttctaagcaactcaagtttgcagtgattcaggcctacttctgaagagacagccttttatctcaatgaatgacacagggtctgagattactgacatgcttcctgctatacccggcactgattccaaatgggactgggtctgcagaaaaaccagcagatactccctctgaggaagaggactttggtgatccaaggacatatgacccagatttcaaggggcctgttgccaacagactaaactgggaactccgtgagagaaagcatctcatctgtgtggttcaccaacgtttcatagcatctgccacagtatccggcacaaaataggagttgtacagatgttctgtgctgtatgatcttcctactgtgtattattggctacattgttttaggacttgtggcctgggtacatggggaccccagaagagcagcctatcctacagacagccagggccacttttgtggccagaagggcactcccaatgagaacaagaccattttgttttactttaacctgttacgctgtaccagtccctccgtattgctaaacctacagtgccctaccacacagatctgtgtctccaagtgcccagaaaaatttttaacctatgtggaaatgcaacttttgtacacaaaagacaaaagctactgggaagactaccgtcagttctgtaagaccactgctaagcctgtgaagtctctcacacagcttttactggatgatgattgtccaacagcgatttttcccagcaaaccttttctccagagatgtttccctgacttctctaccaaaaatggcactttaacaataggaagtaagatgatgtttcaagatggaaatggagggacaagaagtgttgtagaactcgggattgctgcaaatggtatcaataaacttcttgatgcaaagtcacttggattgaaagtgtttgaagactatgcaagaacttggtattggattctcattggcctgacgattgccatggtccttagttggatatttttgatacttctgaggttcatagctggatgcctcttctgggtcttcatgattggtgtgattggaattataggttatggaatatggcactgttaccagcagtacaccaatcttcaggaacgcccaagttctgtattaactatctatgacatcgggattcagactaacataagcatgtactttgaactgcaacaaacatggttcacatttatgataatactctgcatcattgaagtgattgtcatcctcatgctgatcttcctcaggaatcgaatccgagtcgccattatcctgctgaaggaaggaagcaaagccattggatatgttcctagtacattagtctatccagctttaactttcattttgctctcaatctgcatttgctactgggtcgtgacagcagttttcttggcgacatcgggggtacctgtatacaaagtcatagctccaggggggcattgtatacatgaaaatcaaacctgtgacccagagatttttaatacaactgaaattgccaaagcttgccctggggctctgtgtaactttgctttctatggtggaaagagcttgtaccatcagtacatccctaccttccatgtatacaacttatttgtctttctctggcttataaacttcgtcattgcattaggtcagtgcgcccttgctggtgcattcgctacttattactgggccatgaaaaaacctgatgacatcccacgatatccactttttactgcatttggacgagccatacgatatcacacaggatccctagcatttggatctttaattattgcattaattcaaatgtttaaaattgtactagaatacttggaccaccgtcttaaacgtacccagaacacattgtctaaattcctacaatgctgcctgagatgctgcttctggtgtttggaaaatgcaataaagtttttaaacagaaatgcctatattatgattgcaatatatggcagaaacttctgcaggtcagcaaaagatgctttcaatctgctgatgagaaatgttttgaaagttgcagttacagatgaagttacatactttgtattattcctggggaaacttctagttgctggaagtataggtgttctggccttcctattcttcacacaaagactgccagtgattgcacaaggaccagcatctttaaattactactgggtacctttgctgacagtcatttttgggtcttacctgattgcacatgggttcttcagcgtctatgcaatgtgtgttgaaacaattttcatctgcttcttggaagatttagaaagaaatgatggttctactgcaagaccttattatgtgagtcaacctttgctgaagattttccaggaggaaaatccacaaactaggaagcagtagaagagcaaactggtcgtcctacagctgtgtgttaccttttctccatctgctgtgtctgtgcaacatttgtttcataagtgctttgtgtttagcaacactgtattcacgaccttgttggcttgcatttgcatgttttataccaaagcttatactgtactatgtgaagccatcagaagtcgcaagggaattgttaataacataaaacatttttataccaaaaaaaaaaaaaaaa

SEQ ID NO: 3154 - DNA, 3460 bp, Homo sapiens
agcgggacgcccgggcggccctgaaggggacggggcggccccagtcggaggtcgcagggagctccgcccccgactcggtataagagctgggcccggcccacggcggcggcggcggcggcggagagagctggctcagggcgtccgctaggctcggacgacctgctgagcctcccaaaccgcttccataaggctttgcctttccaacttcagctacagtgttagctaagtttggaaagaaggaaaaaagaaaatccctgggccccttttcttttgttctttgccaaagtcgtcgttgtagtctttttgcccaaggctgttgtgtttttagaggtcctatctccagttccttgcactcctgttaacaagcacctcagcgagagcagcagcagcgatagcagccgcagaagagccagcggggtcgcgtagtgtcatgaccagggcgggagatcacaaccgccagagaggatgctgtggatccttggccgactacctgacctctgcaaaattccttctctaccttggtcattctctctctacttggggagatcggatgtggcactttgcggtgtctgtgtttctggtagagctctatggaaacagcctccttttgacagcagtctacgggctggtggtggcagggtctgttctggtcctgggagccatcatcggtgactgggtggacaagaatgctagacttaaagtggcccagacctcgctggtggtacagaatgtttcagtcatcctgtgtggaatcatcctgatgatggttttcttacataaacatgagcttctgaccatgtaccatggatgggttctcacttcctgctatatcctgatcatcactattgcaaatattgcaaatttggccagtactgctactgcaatcacaatccaaagggattggattgttgttgttgcaggagaagacagaagcaaactagcaaatatgaatgccacaatacgaaggattgaccagttaaccaacatcttagcccccatggctgttggccagattatgacatttggctccccagtcatcggctgtggctttatttcgggatggaacttggtatccatgtgcgtggagtacgttctgctctggaaggtttaccagaaaaccccagctctagctgtgaaagctggtcttaaagaagaggaaactgaattgaaacagctgaatttacacaaagatactgagccaaaacccctggagggaactcatctaatgggtgtgaaagactctaacatccatgagcttgaacatgagcaagagcctacttgtgcctcccagatggctgagcccttccgtaccttccgagatggatgggtctcctactacaaccagcctgtgtttctggctggcatgggtcttgctttcctttatatgactgtcctgggctttgactgcatcaccacagggtacgcctacactcagggactgagtggttccatcctcagtattttgatgggagcatcagctataactggaataatgggaactgtagcttttacttggctacgtcgaaaatgtggtttggttcggacaggtctgatctcaggattggcacagctttcctgtttgatcttgtgtgtgatctctgtattcatgcctggaagccccctggacttgtccgtttctccttttgaagatatccgatcaaggttcattcaaggagagtcaattacacctaccaagatacctgaaattacaactgaaatatacatgtctaatgggtctaattctgctaatattgtcccggagacaagtcctgaatctgtgcccataatctctgtcagtctgctgtttgcaggcgtcattgctgctagaatcggtctttggtcctttgatttaactgtgacacagttgctgcaagaaaatgtaattgaatctgaaagaggcattataaatggtgtacagaactccatgaactatcttcttgatcttctgcatttcatcatggtcatcctggctccaaatcctgaagcttttggcttgctcgtattgatttcagtctcctttgtggcaatgggccacattatgtatttccgatttgcccaaaatactctgggaaacaagctctttgcttgcggtcctgatgcaaaagaagttaggaaggaaaatcaagcaaatacatctgttgtttgagacagtttaactgttgctatcctgttactagattatatagagcacatgtgcttattttgtactgcagaattccaataaatggctgggtgttttgctctgtttttaccacagctgtgccttgagaactaaaagctgtttaggaaacctaagtcagcagaaattaactgattaatttcccttatgttgaggcatggaaaaaaaattggaaaagaaaaactcagtttaaatacggagactataatgataacactgaattcccctatttctcatgagtagatacaatcttacgtaaaagagtggttagtcacgtgaattcagttatcatttgacagattcttatctgtactagaattcagatatgtcagttttctgcaaaactcactcttgttcaagactagctaatttatttttttgcatcttagttatttttaaaaacaaattcttcaagtatgaagactaaattttgataactaatattatccttattgatcctattgatcttaaggtatttacatgtatgtggaaaaacaaaacacttaactagaattctctaataaggtttatggtttagcttaaagagcacctttgtatttttattatcagatggggcaacatattgtatgaagcatatgtagcacttcacagcatggttatcatgtaagctgcaggtagaagcaaagctgtaaagtagatttatcacacaatgactgcatacagacttcaaatatgtcaatagtttggtcatagaacctagaagccaaaagccacacagaagggcaagaatcccaatttaactcatgttatcatcattagtgatctgtgttgtagaacatgagggtgtaagccttcagcctggcaagttacatgtagaaagcccacacttgtgaaggttttgttttacaaatcacttgatttaacacactcaggtagaatatttttatttttactgttttatacccagaagttatttctacattgttctacagcaagaatattcataaaagtatccctttcaaatgcctttgagaagaatagaagaaaaaaagtttgtatatattttaaaaaattgttttaaaagtcagtttgcaacatgtctgtaccaagatggtactttgccttaaccgtttatatgcactttcatggagactgcaatacgttgctatgagcactttctttatccttggagtttaatcctttgcttcatctttctacagtatgacataatgatttgctatgttgtaaaatctttgtaaaaaatttctatataaaaatattttgaaaatcttaaaaaaaaaaaaaaaaaaaaaaaaaaaa

SEQ ID NO: 3155 - DNA, 1536 bp, Homo sapiens; identical to SEQ ID NO: 1710

SEQ ID NO: 3156 - DNA, 3581 bp, Homo sapiens
gggggcggcggcggctggagagggtcctcggcagcctctgaggagcgcggggcgcggccatgagcgagtccagcggcagtgcgctccagcccggcaggcccagccggcagcaggcggtccatccagagaacctctctctagactccagttgcttctcttctccacctgtgaacttcctccaagaattgccaagctaccggtccattgcacgtaggagaacgactgtccattcccgggacaagcaaagcggaactttgctaaagccaaccgactcttacagctcccagctggaggacagaatcgctgaaaacctcagcagccattctcttcgaaattatgcactgaacatctctgagaagcggagactaagggacattcaagagacacaaatgaagtatctctccgaatgggaccagtggaagcggtatagcagcaagtcttggaagaggttcctagagaaggctcgagagatgacgacccacctggagctgtggcgggaggacatccgcagcatagaagggaaatttggcactgggattcagtcctatttctccttcttgagattcctggtgttgctgaatttggtgatatttctgatcatctttatgctggttttgctcccagtcttactcacgaaatacaagatcaccaacagcagcttcgtgctcattcctttcaaagacatggataaacaatgtacagtctatccagtaagcagttctggactcatttacttttacagttatatcatagacttgctttctggcactggtttcctggaggaaactagcctcttttacggacattacaccattgatgaggtgaaatttcagaacttcacctatgatctgcccctggcgtatttgttaagcacaatcgcctccctggccctgagccttctttggatagtgaaaaggtcggtggaaggattcaaaatcaacctgattcggagtgaggagcactttcagagttactgcaacaagatatttgccggctgggacttctgcatcactaaccgcagcatggcggatctgaagcacagcagcttgcggtacgagctccgagcagatctggaggaagaaagaatgcggcagaaaatagcagaaaggacctcagaagaaacaatacgcatttactctttgagactgtttttgaactgtattgttctggctgttttaggggcatgcttttatgcaatatacgtagcaactgtcttctcgcaagagcacatgaaaaaggaaatcgacaagatggtttttggagagaacctcttcatattgtatctaccgtctattgtgatcacgctggccaattttatcaccccaatgatctttgccaagatcatccgctatgaggattattctccaggctttgagatccgtctgacaatccttaggtgtgtctttatgcggctggccaccatatgtgtcctggtgttcacgctgggctccaagatcacatcctgtgatgatgacacatgtgacctttgcggctacaaccagaaactctacccgtgctgggagacccaagttgggcaggaaatgtacaagctgatgatcttcgacttcatcatcatcttggctgtgacactcttcgtggattttcctagaaagctcctggtgacctactgttcctcttgcaagctgattcagtgctgggggcagcaggagtttgccattcctgataacgtcctggggatagtttacgggcaaaccatctgctggatcggagcctttttctcaccccttctccctgcaattgcaaccctgaaattcattatcatcttctatgtgaaagagtggagtctgctttacacctgcagaccctcccccaggccgttcagagcatccaattctaatttcttcttcctgttggtgttgttgatcgggctgtgtttggcaataatacctctgacaatcagcatatcacgcatcccttcctcgaaagcctgtgggccgttcaccaacttcaacaccacctgggaggtcatccccaagacagtgagcaccttccccagctcgctgcagtccttcatccatggtgtcacatccgaagcctttgcagttcctttcttcatgattatttgcctcatcatgttttacttcattgccttagctggagcacacaaacgggtggtcatccagctccgagagcagctatccctggaaagtcgtgacaagtgctacctaatccagaaactaacagaagcccaaagggacatgaggaactaactagactgagcgtgaagatggtgctgcctgttgcttctaagctgacctagtgattctgctgagcctacagagtctacctgggttttgagtggacatttaaaaatatatttttcttgagtttaggcttttccatatgtgcagctgtgtttacctaacccagcccttaattagggcttcagtgacttagaaaagcaggggaaacccaaggctttgcctgcagaccggccacactgtgacaactctaccaaaaaccaacaagccattcaagcttttacaagaatgaaagagcggagacggtagtttagtatttgagccacgagtttatgtgcacaagtgttttgggttgtggactgaagctcagcctgttaatcagaccagcccatgagtgtataacaaacagaattggaggctggtttcttaaacacacacgtccacattttttagggttgttttcctgtgcttacaatttttaatgcatgtgcctttatttcacaaaacatgtggctgggcgcagcggctcacgcctgttatcccaacactttgggaggccgaggcaggcggagcacctaagttggggagttcaagacctgcctgaccaacgtggagaaactccgtctccactaaaatacaaaattagctgggtgtggtggcacatgcctgtaatatcagctactcaggaggctgaggcaggagaattgcttgaacccaggaggtggagtttgcagtgagctgagatcacaccattgcactccagcctgggcaaaaagagcaaaactctccctaaaaaaaaaatgtagaatatctcttaagatttccgttatggtaaaaaccatatgcaataaatacctcattgtaagcttacccaaaattgatagatgtcaaccttttaacagaagaacagaagtttaagttattgtttaatgtaatcagttttcattttaatatctttgaaatctttttcaaaggactgtagttttgtaatggacttttcaagccttccttccattgtttttcttccgttcactggctccacacgtttcctggggagtagcctggaatttaaagttgggtgcaggttttagaaagctgttgctgttaacaataattctcccggccatctccactccactactcaaaaatgcctgaatccttgctcagaggagcaaaggtatcttctcgtccctttcttacagccattttcttgcttttccacaaagatattatttaaagtggaatatttttgtaactgggataccaatgagcttttcggtcttttcctgacttggtaaggtttatgggtttctaaatctaataactacagtcataccaccccgaaaaaaaaaaaaaaaa

SEQ ID NO: 3157 - DNA, 2292 bp, Homo sapiens
aggtagctgcgaggaaacttttgcagcggctgggtagcagcacgtctcttgctcctcagggccactgccaggcttgccgagtcctgggactgctctcgctccggctgccactctcccgcgctctcctagctccctgcgaagcaggatggccgggaccgtgcgcaccgcgtgcttggtggtggcgatgctgctcagcttggacttcccgggacaggcgcagcccccgccgccgccgccggacgccacctgtcaccaagtccgctccttcttccagagactgcagcccggactcaagtgggtgccagaaactcccgtgccaggatcagatttgcaagtatgtctccctaagggcccaacatgctgctcaagaaagatggaagaaaaataccaactaacagcacgattgaacatggaacagctgcttcagtctgcaagtatggagctcaagttcttaattattcagaatgctgcggttttccaagaggcctttgaaattgttgttcgccatgccaagaactacaccaatgccatgttcaagaacaactacccaagcctgactccacaagcttttgagtttgtgggtgaatttttcacagatgtgtctctctacatcttgggttctgacatcaatgtagatgacatggtcaatgaattgtttgacagcctgtttccagtcatctatacccagctaatgaacccaggcctgcctgattcagccttggacatcaatgagtgcctccgaggagcaagacgtgacctgaaagtatttgggaatttccccaagcttattatgacccaggtttccaagtcactgcaagtcactaggatcttccttcaggctctgaatcttggaattgaagtgatcaacacaactgatcacctgaagttcagtaaggactgtggccgaatgctcaccagaatgtggtactgctcttactgccagggactgatgatggttaaaccctgtggcggttactgcaatgtggtcatgcaaggctgtatggcaggtgtggtggagattgacaagtactggagagaatacattctgtcccttgaagaacttgtgaatggcatgtacagaatctatgacatggagaacgtactgcttggtctcttttcaacaatccatgattctatccagtatgtccagaagaatgcaggaaagctgaccaccactattggcaagttatgtgcccattctcaacaacgccaatatagatttgcttattatcctgaagatctctttattgacaagaaagtattaaaagttgctcatgtagaacatgaagaaaccttatccagccgaagaagggaactaattcagaagttgaagtctttcatcagcttctatagtgctttgcctggctacatctgcagccatagccctgtggcggaaaacgacaccctttgctggaatggacaagaactcgtggagagatacagccaaaaggcagcaaggaatggaatgaaaaaccagttcaatctccatgagctgaaaatgaagggccctgagccagtggtcagtcaaattattgacaaactgaagcacattaaccagctcctgagaaccatgtctatgcccaaaggtagagttctggataaaaacctggatgaggaagggtttgaaagtggagactgcggtgatgatgaagatgagtgcattggaggctctggtgatggaatgataaaagtgaagaatcagctccgcttccttgcagaactggcctatgatctggatgtggatgatgcgcctggaaacagtcagcaggcaactccgaaggacaacgagataagcacctttcacaacctcgggaacgttcattccccgctgaagcttctcaccagcatggccatctcggtggtgtgcttcttcttcctggtgcactgactgcctggtgcccagcacatgtgctgccctacagcaccctgtggtcttcctcgataaagggaaccactttcttatttttttctatttttttttttttgttatcctgtatacctcctccagccatgaagtagaggactaaccatgtgttatgttttcgaaaatcaaatggtatcttttggaggaagatacattttagtggtagcatatagattgtccttttgcaaagaaagaaaaaaaaccatcaagttgtgccaaattattctcctatgtttggctgctagaacatggttaccatgtctttctctctcactccctccctttctatcgttctctctttgcatggatttctttgaaaaaaaataaattgctcaagtaaaaaaaaaaaaaaaaaaaaaaaaaaaaaa

SEQ ID NO: 3158 - DNA, 2510 bp, Homo sapiens
agttgctggtagtgcccgtggtgcttggttcgaggtggccgttagttgactccgcggagttcatctccctggttttcccgtcctaacgtcgctcgcctttcagtcaggatgtctgcccgtggcccggctatcggcatcgacctgggccccacctattcgtgcgtcggggtcttccaacatggcaaggtggagatcatcgccaacgaccagggcaatcgcaccacccccagctacgtggccttcacggacaccgagcgcctcatcggcgacgccgccaagaaccaggtggccatgaaccccaccaacaccatcttcgacgccaagaggctgattggacggaaattcggggatgccacagtgcagtcggatatgaaacactggccgttccgggtggtgagcgagggaggcaagcccaaagtgcaagtagagtacaagggggagaccaagaccttcttcccagaggagatatcctccatggtcctcacgaagatgaaggagatcgcggaagcctacctggggggcaaggtgcacagcgcggtcataacggtcccggcctatttcaacgactcgcagcgccaggccaccaaggacgcaggcaccatcacggggctcaatgtgctgcgcatcatcaacgagcccacggcggcggccatcgcctacggcctggacaagaagggctgcgcgggcggcgagaagaacgtgctcatctttgacctgggcggtggcactttcgacgtgtccatcctgaccatcgaggatggcatcttcgaggtgaagtccacggccggcgatacccacctgggcggtgaggacttcgacaaccgcatggtgagccacctggcggaggagttcaagcgcaagcacaagaaggacattgggcccaacaagcgcgccgtgaggcggctgcgcaccgcttgcgagcgcgccaagcgcaccttgagctcgtccacgcaggcgagcatcgagatcgactcgctctacgagggcgtggacttctatacgtccatcacgcgcgcccgcttcgaggagctcaatgccgacctctttcgcgggaccctggagccggtggagaaggcgctgcgcgacgccaagctggacaagggccagatccaggagatcgtgctggtgggcggctccactcgtatccccaagatccagaagctgctgcaggatttcttcaacggcaaggagctgaacaagagcatcaaccccgacgaggcggtggcctatggcgccgcggtgcaggcggccatcctcatcggcgacaaatcagagaatgtgcaggacctgctgctactcgacgtgaccccgttgtcgctgggcatcgagacagctggcggtgtcatgaccccactcatcaagaggaacaccacgatccccaccaagcagacgcagaccttcaccacctactcggacaaccagagcagcgtactggtgcaggtatacgagggcgaacgggccatgaccaaggacaataacctgctgggcaagttcgacctgaccgggattccccctgcgcctcgcggggtcccccaaatcgaggttaccttcgacattgacgccaatggcatccttaacgttaccgccgccgacaagagcaccggtaaggaaaacaaaatcaccatcaccaatgacaaaggtcgtctgagcaaggacgacattgaccggatggtgcaggaggcggagcggtacaaatctgaagatgaggcgaatcgcgaccgagtcgcggccaaaaacgccctggagtcctatacctacaacatcaagcagacggtggaagacgagaaactgaggggcaagattagcgagcaggacaaaaacaagatcctcgacaagtgtcaggaggtgatcaactggctcgaccgaaaccagatggcagagaaagatgagtatgaacacaagcagaaagagctcgaaagagtttgcaaccccatcatcagcaaactttaccaaggtggtcctggcggcggcagcggcggcggcggttcaggagcctccgggggacccaccatcgaagaagtggactaagcttgcactcaagtcagcgtaaacctctttgcctttctctctctctctttttttttttgtttgtttctttgaaatgtccttgtgccaagtacgagatctattgttggaagtctttggtatatgcaaatgaaaggagaggtgcaacaacttagtttaattataaaagttccaaagtttgttttttaaaaacattattcgaggtttctctttaatgcattttgcgtgtttgctgacttgagcatttttgattagttcgtgcatggagatttgtttgagatgagaaaccttaagtttgcacacctgttctgtagaagcttggaaacagtaaaatatataggagcttaaattgtttatttttatgtactactttaaaactaaactgaacattgcagtaatgttaaggacaggtatactttttgcaaacaaatgcataaatgcaaatgtaaagtaaagctgaaattgatcacaaaaaaaaaaaaaaa

SEQ ID NO: 3159 - DNA, 2540 bp, Homo sapiens
ccgtccgcctggctcgcccgagctcgcccgctgtccgccagcccgcgggagggaggagagaagcgaagcgtttccgcggttggctactcagtgtcttggtctcaagttgcctcattgcggctggcgttcccaatacagacgcatcgtttcttttttaatactccctaagaaagggaataaccttcaagctggcgggagcaatggttcacataaagaaaggcgagctgacccaggaggagaaggagctactggaagtcatcgggaaaggtactgtccaagaagctggaacattattatccagcaagaatgttcgtgtcaactgtttggacgagaatggaatgactcctctaatgcatgcagcatataaaggaaaactcgatatgtgcaaattactactgcgacatggagccgatgtaaattgtcatcagcatgaacatggatacacagccctcatgtttgctgcactttctggtaataaagacatcacatgggtaatgttagaagctggtgctgagacagatgttgtcaactctgtgggaagaacagcagctcagatggcagcctttgtgggtcaacatgattgtgtgaccataatcaacaatttctttcctcgagagagactggattattacactaagccccagggactggataaagagccaaaactgcccccaaagttggcaggcccgctgcacaaaattatcaccacaacgaatcttcatcctgtcaagatcgtgatgcttgtaaatgagaatcctctgctgacagaagaagcagccctgaataaatgctacagagtgatggatttgatttgtgagaaatgtatgaagcaaagagacatgaatgaagtattggctatgaagatgcattacataagctgtatctttcagaaatgcattaacttcttaaaagatggagagaataaactggacaccttgatcaaaagcttgttaaaaggccgagcttctgatggctttccagtgtatcaagaaaagatcattagagaaagtatcagaaaatttccttactgtgaagctacactcctccagcagctggttcgaagcattgctcctgttgaaattggttctgatcccactgcattctccgtccttacccaagccatcactggccaggtgggttttgtggatgtggaattttgcactacctgtggagaaaagggagcaagtaaaagatgttcagtttgcaaaatggtaatatattgtgatcaaacctgccagaaaacacactggtttactcataagaaaatctgtaagaatctgaaggacatttacgaaaagcaacagttggaggctgccaaagaaaagagacaagaggaaaaccacggcaaacttgatgtcaattctaactgtgttaatgaagagcaaccagaggctgaagtaggtatctctcaaaaggattctaatcctgaagattccggggaaggaaagaaagaatctcttgaaagcgaagctgagttggaaggcttacaggatgctcctgcagggccacaggtgtctgaggagtaaaagccagagcaagtgccagtgtggatggtcctcaccctgcaagaagctggaaaactcctaggaatgcattgtcctcaccttgttatacctgcgtggcaccatggcaggattccacatttcatagaatacaggttttcaagcaaacccctgttgaccatgccctaatttcctattgatttctgttctataattgaatggatattcctatggaaaattttttgtttcaaaatacaggaaaaacattcctattacctttctgaggctggctttccagcaattgtttcaaaggaaaatagatccccttaaagaaaaaatacaggctttagggaacaaagggacaagcagaacaggtgtggaagagagattttcaggaagggaaaaatttatagctacagagggtagttagaaaaatcataacttatatgtgaataaaatacatataagcagcatttacggtagtggcattctacttattaagatgcaatgaaatgaagaaaggctttatgttcaaggacctttgccatagttcagctaattgtagttttatatagaaatgatcctgaacactctgaacttgacgtagtcctgcggtgatattctatctgcagtatttgtacctccagaatggcagatccctcagcaggaacaaaggcatattgacggttctctcagcgtatgcattaaaaaaggtacttcctgaaacttttgattcaataatgactaaacatactatgtacacaattactgtaaggctaattcacgtgccatactccacctgaaagcctgagttatcttgctataagcttttcatggagcacttcctttccagaaactgatttgtaactcatttagagaatgtcctggcgtcggtttttagcatatgtggtatttaaacagagctagaatgtgatgtctgaagataatgctgcatttctgggtttcttgtgtggattttaaaataaattgtgcctacaaatataaacaaaaaaaaaaaaaaaaaaaaaaaaaaaaaaa

SEQ ID NO: 3160 - DNA, 3258 bp, Homo sapiens
cttctccctcctgccgccttatgaacagggtgactgtttccccatcggccatgattttaagtttcctgaggcctccccagtcatgctgaactatactgttcctaagagcatctgccccagtcaacttctcatccacagatattaatctcagtcaacctccagatttttagacatattttgaaagtctttcatcaccagatttcaaaggtgttgatagatatctatttttaaacatggaaagatggtggtgcaatggccagtggctgctacaccccatgtaaaaagcggaaaataaaatgaagattttccagcgcaagatgcggtactggttgcttccaccttttttggcaattgtttatttctgcaccattgtccaaggtcaagtggctccacccacaaggttaagatataatgtaatatctcatgacagtatacagatttcatggaaggctccaagagggaaatttggtggttacaaacttcttgtgactccaacttcaggtggaaaaactaaccagctgaatctgcagaacactgcaactaaagcaattattcaaggccttatgccagaccagaattacacagttcaaattattgcatacaataaagataaagaaagcaagccagctcaaggccaattcagaattaaagatttagaaaaaagaaaggatccaaagcccagagtcaaagttgtggacagaggaaatgggagtagaccatcttcaccagaagaagtgaaatttgtctgtcaaactccagcaattgctgacattgtaatcctggtcgatggttcatggagtattggaagattcaacttcagactggttcggcatttcttggaaaacctggttacagcattcgatgtgggctcagagaagacacgaattggtcttgcacagtatagtggcgaccccagaatagaatggcacttgaatgcatttagcacaaaagatgaagtgattgaagctgtccgaaacctcccatataaaggaggaaatacactaacaggtcttgctttgaactacatttttgaaaatagcttcaaaccagaagcaggatcaaggactggagtatccaaaattggcattttaatcacagatggaaaatcccaagatgacattattccaccatctagaaatcttcgtgagtctggtgtagaactgtttgccataggggtgaaaaacgcggatgtgaatgagctgcaggagatcgcctccgaaccagacagcactcatgtgtacaatgttgccgaattcgatctgatgcacacagttgtggagagtctgaccaggactctctgctctagagtggaagaacaggacagagaaattaaagcctcagcccatgccatcactgggccgcctacggagttgattacttctgaagtcactgccagaagctttatggttaactggactcatgccccaggaaatgtggaaaaatacagagttgtgtattatcctaccaggggtggaaaaccagacgaggtggtggtagatggaactgtatcttccacagtgttgaaaaacttgatgtctttaactgaatatcagatagcagtctttgcaatctatgcccacactgctagtgaaggcctacggggaactgaaactacacttgctttaccgatggcttctgaccttctactgtacgacgtgactgagaacagcatgcgagtcaaatgggatgcagtgcctggggcctcaggttacctgatcctttatgctcctctaacagagggcctggctggggatgaaaaagagatgaaaattggagagacccacacagatattgaattgagtgggttgttgcccaatacagaatacacagtcacagtttatgccatgtttggagaagaggccagtgatcctgttacgggacaagaaacaacatcaccttaattattaagagattcactaactcctacaagatctttattgtcaaagaatcagtatgtattgaattaatgaaagaactgggctttgaggttaggaaacatcatgcttcgtggctatggctgtggctttaagtccaccaagaaacctgagaatctccaatgttggctctaacagtgctcgattaacctgggacccaacttcaagacagatccatggttatcgaattgtatataacaatgcagatgggactgaaatcaatgaggttgaagtcgatcctattactaccttccctctgaagggcttgacacctctcacagagtatactattgctattttctgcatctatgatgaaggacagtcagagcctctgactggagtttttaccaccgaggaagttccagcccagcaatacttagaaattgatgaggtgacgacagacagttttagggtgacctggcatcccctctcagctgatgaagggctacacaaattgatgtggattccagtctatggggggaagactgaggaggttgtcctgaaagaagagcaggactcacatgttattgaaggcctggagctcggtacggagtatgaagtttcactattggccgtacttgatgatggaagcgagagtgaggtggtgactgctgtcgggaccacacttgacagtttttggacagaaccagctacaaccatagtgcctaccacatctgtgacttcagttttccagacgggaatcagaaacctagttgtaggtgatgaaactacttctagcctgcgggtaaaatgggacatttctgacagcgatgtgcagcagtttagggtgacctacatgacagctcaaggggaccctgaggaagaagtcataggaacggtctgtataaattcaactgactagaaactctgcagatgttactaacacagctaataagactgtcttcggagatcaatgcaaactttactgctcttttctcagtgactctgccatctccagaaactaatgttctctgttaatctgactccactactggcttcttagtgacctttataaatccaaaacttgctccatgtacaacttgctctaagttaataacctctgaacattttttcaaatattgcttctcttctgctgccttgcacctgttcgagcaccaaagttgggtcataaaaggccatatgcacttgtgtctgtatatatgtatgtatagacatgtataaaagtttaatatagaaaataatttcttctgcccttggaaatctgataaaaaaacttttaagcaaaggacacagaaaaggtcttctatatggtatagtgaaaatattcttaataaaataccatccgtcaaaaaaaaaaaaaaaa

SEQ ID NO: 3161 - DNA, 1790 bp, Homo sapiens
gcagccccagccccagccccaggcccagcagcagcagcagcagcccctgctctcccgccgcccggagaggctctgcagccatgaagccaaccgtcccgagccttcaataccccaggtcccaaactacaggctgtcgatgacgatcccagactggctccaggcgatccagaattacatgaagaccctacagtatccttccaaccaaggtctgagcacacccagccaggggacaggcatggtgatcgcaagcctggtggcaaatctgtccccagctggtcatcaaaagctctctaaggttaatggaaacagcaaaagaaatgacccgagagtccttgcctatcaaatgccttgaagctgtcatcctgggcatctacttaaccaatgggcagccttccattgagcggttccccatcagctttaaaacctacttctcaggaaactactttcaccacgttgtgctggggatttactgcaatggccgctatggctcattgggcatgagccgcagggctgagctgatggacaagccattgacttttcggactctgagtgacctcatctttgactttgaggactcttacaagaaatacctgcacacagtcaagaaggtcaagattgggctgtacgtcccccatgagcctcatagcttccagcccattgagtggaagcagctggtcctcaacgtctcaaagatgctgagggctgacataaggaaggagctggagaaatatgccagggacatgagaatgaagggcttgtgcagtcactaagagaaaaggattatgctgacttcaggcctggctatgtttagcacttgtggacttgtcatcttcactctgcaggacctggagtggagattcctgatcaattaaaaccattctgtcatatgtgtgggatgggagcatcagaggaagaacaggctggtttctgaggcaatagagatgggactttgccttcgtgaggagaggaacttgccaagcaaacaaacacagccccggggagactgaggcattgggctgtgttcctctctctacacggcacagggagcacaatgtgaccatctgtatatctgtcttggaagtggtgcccttgctgcttgacagtacaggacgagagaggaatgtgtgtgtctccagcctccttttttagaagtcttcctgctcaatgccttctaaaccatggcatcatgattgggctggggggtggaatgtggtgctagaagaagacctgagggtggaggtcccttaggaaccagggtgattaactcctcacatctccttcagatcctgaaacctgcaagtgcccactctccgacccaagtgagaagccggggaaaatccctgtcccccagaaggagacaggcaagccccccgaggaggctcggccggcgagagaagtcccctgaggccagtgatcccacatctacttcttagaccaaaataacccacttaagcaatgacagattggagatgctggggatgcccaaattcaccagcgataatccgctggcaaatatttgaactatagccatcctgggaaaaaatactgcttttcttaataatagcagcatgctgtgtcacccagcctcttgccatgctggaaccatgtggcacagtgcacagggggcttggttgaatcccaactgtgccacgtgttagctgtgcagctgggcacatccttcctcctcggggagccttggtttcttcatccataaaagagtatcaaatgctaaaaaaaaaaaaaaaaaaaaaaaaaaaaaaaaaaaaaaaaaaaaaaaaaaaaaaaaaaaa

SEQ ID NO: 3162 - DNA, 2910 bp, Homo sapiens
ccacgcgtccgatctggtttacaccggctcctgccctgccttcactcttctcccctgattcaagactcctctgctttggactgaagcactgcaggagtttgtgaccaagaacttcaagagtcaagacagaaggaagccaagggagcagtgcaatggatttctcagtaaaggtagacatagagaaggaggtgacctgccccatctgcctggagctcctgacagaacctctgagcctagattgtggccacagcttctgccaagcctgcatcactgcaaagatcaaggagtcagtgatcatctcaagaggggaaagcagctgtcctgtgtgtcagaccagattccagcctgggaacctccgacctaatcggcatctggccaacatagttgagagagtcaaagaggtcaagatgagcccacaggaggggcagaagagagatgtctgtgagcaccatggaaaaaaactccagatcttctgtaaggaggatggaaaagtcatttgctgggtttgtgaactgtctcaggaacaccaaggtcaccaaacattccgcataaacgaggtggtcaaggaatgtcaggaaaagctgcaggtagccctgcagaggctgataaaggaggatcaagaggctgagaagctggaagatgacatcagacaagagagaaccgcctggaagaattatatccagatcgagagacagaagattctgaaagggttcaatgaaatgagagtcatcttggacaatgaggagcagagagagctgcaaaagctggaggaaggtgaggtgaatgtgctggacaacctggcagcagctacagaccagctggtccagcagaggcaggatgccagcacgctcatctcagatctccagcggaggttgaggggatcgtcagtagagatgctgcaggatgtgattgacgtcatgaaaaggagtgaaagctggacattgaagaagccaaaatctgtttccaagaaactaaagagtgtattccgagtaccagatctgagtgggatgctgcaagttcttaaagagctgacagatgtccagtactactgggtggacgtgatgctgaatccaggcagtgccacttcgaatgttgctatttctgtggatcagagacaagtgaaaactgtacgcacctgcacatttaagaattcaaatccatgtgatttttctgcttttggtgtcttcggctgccaatatttctcttcggggaaatattactgggaagtagatgtgtctggaaagattgcctggatcctgggcgtacacagtaaaataagtagtctgaataaaaggaagagctctgggtttgcttttgatccaagtgtaaattattcaaaagtttactccagatatagacctcaatatggctactgggttataggattacagaatacatgtgaatataatgcttttgaggactcctcctcttctgatcccaaggttttgactctctttatggctgtgcctccctgtcgtattggggttttcctagactatgaggcaggcattgtctcatttttcaatgtcacaaaccacggagcactcatctacaagttctctggatgtcgcttttctcgacctgcttatccgtatttcaatccttggaactgcctagtccccatgactgtgtgcccaccgagctcctgagtgttctcattcctttacccacttctgcatagtagcccttgtgctgagactcagattctgcacctgagttcatctctactgagaccatctcttcctttctttccccttcttttacttagaatgtctttgtattcatttgctagggcttccatagcaaagcatcatagattgctgatttaaactgtaattgtattgccgtactgtgggctggaaatcccaaatctagattccagcagagttggttctttctgaggtctgcaaggaagggctctgttccatgcctctctccttggcttgtagaaggcatcttgtccctatgactcttcacattgtctttatgtacatctctgtgcccaagttttccctttttattaagacaccagtcatactggctcagggcccaccgctaatgccttaatgaaatcattttaacattatattctctacaaagaccttatttccaaataagataatatttggaggtattgggaataaaaactccaacatataaatttgaggaaggcacgatttcactcataacaatcttaccctttcttgcaagagatgcttgtacattattttcctaataccttggtttcactagtagtaaacattattttttttttatatttgcaaaggaaacatatctaatccttcctatagaaagaacagtattgctgtaattccttttcttttcttcctcatttcctctgccccttaaaagattgaagaaagagaaacttgtcaactcatatccacgttatctagcaaagtacataagaatctatcactaagtaatgtatccttcagaatgtgttggtttaccagtgacaccccatattcatcacaaaattaaagcaagaagtccatagtaatttatttgctaatagtggatttttaatgctcagagtttctgaggtcaaattttatcttttcacttacaagctctatgatcttaaataatttacttaatgtattttggtgtattttcctcaaattaatattggtgttcaagactatatctaattcctctgatcactttgagaaacaaacttttattaaatgtaaggcacttttctatgaattttaaatataaaaataaatattgttctgattattactgaaaagatgtcagccatttcaatgtcttgggaaacaattttttgtttttgttctgttttctttttgcttcaataaaacaatagctggctctaaaaaaaaaaaaaaaaaaaaaaaaaaaaaaaaaaaaaaaaaaaaaaaa

SEQ ID NO: 3163 - DNA, 1640 bp, Homo sapiens
cggatcgcgccggcgctgagtaggaaggagcttcagccgccagcccggaacgcatcataggttagcttttcaagacacttcctgcatctctgacctgttgcacctctgttatcttggcacctctgttatcttagcagcaagcacctgcctcagctgacccttgagccataacccataagctcctgaaaagtacatcaagtctaaagtgaaccagctaactcattaagactggaatcatgagcaacaatggagcagacctaacctttggttacatctcctgttttgtagctatccttttgtttggctcaaattttgtgccacttaaaaaatttgatactggtgatggtaattatttttccttgattgttaacgttatattatttttaaaaatgaagttccttttttggtcttttaaaagtatagctacaaaaataaatcatgttgatcttgatacctagtgaatagagcttaaaattagtcatttgacagtgctcataccagtttgtctgaaagtcagaataggagaaccattaaggttgtttcatggtaaagttagggagggtacagtcaggaaatctcttgggccattatatgaatggaagaaatttatagtcagttctactataacacctgttttgaaaacatgaatcttcaacatgattgatatattagagaacaatgtaagcataacagatttttggcttgcttatgtgcaattttgtccctgagaaacctctagataggcacagaagactgcacctagatgaataaagatgtgtgataatacacataatgcacgcagacacacgtacaatcttcaaatatcgaccagctcccttagttcatcacatgtggttatgatgtattccacccaaccacatctcctgtcccaactcctcacccaataccttcacagtaactcgtaagctgcaaccctttggatgctcacttccaggagcaaacttctggtgtttttcaattaaaatgccctatttattacagcatcatgtaattaaccagttaaccagttaaaactgtactactattttaattaggttgagtgttgttctcctagccccattttcccattatgctctgtagtttttactgcatgattttgcatagtgcagtgatttcaaggaatgcacatgttacattatagcagaactgactaatgtgaattttggggaaggagaagcaagagttatttgtatttgcctgacttccatattaaagccaggagaaggaattgagatttatggtgaacacatgttgggaattacttccttggtagtatttatcacctgacagcagttgtgttatttccccaattctttgtcttcgtgcacttagaaaataggattacctcctattttcctccagggcctttcttctcttttcctctggagttaggacaagaatgggaactacccgaagaacaaaaaaatgggtagaggatctagcttttttagtcttccacaattagctttgtgatcctgggcaaatattaccagctctgctgttttcagtttctcatttgtaaagtgaacaacttataaaatgaagtttcttttcatctctgtgaaaaaaaaaaaaaaaaaaaaaaaaaaaaaaaaaaaaaaaaaaaaaaaaaaaaaaaa

SEQ ID NO: 3164 - DNA, 2673 bp, Homo sapiens
ccacgcgtccggaaggaaagggtccgcctagccctgagtcaagcggtcttactgtaccgccgtgtgcattccctcatacggtcaggagttatgactcattttgaagatatcgagcctgcgtgctgccgaagcagggcgccgagtccatgcgaactgccatctgatccgctcttatcaatgaagcagccgatcatggcggatggcccccggtgcaagaggcgcaaacaagccaatcccaggaggaaaaacgccttggagtcagaaatgagcactcggagcgggagatgccctgctgctgcttgccaccggtgcggcccgtttgtaacttgcaaagtttgttgcttttgcccctgattcgggcagcgggtcctgggatgctcctgcttccctcctgcctcccacggagcccgggaagagggtctgcctccccatcccgccaccttccagcatcagcctctgaaaaatctcacagagacatgcacgttgtagcaaaaatcaaatccggaaactgcttgtttcagagaaagaaatgaagttgtcttttaaagaaaaactgaattaggaggagagaaaagggaaataggagaagaaaggaaaagttaaatttgatttttctccagagtttccactaaagggttggggacagtgtgaaggagaaggggagctttttacaaatgcctttggtctctgaacttcagtggcaaagaacagggatcaagttgaatgttctcagggctttggatcctagaggagaaacaatcagaagagcagaaatggttatccctgtttaaaataagccctcactctttaccacttccttaaaggagtggaggtgctggtagtgatggttagaggcaatgagggacggagaagttgctcccgtttcagagatgcttaaatgaaaaggaaagaaaatgcagtcaaccccttctccaggaggtgcctcctagctctcctccctgagaggtgaagttgggatggggcaacgagagtcatacacacttagacaaggaagtttccttcggatcactgtcagtccagacttggttatctttgcaaagtgtggaaatctttggcaagtagctttcttcgtaaagttgatgagcttctagggagcctgttttgctgactttcaaagcactggggcaggttgtgtggcaggtaccagttctgagggcgctccaaagatatccatctccatccttttttctctgtggagatcttctgcaagttttgtcacgctgcacacacacaaggctgggggctatgtatctaggctgatctatttgttttattttggtctggaaaaactaagccaattggggtagaaacatgctttccttcgtagcagagccagtaggctgctggtgtccatagagtgacagtccaccaggactaagggtgggctgaggattttaaactttacattgtttctctgttaccagatacaaataaattcacgtcttccaccatttgttttcaaatagggtaaaaccaagattaaagttccctgctcaactgctatgtcataggtttcagtgtttcccttccttcttaatttgcttaaagaaaattccaagaggttattaaagaccttgatgccatattaagaatatttcctgggaaaaatgtatgtctaccctgaaggtaggaaaggagggcgttgctagcctctagcagtgccgcgtttattctaagatgtgggagattcttttccttgcaacagtttttgtcatctgcattcttccaaggcttttaaggtgcattttcttctgtgtgaaaggaaattctttgtccttttcctctcagcaccgtggcttcccaaggtagacactattttgtgcctgtcacagagagagggagtgcaggtttgcaatgctcacagacaattgattgtctgccctaatgtgtttcatttacatgtttataacgtcaatggtgctggggtgtccactgtaccattcattcccgcattcccacaagggggcaattgtctgaatggccaagtcagacacctttttgattgctctttggttgtcttttcagagcaaagagataaaggaggaaaatctgtgatgcagaaacactagttgaaaatatacagaattaaatgtcaccacaaaagcagatgttaacataagcccaaatatgctttttagccaagatgtgaaggttgaaaaaaataattcagagcagagggaaggatgatttaaaccaataaatatagccctattccccctctttacttcttttctgtctttagcaatcagaagatgaaatgtaattttccttttcatttttaagccttgaaacatccaggcacctcctcattatttgtatgtttgctgtgatttgtgaattttgtatatatttacatagctctgtttatgccaacagcatcagcttaccacttggaaaatctattgaatgactatttgggctgtggggagggtaaacttttaaaaagtaagatccaagtatttcttcatcaagcagtttttaaaaggaaaacgataataatcagtaggctccatggaagcctttgccttaatagctatgtgccaaatacttttatcttgtgtgacagtcatgtcagagtgaaatctctcaggaaaagtgtaactagtagttacaaagtaaataaaggatttcattttaaaaaaaaaaaaaaaa

SEQ ID NO: 3165 - DNA, 887 bp, Homo sapiens
ggctgctctaggagcagatacaggctggtatagaggatgcagaaaggtagggcagtatgtttaagtccagacttggcacatggctagggatactgctcactagctgtggaggtcctcaggagtggagagaatgagtaggagggcagaagcttccatttttgtccttcctaagaccctgttatttgtgttatttcctgcctttccgagtcctgcagtgggctgccctgtaccctgaacctcatgagcctctaagggaaaggaggaacaattaggacgtggcaatgagacctggcagggcagagtacaagcccagcacccagtgtcccagccttactgggtccttaccctgggccaaacagggagggctgatacctccttgctcttcctagatgcccacctcctacaatctcagcccacaagtcctctccaccctagggggcttgctgcatggcaataactcataatctgatttggaggtttgccctttacaggggcagattttctgctcagttcaacaatgaaatgaagaggaactccctctttctacagctcacttctatcagaggcccaggtgcctcagagccacattgagttgctttttctgggatgaggaagtagggttaaactccccagtttcctgagggaggctcctgacaggtgccctttgtcagaccctaccacagcctggataggcagccacattggtcctcgcccttgctcggcactccgtggtggtcctgcccttctccctgcatgcctgtgggtctgctctggtgtgtgaaggtcggtgggttaactgtgtgcctactgaacctggcaaataaacatcaccctgcaaaaaaaaaaaaaaaaaaaaaaaaaaaaaaaaaaaaaaaaaaaaaaaaaaa

SEQ ID NO: 3166 - DNA, 3784 bp, Homo sapiens; identical to SEQ ID NO: 711

SEQ ID NO: 3167 - DNA, 1865 bp, Homo sapiens
cggagcccggcgcctacagctcgccatggtgcgccccctgaacccgcgaccgctgccgcccgtagtcctgatgttgctgctgctgctgccgccgtcgccgctgcctctcgcagccggagacccccttcccacagaaagccgactcatgaacagctgtctccaggccaggaggaagtgccaggctgatcccacctgcagtgctgcctaccaccacctggattcctgcacctctagcataagcaccccactgccctcagaggagccttcggtccctgctgactgcctggaggcagcacagcaactcaggaacagctctctgataggctgcatgtgccaccggcgcatgaagaaccaggttgcctgcttggacatctattggaccgttcaccgtgcccgcagccttggtaactatgagctggatgtctccccctatgaagacacagtgaccagcaaaccctggaaaatgaatctcagcaaactgaacatgctcaaaccagactcagacctctgcctcaagtttgccatgctgtgtactctcaatgacaagtgtgaccggctgcgcaaggcctacggggaggcgtgctccgggccccactgccagcgccacgtctgcctcaggcagctgctcactttcttcgagaaggccgccgagccccacgcgcagggcctgctactgtgcccatgtgcccccaacgaccggggctgcggggagcgccggcgcaacaccatcgcccccaactgcgcgctgccgcctgtggcccccaactgcctggagctgcggcgcctctgcttctccgacccgctttgcagatcacgcctggtggatttccagacccactgccatcccatggacatcctaggaacttgtgcaacagagcagtccagatgtctacgagcatacctggggctgattgggactgccatgacccccaactttgtcagcaatgtcaacaccagtgttgccttaagctgcacctgccgaggcagtggcaacctgcaggaggagtgtgaaatgctggaagggttcttctcccacaacccctgcctcacggaggccattgcagctaagatgcgttttcacagccaactcttctcccaggactggccacaccctacctttgctgtgatggcacaccagaatgaaaaccctgctgtgaggccacagccctgggtgccctctcttttctcctgcacgcttcccttgattctgctcctgagcctatggtagctggacttccccagggccctcttcccctccaccacacccaggtggacttgcagcccacaaggggtgaggaaaggacagcagcaggaaggaggtgcagtgcgcagatgagggcacaggagaagctaagggttatgacctccagatccttactggtccagtcctcattccctccaccccatctccacttctgattcatgctgcccctccttggtggccacaatttagccatgtcatctggtggtgaccagctccaccaagcccctttctgagcccttcctcttgactaccaggatcaccagaatctaataagttagcctttctctattgcattccagattagggttagggtagggaggactgggtgttctgaggcagcctagaaagtcattctcctttgtgaagaaggctcctgccccctcgtctcctcctctgagtggaggatggaaaactactgcctgcactgccctgtccccggatcctgccgaacatctgggcatcaggagctggagcctgtgggccttgctttattcctattattgtcctaaagtctctctgggctcttggatcatgattaaacctttgacttaaaaaaaaaaaaaaaaaaaaaaaaaaaaaaaaaaaaaaaaaaaaaaaaaaa

SEQ ID NO: 3168 - DNA, 2855 bp, Homo sapiens
gagcggtcttgacactcgcggcggcagcatctacgctcgcagagccgccgatgcgtgtccagtgacccggacagcaaggcccgcgcgcggcgggggcggcggcagacgcctggtcaccgtgaccccgattttggatttaccgcttgggggctggggggatcctggatttaactggcgactgttttgggggacgccggacgccatgttgtggaaaataaccgataatgtcaagtacgaagaggactgcgaggatcgccacgacgggagcagcaatgggaatccgcgggtcccccacctctcctccgccgggcagcacctctacagccccgcgccacccctctcccacactggagtcgccgaatatcagccgccaccctactttccccctccctaccagcagctggcctactcccagtcggccgacccctactcgcatctgggggaagcgtacgccgccgccatcaaccccctgcaccagccggcgcccacaggcagccagcagcaggcctggcccggccgccagagccaggagggagcggggctgccctcgcaccacgggcgcccggccggcctactgccccacctctccgggctggaggcgggcgcggtgagcgcccgcagggatgcctaccgccgctccgacctgctgctgccccacgcacacgccctggatgccgcgggcctggccgagaacctggggctccacgacatgcctcaccagatggacgaggtgcagaatgtcgacgaccagcacctgttgctgcacgatcagacagtcattcgcaaaggtcccatttccatgaccaagaaccctctgaacctcccctgtcagaaggagctggtgggggccgtaatgaaccccactgaggtcttctgctcagtccctggaagattgtcgctcctcagctctacgtctaaatacaaagtgacagtggctgaagtacagaggcgactgtccccacctgaatgcttaaatgcctcgttactgggaggtgttctcagaagagccaaatcgaaaaatggaggccggtccttgcgggagaagttggacaagattgggttgaatcttccggccgggaggcggaaagccgctcatgtgactctcctgacatccttagtagaaggtgaagctgttcatttggctagggactttgcctatgtctgtgaagccgaatttcctagtaaaccagtggcagaatatttaaccagacctcatcttggaggacgaaatgagatggcagctaggaagaacatgctattggcggcccagcaactgtgtaaagaattcacagaacttctcagccaagaccggacaccccatgggaccagcaggctcgccccagtcttggagacgaacatacagaactgcttgtctcatttcagcctgattacccacgggtttggcagccaggccatctgtgccgcggtgtctgccctgcagaactacatcaaagaagccctgattgtcatagacaaatcctacatgaaccctggagaccagagtccagctgattctaacaaaaccctggagaaaatggagaaacacaggaaataaaattggaacgaagaaaggttaggagagtagggaaggaacaggactgcaaaaatccttctccaccgcacagactgggaacccctcctggcctgggggaagagtttgttacctaccttactatttaaagagccttcactggttctgcatcacccgcccctggacttcttagttgtttctctagcgctgagctatctcctaactttggacctattatcagaaggtgacaagtactggctctttattcattaagctttttttttttgaaccccattctttccttctctgaaagtggtgctataagttttagaatcttttaaatacattccctgggccaacagacccacacacttagccattgaaatgtcaaattgatgtgccctagatcaacagatcaacaataccttttttttcagtgttaaggtaatggttggtttttgtgtccgctaaatatttaccttgaaaaaaagaaaagtgtgtatctagcttcttcagagatcaagtcctctggtaggaggcaaaggttctatctgcttagcaactagttaataagtggtatctgacacactctaaaccccgtgttcaaacgggggccttctggttttaggaaacttgtagaaacgaagcctgctgattgatttttttctccttttttttttttttttttttttaactttgaaagttaactcttcaaatgggagactctttgaaatgacatgttcctttaaggtactgaagctttatttgcatatttatttcagatgtttcgagtaaacttgaaaagggtaggcacgaagcaatttgttgctgcttgtcacccccaagtccccgtggaggttctgtattttaagaaacagtgcgttgagtgtacagattttatttatgcgtaatttaatggggtctgtaaatactggtgcacttcttacgacttttttgagacatgggatccaattttaatattaacttttaatggtgatggggtaatctataacacatcataaggttttattcatatatatacagggtattaagaattaagaggatgctgggctctgttcttggcttggaagattctatttaattgaaactctctgttcagaaagcaataactttgtctcgttcctgttgggctgaaccctaaggtgagtgtgcagtacagtgtgtgtgggtgaaatggagatttggaattgaactctctgcctgtaaatgttccccaaataattgttgtgtgtatgatacgtgtataataaaagtattcttgttagaatctgaaaaaaaaaaaaaaaaaaaaaaaaaaaaaaaa

SEQ ID NO: 3169 - DNA, 2212 bp, Homo sapiens
gatgttgagcgcttcaggaaaggcggtgagatccggtaccgcagcagagcactctcagctctgggtcttgcaggcgcagggctcccccatgccagcagaaagatttcctctggtgaagaggaccgtcgaatctgtcctcctcaagacacctcttgtacagaatttattcgaatgccacggccaaggtcttccttgaaaaatgttaaccgatgtgtgctttttgtcttttgtcatcctttctttaggacaggcgacactaacaggtgaagatctcgggagaccatgactaagaaaagaattgctgtgattgggggaggagtgagcgggctctcttccatcaagtgctgcgtagaagaaggcttggaacctgtctgctttgaaaggactgatgacatcggagggctctggaggttccaggaaaatcctgaagaaggaagggccagtatttacaaatcagtgatcatcaatacttctaaagagatgatgtgcttcagtgactatccaatcccagatcattatcccaacttcatgcataatgcccaggtcctggagtatttcaggatgtatgccaaagaatttgaccttctaaagtatattcgatttaagaccactgtgtgcagtgtgaagaagcagcctgattttgccacttcaggccaatgggaagtggtcactgaatctgaagggaaaaaggagatgaatgtctttgatggagtcatggtttgcactggccatcacaccaatgctcatctacctctggaaagcttccctggaattgagaagttcaaagggcagtacttccacagtcgagactataagaacccagagggattcactggaaagagagtcattataattggcattgggaattctggaggggatctggctgtagagattagccaaacagccaagcaggttttcctcagcaccaggagaggggcttggatcctgaatcgtgtaggggactacggatatcctgctgatgtgttgttctcttctcgacttacacattttatatggaagatctgtggccaatcattagcaaacaaatatttggaaaaaaagataaaccaaaggtttgaccatgaaatgtttggcctgaagcctaaacacaggtctaaagacattgccctcacagagtgaaatgatggcagaaatatctaaagctcaagaggaaattgacaaaaggtatgtggagagccaacgccataccattcagggagactacatagataccatggaagagcttgctgatttggtgggggtcaggcccaatctgctgtctctggccttcactgaccccaagctggcattacacttattactgggaccctgcactccaatccactatcgtgtacagggccctggaaagtgggatggggctcgaaaagctatcctcaccacagatgatcgcatcaggaagcctctgatgacaagagtagttgaaaggagtagttctatgacttcaacaatgacaataggcaagtttatgctagctcttgccttctttgctataattatagcttacttctagttgtcctattgtcactgccctgtttttcattgggaagcttatctacagatgccttcagaatctgacgagattgactctcagtttcatattgcccagaaatctactttaatgtctctttcgaaagcattaattcactttcctttttcctacaatgaaacctgttttccatttgtattaactcatctcccttccactcatgatccgtcactcttccttgtggtaatccctagactgggagctcaggtactcttttagtcatctttgtatgtctttagcagagttcttgacatgtggtaggtgcttaataaatgtttgttgtttatcaaattttatggtagggagagtaagtcagcatcggtataaaatcgcttactccacgtaactcttcttctgatagggtttgattttctattagaagctcaattttagttttttttcatattataactaaatatgtttcctgagagataagagaaataatgttcctacaatagttgtatgtatctaagataagacatatagatgcttaagacattttgtttcacttgctattcactagtgtacttgaaacatggtcatttttagcccttttccttaggaaccatgtctttattttctcaataaagaaattactttcaaaaaaaaaaaaaaaaaaaaaaaaaaaaaaaaaaaaaaaaaaaa

SEQ ID NO: 3170 - DNA, 3702 bp, Homo sapiens
agcggagggggaatgagtcaggctccggctccacactggcacgtagtgggcggatcgcgccggcgctgagtaggaaggagcttcagccgccagcccggaacgcagtgagtacagccactcaaaggaaagccaagtcgctttgcaggggagcgtctcatgatttttcagaaacgtgctcatggttaaaaagaaaaatcaaggctcggaataaatacattcaagcactgttaattttagcccaaagacaggcggtacttgcctggagatttgggaaaatcaacatgaaactaaaaatgaaattttagttggagtggagcaagcagtattgatcagaacataccaaatacgaattttttcaaagtctgcgtagaagtttaaattactaggaaaaatgtaaaggagaagtatttactaataaatgaaacaaaagtaataaaataaaaatgaattaatatagtttgacaaaatatcagcgaacgctgaaaagaaaacattaaaataatgtttgagactttttaggttttgtgcaggaagaattgggaaaaatgtgctggatggagtgatactgcttttcttttccacaaaaatttcattattttagagagcggtagagcctttttaaagacagtaagttattgccaattcacaatgaaataagatcacatgctctgaaatgtacaagagctgcatgcaataaacttcatttatctataggtaataactgattgatgtttattcagtagtcgaaatgcacctcatgcactctaattagcacgtcaaattagtctctccgtttcagaggtgtagggcctttgtggagccttctcaataaaataatttgccactcttgaaggttagacattctcttctatcaatgtacacataaaggttttgttttgctttgcttgttgtgaattaaaatggggagaaaatgatgtgttagctattacctagtcatgtgtctttttagtcataggttagcttttcaagacacttcctgcatctctgacctgttgcacctctgttatcttggcacctctgttatcttagcagcaagcacctgcctcagctgacgcttgagccataacccatgtaagtcactgcagggctgaacctctctttgagcctaacagtagaataataattatttttattgaatagtgttaatgtgtcaatgttgaaatgtgcctcagtgtgtgttcctcaaccacatccctatagaggatgttttcttaatagcaatgtgtttttgttttaagaaagtccacacaatttcaaatacacattttctttactaaagtttattgaccagttttgaagtgatccttgttttcagttaaactatctttaataatggtaaataacatattttgtaggttgttgtatatttaatattctctgcaagaacacataaggaacaatacatggacctttaaatatttgtcattgtgaaataaaataacaaggaaaggtgatttcaggtgtactttattcaatacatatatacaagaagttattactataacattaaatttgcaggaaaaaagaaaccactggattattctgcttctattccagagggcttattccaaagggccagtgtgcaaaatatgaatccaagatggcattgtggaaagacgctgtacctcctgtgataaaattactttggtggtgcttttttctcatgtatctcgggaaactaaaaatctgaattgtattcagtggccttttccaaatgaagctcctgaaaagtacatcaagtctaaagtgaaccagctaactcattaagactggaatcatgagcaacaatggagcagacctaacctttggttacatctcctgttttgtagctatccttttgtttggctcaaattttgtgccacttaaaaaatttgatactggtgatggaatgtttctccagtgggttctttgtgctgccatatggttggttgccttggttgtcaatctgatattacattgtccaaagttttggccttttgcaatgcttgggggctgcatttgggcaacagggaacattgctgttgtcccaattatcaaaaccattggtttaggccttggaatcttaatctggggatcatttaatgccttaactggctgggcaagctcaaggtttggctggtttggattggatgcagaagaagtatcaaatccgctgctaaattacattggagctgggctatcagtagtaagtgctttcatatttttgttcatcaaaagtgaaataccaaataacacgtgttccatggataccactccattaataacagagcatgtgagtatagtatgagagacaacttgatttgaaacataaaattaagataaatggataatacataaattttaaacacagatgaaaaagtggtgtttgctcatcactcctggctatgtaaaatatcttagcttatttattatgggtaggtctatgtagcaatcaatcaatatttccgcagttgagcttctcagcaagcacacgggtttatttattttgattaacagatctctactaggtgatatatatataaccccatttttgtaatgatttaaagattcctacaatagaggaaccctaaatactgtagaggaatgtgaaaataactttagaaagtcagaggaaggaggttttgaagttggtccaggggagaatagaccataggaggccaagaaaggtaagtgaagtcctatgagaataggaactggtatcccattctacccgaagtgaaaaacagaaaatatgataggagtcactgttttgatcttgaagaatctaaatcagtctggaatagtaaatctgaatgaaacaggagcaacttttaaaagggacctgataaagcgcaagtgtcagtagctacatatacaaaagtgacttcagggcaaagcctcattgtcatgaacccaggctctaatccttctcatctcaagaaatctctcctgtctgccctgggccagtgctatccagctgccctctgaatccagcgctcctcacccccagtggggtattgccccttggcagggtgcttatttaccccttacttcaaaattaatcttttctcctttccttcttcccctatccaaacttttatcaactaaaaccttagttaaattgacactaaagttgaatagtaattagcttaagtgtaaagagaagaggtttattaatccacaggcatctctaatcagggaaatgtttcagggagaagggaggagttggctttgggaaagggttccttgcctgcttcagggatccagacacctcctgcccaaccatcctccaaaacaatggaacaaaataataaaataaatgcagcttggtaaaagatacacagtaggctaactgcctgagatttttctaggcaataagtttaaagatccataaacagcatgattgatgggtacagaaccatcatcatgagctccttatgatgaaagaaaccgttattgccaaaggaaaacttgacttagcacatgacaaagaattcaaatctactttcttgtctcttacaaaaataataggattataacatcaagaacacttcagttggccaggcgtgatggctcatgcccgtaatcccagcactgtgggaggtcaaggtgggcagatcacctgagttcaggagttcaagaccagcctgtccaacatggtgaaactctatctctactaagaatacaaaaaaaaaaaaaaaa

SEQ ID NO: 3171 - DNA, 2840 bp, Homo sapiens
gtctgcgctttgcaaagcatgcagttaggggagcagctcttggtgagctcagtgaacctgcctggcgcgcacttctacccgctggagagtgcgcgaggcggcagcggcgggagcgctggccacctccccagcgcggccccctctcctcagaagttggacttagacaaagcgtccaagaagttttccggcagtctctcctgcgaggcggtgagcggggagcccgcagccgccagcgcaggggcccccgcggccatgcttagtgacaccgacgccggggacgcatttgccagcgctgcggcagtggccaagccggggcccccggacggccgcaagggctccccctgcggggaggaggagctgccctccgccgctgcaggcgccgccgccgccgccgccgccgccgcggctgcggccactgcgcgctactccatggacagcctgagctccgagcggtactacctccagtcccccggtcctcaggggtcggagctggctgcgccctgctcactcttcccgtaccaggcggcggctggggcgccccacggacctgtgtacccggctcctaacggggcgcgctacccctacggctccatgctgccccccggcggcttccccgcggctgtgtgcccacccgggagggcgcagttcggcccaggagccggtgcgggcagtggcgcgggcggtagcagcggcgggggcggcggcccgggcacctatcagtacagccagggggctccgctctacgggccgtaccctggagccgcagcggcgggatcttgcggaggactggggggcctgggggttccaggttctggcttccgtgcccacgtctacctgtgcaaccggcctctgtggctcaaattccaccgccaccaaactgagatgatcattacgaaacagggcaggcgcatgtttcctttcttgagcttcaacataaacggactcaatcccactgcccactacaatgtgttcgtagaggtggtgctggcggaccccaaccactggcgcttccaggggggcaaatgggtgacctgtggcaaagccgacaataacatgcagggcaacaaaatgtatgttcacccagagtctcctaatactggttcccactggatgagacaggagatttcattcgggaaattaaaactcaccaataacaaaggcgcaaataacaacaacacccagatgatagtcttacaatccttacacaaataccaaccccgactgcatattgttgaagttacagaggatggcgtggaggacttgaatgagccctcaaagacccagacttttaccttctcagaaacgcaattcattgcagtgactgcctaccaaaacaccgatattactcaactaaagattgatcataacccctttgcaaaaggcttcagagacaactatgattccatgtacaccgcttcagaaaatgacaggttaactccatctcccacggattctcctagatcccatcagattgtccctggaggtcggtacggcgttcaatccttcttcccggagccctttgtcaacactttacctcaagcccgctattataatggcgagagaaccgtgccacagaccaacggcctcctttcaccccaacagagcgaagaggtggccaaccctccccagcggtggcttgtcacgcctgtccagcaacctgggaccaacaaactagacatcagttcctatgaatctgaatatacttctagcacattgctcccatatggcattaaatccttgccccttcagacatcccatgccctggggtattacccagacccaacctttcctgcaatggcagggtggggaggtcgaggttcttaccagaggaagatggcagctggactaccatggacctccagaacaagccccactgtgttctctgaagatcagctctccaaggagaaagtgaaagaggaaattggctcttcttggatagagacacccccttccatcaaatctctagattccaatgattcaggagtatacaccagtgcttgtaagcgaaggcggctgtctcctagcaactccagtaatgaaaattcaccctccataaagtgtgaggacattaatgctgaagagtatagtaaagacacctcaaaaggcatgggagggtattatgctttttacacaactccctaaagagttattttaacctcaaaaattagctaactttttgcagatggacttggtggtgttttttgttgtcttctttgcctaggttgccaaaaagatgtttgccttccaccttgatgcatcctgttttgtgcaattctctaaaagaaggtgccaaagctttttgattgctgcaggtaactgaaacaaacctagcatttttaaaaaataagattaatggaagactttaaggtattttaaaattcgaagggtatccaaggttctgtatttatttattggggagacactaacaattcaaagaagcaggctgtgaacattgggtgcccagtgctatcagatgagttaaaacctttgattctcatttctatttgtaaattcttaagcaaatagaagccgagtgttaaggtgttttgcttctgaaagagggctgtgccttccgtttcagaaggagacattttgctgttacattctgccaggggcaaaagatactaggcccaggagtcaagaaaagcttttgtgaaagtgatagtttcacctgactttgattccttaacccccggcttttggaacaagccatgtttgccctagtccaggattgcctcacttgagacttgctaggcctctgctgtgtgctggggtggccagtgggactcaggagagagcaagctaaggagtcaccaaaaaaaaaaaaaaaaaaaaaaaaa

SEQ ID NO: 3172 - DNA, 4765 bp, Homo sapiens
cgggagcggcgggggcggcgccgaggccgcgggcggggggaggagggccgcagccccggagaggggaaaaggcgggccggacggcgccagcagccagcccgaggacgcgagcggcaggtgtgcacagaggttctccactttgttttctgaactcgcggtcaggatggttttctctgtcaggcagtgtggccatgttggcagaactgaagaagttttactgacgttcaagatattccttgtcatcatttgtcttcatgtcgttctggtaacatccctggaagaagatactgataattccagtttgtcaccaccacctgctaaattatctgttgtcagttttgccccctcctccaatggtactccagaggttgaaacaacaagcctcaatgatgttactttaagcttactcccttcaaacgaaacagaaaaaactaaaatcactatagtaaaaaccttcaatgcttcaggcgtcaaaccccagagaaatatctgcaatttgtcatctatttgcaatgactcagcattttttagaggtgagatcatgtttcaatatgataaagaaagcactgttccccagaatcaacatataacgaatggcaccttaactggagtcctgtctctaagtgaattaaaacgctcagagctcaacaaaaccctgcaaaccctaagtgagacttactttataatgtgtgctacagcagaggcccaaagcacattaaattgtacattcacaataaaactgaataatacaatgaatgcatgtgctgcaatagccgctttggaaagagtaaagattcgaccaatggaacactgctgctgttctgtcaggataccctgcccttcctccccagaagagttgggaaagcttcagtgtgacctgcaggatcccattgtctgtcttgctgaccatccacgtggcccaccattttcttccagccaatccatcccagtggtgcctcgggccactgtgctttcccaggtccccaaagctacctcttttgctgagcctccagattattcacctgtgacccacaatgttccctctccaataggggagattcaacccctttcaccccagccttcagctcccatagcttccagccctgccattgacatgcccccacagtctgaaacgatctcttcccctatgccccaaacccatgtctccggcaccccacctcctgtgaaagcctcattttcctctcccaccgtgtctgcccctgcgaatgtcaacactaccagcgcacctcctgtccagacagacatcgtcaacaccagcagtatttctgatcttgagaaccaagtgttgcagatggagaaggctctgtccttgggcagcctggagcctaacctcgcaggagaaatgatcaaccaagtcagcagactccttcattccccgcctgacatgctggcccctctggctcaaagattgctgaaagtagtggatgacattggcctacagctgaacttttcaaacacgactataagtctaacctccccttctttggctctggctgtgatcagagtgaatgccagtagtttcaacacaactacctttgtggcccaagaccctgcaaatcttcaggtttctctggaaacccaagctcctgagaacagtattggcacaattactcttccttcatcgctgatgaataatttaccagctcatgacatggagctagcttccagggttcagttcaatttttttgaaacacctgctttgtttcaggatccttccctggagaacctctctctgatcagctacgtcatatcatcgagtgttgcaaacctgaccgtcaggaacttgacaagaaacgtgacagtcacattaaagcacatcaacccgagccaggatgagttaacagtgagatgtgtattttgggacttgggcagaaatggtggcagaggaggctggtcagacaatggctgctctgtcaaagacaggagattgaatgaaaccatctgtacctgtagccatctaacaagcttcggcgttctgctggacctatctaggacatctgtgctgcctgctcaaatgatggctctgacgttcattacatatattggttgtgggctttcatcaatttttctgtcagtgactcttgtaacctacatagcttttgaaaagatccggagggattacccttccaaaatcctcatccagctgtgtgctgctctgcttctgctgaacctggtcttcctcctggactcgtggattgctctgtataagatgcaaggcctctgcatctcagtggctgtatttcttcattattttctcttggtctcattcacatggatgggcctagaagcattccatatgtacctggcccttgtcaaagtatttaatacttacatccgaaaatacatccttaaattctgcattgtcggttggggggtaccagctgtggttgtgaccatcatcctgactatatccccagataactatgggcttggatcctatgggaaattccccaatggttcaccggatgacttctgctggatcaacaacaatgcagtattctacattacggtggtgggatatttctgtgtgatatttttgctgaacgtcagcatgttcattgtggtcctggttcagctctgtcgaattaaaaagaagaagcaactgggagcccagcgaaaaaccagtattcaagacctcaggagtatcgctggccttacatttttactgggaataacttggggctttgccttctttgcctggggaccagttaacgtgaccttcatgtatctgtttgccatctttaataccttacaaggatttttcatattcatcttttactgtgtggccaaagaaaatgtcaggaagcaatggaggcggtatctttgttgtggaaagttacggctggctgaaaattctgactggagtaaaactgctactaatggtttaaagaagcagactgtaaaccaaggagtgtccagctcttcaaattccttacagtcaagcagtaactccactaactccaccacactgctagtgaataatgattgctcagtacacgcaagcgggaatggaaatgcttctacagagaggaatggggtctcttttagtgttcagaatggagatgtgtgccttcacgatttcactggaaaacagcacatgtttaacgagaaggaagattcctgcaatgggaaaggccgtatggctctcagaaggacttcaaagcggggaagcttacactttattgagcaaatgtgattcctttcttctaaaatcaaagcatgatgcttgacagtgtgaaatgtccaattttaccttttacacaatgtgagatgtatgaaaatcaactcattttattctcggcaacatctggagaagcataagctaattaagggcgatgattattattacaagaagaaaccaagacattacaccatggtttttagacatttctgatttggtttcttatctttcattttataagaaggttggttttaaacaatacactaagaatgactcctataaagaaaacaaaaaaaggtagtgaactttcagctaccttttaaagaggctaagttatctttgataacatcatataaagcaactgttgacttcagcctgttggtgagtttagttgtgcatgcctttgttgtatataagctaaattctagtgacccatgtgtcaaaaatcttacttctacatttttttgtatttattttctactgtgtaaatgtattcctttgtagaatcatggttgttttgtctcacgtgataattcagaaaatccttgctcgttccgcaaatcctaaagctccttttggagatgatataggatgtgaaatacagaaacctcagtgaaatcaagaaataatgatcccagccagactgagaaaatgtaagcagacagtgccacagttagctcatacagtgcctttgagcaagttaggaaaagatgcccccactgggcagacacagccctatgggtcatggtttgacaaacagagtgagagaccatattttagccccactcaccctcttgggtgcacgacctgtacagccaaacacagcatccaatatgaatacccatcccctgaccgcatccccagtagtcagattatagaatctgcaccaagatgtttagctttataccttggccacagagagggatgaactgtcatccagaccatgtgtcaggaaaattgtgaacgtagatgaggtacatacactgccgcttctcaaatccccagagcctttaggaacaggagagtagactaggattccttctcttaaaaaggtacatatatatggaaaaaaatcatattgccgttctttaaaaggcaactgcatggtacattgttgattgttatgactggtacactctggcccagccagagctataattgttttttaaatgtgtcttgaagaatgcacagtgacaaggggagtagctattgggaacagggaactgtcctacactgctattgttgctacatgtatcgagccttgattgctcctagttatatacagggtctatcttgcttcctacctacatctgcttgagcagtgcctcaagtacatccttattaggaacatttcaaaccccttttagttaagtctttcactaaggttctcttgcatatatttcaagtgaatgttggatctcagactaaccatagtaataatacacatttctgtgagtgctgacttgtctttgcaatatttcttttctgatttatttaattttcttgtatttatatgttaaaatcaaaaatgttaaaatcaatgaaataaatttgcagttaaga

SEQ ID NO: 3173 - DNA, 4675 bp, Homo sapiens
cgggagcggcgggggcggcgccgaggccgcgggcggggggaggagggccgcagccccggagaggggaaaaggcgggccggacggcgccagcagccagcccgaggacgcgagcggcaggtgtgcacagaggttctccactttgttttctgaactcgcggtcaggatggttttctctgtcaggcagtgtggccatgttggcagaactgaagaagttttactgacgttcaagatattccttgtcatcatttgtcttcatgtcgttctggtaacatccctggaagaagatactgataattccagtttgtcaccaccacctgaggttgaaacaacaagcctcaatgatgttactttaagcttactcccttcaaacgaaacaggcgtcaaaccccagagaaatatctgcaatttgtcatctatttgcaatgactcagcattttttagaggtgagatcatgtttcaatatgataaagaaagcactgttccccagaatcaacatataacgaatggcaccttaactggagtcctgtctctaagtgaattaaaacgctcagagctcaacaaaaccctgcaaaccctaagtgagacttactttataatgtgtgctacagcagaggcccaaagcacattaaattgtacattcacaataaaactgaataatacaatgaatgcatgtgctgcaatagccgctttggaaagagtaaagattcgaccaatggaacactgctgctgttctgtcaggataccctgcccttcctccccagaagagttgggaaagcttcagtgtgacctgcaggatcccattgtctgtcttgctgaccatccacgtggcccaccattttcttccagccaatccatcccagtggtgcctcgggccactgtgctttcccaggtccccaaagctacctcttttgctgagcctccagattattcacctgtgacccacaatgttccctctccaataggggagattcaacccctttcaccccagccttcagctcccatagcttccagccctgccattgacatgcccccacagtctgaaacgatctcttcccctatgccccaaacccatgtctccggcaccccacctcctgtgaaagcctcattttcctctcccaccgtgtctgcccctgcgaatgtcaacactaccagcgcacctcctgtccagacagacatcgtcaacaccagcagtatttctgatcttgagaaccaagtgttgcagatggagaaggctctgtccttgggcagcctggagcctaacctcgcaggagaaatgatcaaccaagtcagcagactccttcattccccgcctgacatgctggcccctctggctcaaagattgctgaaagtagtggatgacattggcctacagctgaacttttcaaacacgactataagtctaacctccccttctttggctctggctgtgatcagagtgaatgccagtagtttcaacacaactacctttgtggcccaagaccctgcaaatcttcaggtttctctggaaacccaagctcctgagaacagtattggcacaattactcttccttcatcgctgatgaataatttaccagctcatgacatggagctagcttccagggttcagttcaatttttttgaaacacctgctttgtttcaggatccttccctggagaacctctctctgatcagctacgtcatatcatcgagtgttgcaaacctgaccgtcaggaacttgacaagaaacgtgacagtcacattaaagcacatcaacccgagccaggatgagttaacagtgagatgtgtattttgggacttgggcagaaatggtggcagaggaggctggtcagacaatggctgctctgtcaaagacaggagattgaatgaaaccatctgtacctgtagccatctaacaagcttcggcgttctgctggacctatctaggacatctgtgctgcctgctcaaatgatggctctgacgttcattacatatattggttgtgggctttcatcaatttttctgtcagtgactcttgtaacctacatagcttttgaaaagatccggagggattacccttccaaaatcctcatccagctgtgtgctgctctgcttctgctgaacctggtcttcctcctggactcgtggattgctctgtataagatgcaaggcctctgcatctcagtggctgtatttcttcattattttctcttggtctcattcacatggatgggcctagaagcattccatatgtacctggcccttgtcaaagtatttaatacttacatccgaaaatacatccttaaattctgcattgtcggttggggggtaccagctgtggttgtgaccatcatcctgactatatccccagataactatgggcttggatcctatgggaaattccccaatggttcaccggatgacttctgctggatcaacaacaatgcagtattctacattacggtggtgggatatttctgtgtgatatttttgctgaacgtcagcatgttcattgtggtcctggttcagctctgtcgaattaaaaagaagaagcaactgggagcccagcgaaaaaccagtattcaagacctcaggagtatcgctggccttacatttttactgggaataacttggggctttgccttctttgcctggggaccagttaacgtgaccttcatgtatctgtttgccatctttaataccttacaaggatttttcatattcatcttttactgtgtggccaaagaaaatgtcaggaagcaatggaggcggtatctttgttgtggaaagttacggctggctgaaaattctgactggagtaaaactgctactaatggtttaaagaagcagactgtaaaccaaggagtgtccagctcttcaaattccttacagtcaagcagtaactccactaactccaccacactgctagtgaataatgattgctcagtacacgcaagcgggaatggaaatgcttctacagagaggaatggggtctcttttagtgttcagaatggagatgtgtgccttcacgatttcactggaaaacagcacatgtttaacgagaaggaagattcctgcaatgggaaaggccgtatggctctcagaaggacttcaaagcggggaagcttacactttattgagcaaatgtgattcctttcttctaaaatcaaagcatgatgcttgacagtgtgaaatgtccaattttaccttttacacaatgtgagatgtatgaaaatcaactcattttattctcggcaacatctggagaagcataagctaattaagggcgatgattattattacaagaagaaaccaagacattacaccatggtttttagacatttctgatttggtttcttatctttcattttataagaaggttggttttaaacaatacactaagaatgactcctataaagaaaacaaaaaaaggtagtgaactttcagctaccttttaaagaggctaagttatctttgataacatcatataaagcaactgttgacttcagcctgttggtgagtttagttgtgcatgcctttgttgtatataagctaaattctagtgacccatgtgtcaaaaatcttacttctacatttttttgtatttattttctactgtgtaaatgtattcctttgtagaatcatggttgttttgtctcacgtgataattcagaaaatccttgctcgttccgcaaatcctaaagctccttttggagatgatataggatgtgaaatacagaaacctcagtgaaatcaagaaataatgatcccagccagactgagaaaatgtaagcagacagtgccacagttagctcatacagtgcctttgagcaagttaggaaaagatgcccccactgggcagacacagccctatgggtcatggtttgacaaacagagtgagagaccatattttagccccactcaccctcttgggtgcacgacctgtacagccaaacacagcatccaatatgaatacccatcccctgaccgcatccccagtagtcagattatagaatctgcaccaagatgtttagctttataccttggccacagagagggatgaactgtcatccagaccatgtgtcaggaaaattgtgaacgtagatgaggtacatacactgccgcttctcaaatccccagagcctttaggaacaggagagtagactaggattccttctcttaaaaaggtacatatatatggaaaaaaatcatattgccgttctttaaaaggcaactgcatggtacattgttgattgttatgactggtacactctggcccagccagagctataattgttttttaaatgtgtcttgaagaatgcacagtgacaaggggagtagctattgggaacagggaactgtcctacactgctattgttgctacatgtatcgagccttgattgctcctagttatatacagggtctatcttgcttcctacctacatctgcttgagcagtgcctcaagtacatccttattaggaacatttcaaaccccttttagttaagtctttcactaaggttctcttgcatatatttcaagtgaatgttggatctcagactaaccatagtaataatacacatttctgtgagtgctgacttgtctttgcaatatttcttttctgatttatttaattttcttgtatttatatgttaaaatcaaaaatgttaaaatcaatgaaataaatttgcagttaaga

SEQ ID NO: 3174 - DNA, 4699 bp, Homo sapiens
cgggagcggcgggggcggcgccgaggccgcgggcggggggaggagggccgcagccccggagaggggaaaaggcgggccggacggcgccagcagccagcccgaggacgcgagcggcaggtgtgcacagaggttctccactttgttttctgaactcgcggtcaggatggttttctctgtcaggcagtgtggccatgttggcagaactgaagaagttttactgacgttcaagatattccttgtcatcatttgtcttcatgtcgttctggtaacatccctggaagaagatactgataattccagtttgtcaccaccacctgctaaattatctgttgtcagttttgccccctcctccaatggtactccagatgttactttaagcttactcccttcaaacgaaacaggcgtcaaaccccagagaaatatctgcaatttgtcatctatttgcaatgactcagcattttttagaggtgagatcatgtttcaatatgataaagaaagcactgttccccagaatcaacatataacgaatggcaccttaactggagtcctgtctctaagtgaattaaaacgctcagagctcaacaaaaccctgcaaaccctaagtgagacttactttataatgtgtgctacagcagaggcccaaagcacattaaattgtacattcacaataaaactgaataatacaatgaatgcatgtgctgcaatagccgctttggaaagagtaaagattcgaccaatggaacactgctgctgttctgtcaggataccctgcccttcctccccagaagagttgggaaagcttcagtgtgacctgcaggatcccattgtctgtcttgctgaccatccacgtggcccaccattttcttccagccaatccatcccagtggtgcctcgggccactgtgctttcccaggtccccaaagctacctcttttgctgagcctccagattattcacctgtgacccacaatgttccctctccaataggggagattcaacccctttcaccccagccttcagctcccatagcttccagccctgccattgacatgcccccacagtctgaaacgatctcttcccctatgccccaaacccatgtctccggcaccccacctcctgtgaaagcctcattttcctctcccaccgtgtctgcccctgcgaatgtcaacactaccagcgcacctcctgtccagacagacatcgtcaacaccagcagtatttctgatcttgagaaccaagtgttgcagatggagaaggctctgtccttgggcagcctggagcctaacctcgcaggagaaatgatcaaccaagtcagcagactccttcattccccgcctgacatgctggcccctctggctcaaagattgctgaaagtagtggatgacattggcctacagctgaacttttcaaacacgactataagtctaacctccccttctttggctctggctgtgatcagagtgaatgccagtagtttcaacacaactacctttgtggcccaagaccctgcaaatcttcaggtttctctggaaacccaagctcctgagaacagtattggcacaattactcttccttcatcgctgatgaataatttaccagctcatgacatggagctagcttccagggttcagttcaatttttttgaaacacctgctttgtttcaggatccttccctggagaacctctctctgatcagctacgtcatatcatcgagtgttgcaaacctgaccgtcaggaacttgacaagaaacgtgacagtcacattaaagcacatcaacccgagccaggatgagttaacagtgagatgtgtattttgggacttgggcagaaatggtggcagaggaggctggtcagacaatggctgctctgtcaaagacaggagattgaatgaaaccatctgtacctgtagccatctaacaagcttcggcgttctgctggacctatctaggacatctgtgctgcctgctcaaatgatggctctgacgttcattacatatattggttgtgggctttcatcaatttttctgtcagtgactcttgtaacctacatagcttttgaaaagatccggagggattacccttccaaaatcctcatccagctgtgtgctgctctgcttctgctgaacctggtcttcctcctggactcgtggattgctctgtataagatgcaaggcctctgcatctcagtggctgtatttcttcattattttctcttggtctcattcacatggatgggcctagaagcattccatatgtacctggcccttgtcaaagtatttaatacttacatccgaaaatacatccttaaattctgcattgtcggttggggggtaccagctgtggttgtgaccatcatcctgactatatccccagataactatgggcttggatcctatgggaaattccccaatggttcaccggatgacttctgctggatcaacaacaatgcagtattctacattacggtggtgggatatttctgtgtgatatttttgctgaacgtcagcatgttcattgtggtcctggttcagctctgtcgaattaaaaagaagaagcaactgggagcccagcgaaaaaccagtattcaagacctcaggagtatcgctggccttacatttttactgggaataacttggggctttgccttctttgcctggggaccagttaacgtgaccttcatgtatctgtttgccatctttaataccttacaaggatttttcatattcatcttttactgtgtggccaaagaaaatgtcaggaagcaatggaggcggtatctttgttgtggaaagttacggctggctgaaaattctgactggagtaaaactgctactaatggtttaaagaagcagactgtaaaccaaggagtgtccagctcttcaaattccttacagtcaagcagtaactccactaactccaccacactgctagtgaataatgattgctcagtacacgcaagcgggaatggaaatgcttctacagagaggaatggggtctcttttagtgttcagaatggagatgtgtgccttcacgatttcactggaaaacagcacatgtttaacgagaaggaagattcctgcaatgggaaaggccgtatggctctcagaaggacttcaaagcggggaagcttacactttattgagcaaatgtgattcctttcttctaaaatcaaagcatgatgcttgacagtgtgaaatgtccaattttaccttttacacaatgtgagatgtatgaaaatcaactcattttattctcggcaacatctggagaagcataagctaattaagggcgatgattattattacaagaagaaaccaagacattacaccatggtttttagacatttctgatttggtttcttatctttcattttataagaaggttggttttaaacaatacactaagaatgactcctataaagaaaacaaaaaaaggtagtgaactttcagctaccttttaaagaggctaagttatctttgataacatcatataaagcaactgttgacttcagcctgttggtgagtttagttgtgcatgcctttgttgtatataagctaaattctagtgacccatgtgtcaaaaatcttacttctacatttttttgtatttattttctactgtgtaaatgtattcctttgtagaatcatggttgttttgtctcacgtgataattcagaaaatccttgctcgttccgcaaatcctaaagctccttttggagatgatataggatgtgaaatacagaaacctcagtgaaatcaagaaataatgatcccagccagactgagaaaatgtaagcagacagtgccacagttagctcatacagtgcctttgagcaagttaggaaaagatgcccccactgggcagacacagccctatgggtcatggtttgacaaacagagtgagagaccatattttagccccactcaccctcttgggtgcacgacctgtacagccaaacacagcatccaatatgaatacccatcccctgaccgcatccccagtagtcagattatagaatctgcaccaagatgtttagctttataccttggccacagagagggatgaactgtcatccagaccatgtgtcaggaaaattgtgaacgtagatgaggtacatacactgccgcttctcaaatccccagagcctttaggaacaggagagtagactaggattccttctcttaaaaaggtacatatatatggaaaaaaatcatattgccgttctttaaaaggcaactgcatggtacattgttgattgttatgactggtacactctggcccagccagagctataattgttttttaaatgtgtcttgaagaatgcacagtgacaaggggagtagctattgggaacagggaactgtcctacactgctattgttgctacatgtatcgagccttgattgctcctagttatatacagggtctatcttgcttcctacctacatctgcttgagcagtgcctcaagtacatccttattaggaacatttcaaaccccttttagttaagtctttcactaaggttctcttgcatatatttcaagtgaatgttggatctcagactaaccatagtaataatacacatttctgtgagtgctgacttgtctttgcaatatttcttttctgatttatttaattttcttgtatttatatgttaaaatcaaaaatgttaaaatcaatgaaataaatttgcagttaaga

SEQ ID NO: 3175 - DNA, 1866 bp, Homo sapiens; identical to SEQ ID NO: 151

SEQ ID NO: 3176 - DNA, 4651 bp, Homo sapiens
cgggagcggcgggggcggcgccgaggccgcgggcggggggaggagggccgcagccccggagaggggaaaaggcgggccggacggcgccagcagccagcccgaggacgcgagcggcaggtgtgcacagaggttctccactttgttttctgaactcgcggtcaggatggttttctctgtcaggcagtgtggccatgttggcagaactgaagaagttttactgacgttcaagatattccttgtcatcatttgtcttcatgtcgttctggtaacatccctggaagaagatactgataattccagtttgtcaccaccacctgatgttactttaagcttactcccttcaaacgaaacaggcgtcaaaccccagagaaatatctgcaatttgtcatctatttgcaatgactcagcattttttagaggtgagatcatgtttcaatatgataaagaaagcactgttccccagaatcaacatataacgaatggcaccttaactggagtcctgtctctaagtgaattaaaacgctcagagctcaacaaaaccctgcaaaccctaagtgagacttactttataatgtgtgctacagcagaggcccaaagcacattaaattgtacattcacaataaaactgaataatacaatgaatgcatgtgctgcaatagccgctttggaaagagtaaagattcgaccaatggaacactgctgctgttctgtcaggataccctgcccttcctccccagaagagttgggaaagcttcagtgtgacctgcaggatcccattgtctgtcttgctgaccatccacgtggcccaccattttcttccagccaatccatcccagtggtgcctcgggccactgtgctttcccaggtccccaaagctacctcttttgctgagcctccagattattcacctgtgacccacaatgttccctctccaataggggagattcaacccctttcaccccagccttcagctcccatagcttccagccctgccattgacatgcccccacagtctgaaacgatctcttcccctatgccccaaacccatgtctccggcaccccacctcctgtgaaagcctcattttcctctcccaccgtgtctgcccctgcgaatgtcaacactaccagcgcacctcctgtccagacagacatcgtcaacaccagcagtatttctgatcttgagaaccaagtgttgcagatggagaaggctctgtccttgggcagcctggagcctaacctcgcaggagaaatgatcaaccaagtcagcagactccttcattccccgcctgacatgctggcccctctggctcaaagattgctgaaagtagtggatgacattggcctacagctgaacttttcaaacacgactataagtctaacctccccttctttggctctggctgtgatcagagtgaatgccagtagtttcaacacaactacctttgtggcccaagaccctgcaaatcttcaggtttctctggaaacccaagctcctgagaacagtattggcacaattactcttccttcatcgctgatgaataatttaccagctcatgacatggagctagcttccagggttcagttcaatttttttgaaacacctgctttgtttcaggatccttccctggagaacctctctctgatcagctacgtcatatcatcgagtgttgcaaacctgaccgtcaggaacttgacaagaaacgtgacagtcacattaaagcacatcaacccgagccaggatgagttaacagtgagatgtgtattttgggacttgggcagaaatggtggcagaggaggctggtcagacaatggctgctctgtcaaagacaggagattgaatgaaaccatctgtacctgtagccatctaacaagcttcggcgttctgctggacctatctaggacatctgtgctgcctgctcaaatgatggctctgacgttcattacatatattggttgtgggctttcatcaatttttctgtcagtgactcttgtaacctacatagcttttgaaaagatccggagggattacccttccaaaatcctcatccagctgtgtgctgctctgcttctgctgaacctggtcttcctcctggactcgtggattgctctgtataagatgcaaggcctctgcatctcagtggctgtatttcttcattattttctcttggtctcattcacatggatgggcctagaagcattccatatgtacctggcccttgtcaaagtatttaatacttacatccgaaaatacatccttaaattctgcattgtcggttggggggtaccagctgtggttgtgaccatcatcctgactatatccccagataactatgggcttggatcctatgggaaattccccaatggttcaccggatgacttctgctggatcaacaacaatgcagtattctacattacggtggtgggatatttctgtgtgatatttttgctgaacgtcagcatgttcattgtggtcctggttcagctctgtcgaattaaaaagaagaagcaactgggagcccagcgaaaaaccagtattcaagacctcaggagtatcgctggccttacatttttactgggaataacttggggctttgccttctttgcctggggaccagttaacgtgaccttcatgtatctgtttgccatctttaataccttacaaggatttttcatattcatcttttactgtgtggccaaagaaaatgtcaggaagcaatggaggcggtatctttgttgtggaaagttacggctggctgaaaattctgactggagtaaaactgctactaatggtttaaagaagcagactgtaaaccaaggagtgtccagctcttcaaattccttacagtcaagcagtaactccactaactccaccacactgctagtgaataatgattgctcagtacacgcaagcgggaatggaaatgcttctacagagaggaatggggtctcttttagtgttcagaatggagatgtgtgccttcacgatttcactggaaaacagcacatgtttaacgagaaggaagattcctgcaatgggaaaggccgtatggctctcagaaggacttcaaagcggggaagcttacactttattgagcaaatgtgattcctttcttctaaaatcaaagcatgatgcttgacagtgtgaaatgtccaattttaccttttacacaatgtgagatgtatgaaaatcaactcattttattctcggcaacatctggagaagcataagctaattaagggcgatgattattattacaagaagaaaccaagacattacaccatggtttttagacatttctgatttggtttcttatctttcattttataagaaggttggttttaaacaatacactaagaatgactcctataaagaaaacaaaaaaaggtagtgaactttcagctaccttttaaagaggctaagttatctttgataacatcatataaagcaactgttgacttcagcctgttggtgagtttagttgtgcatgcctttgttgtatataagctaaattctagtgacccatgtgtcaaaaatcttacttctacatttttttgtatttattttctactgtgtaaatgtattcctttgtagaatcatggttgttttgtctcacgtgataattcagaaaatccttgctcgttccgcaaatcctaaagctccttttggagatgatataggatgtgaaatacagaaacctcagtgaaatcaagaaataatgatcccagccagactgagaaaatgtaagcagacagtgccacagttagctcatacagtgcctttgagcaagttaggaaaagatgcccccactgggcagacacagccctatgggtcatggtttgacaaacagagtgagagaccatattttagccccactcaccctcttgggtgcacgacctgtacagccaaacacagcatccaatatgaatacccatcccctgaccgcatccccagtagtcagattatagaatctgcaccaagatgtttagctttataccttggccacagagagggatgaactgtcatccagaccatgtgtcaggaaaattgtgaacgtagatgaggtacatacactgccgcttctcaaatccccagagcctttaggaacaggagagtagactaggattccttctcttaaaaaggtacatatatatggaaaaaaatcatattgccgttctttaaaaggcaactgcatggtacattgttgattgttatgactggtacactctggcccagccagagctataattgttttttaaatgtgtcttgaagaatgcacagtgacaaggggagtagctattgggaacagggaactgtcctacactgctattgttgctacatgtatcgagccttgattgctcctagttatatacagggtctatcttgcttcctacctacatctgcttgagcagtgcctcaagtacatccttattaggaacatttcaaaccccttttagttaagtctttcactaaggttctcttgcatatatttcaagtgaatgttggatctcagactaaccatagtaataatacacatttctgtgagtgctgacttgtctttgcaatatttcttttctgatttatttaattttcttgtatttatatgttaaaatcaaaaatgttaaaatcaatgaaataaatttgcagttaaga

SEQ ID NO: 3177 - DNA, 4723 bp, Homo sapiens
cgggagcggcgggggcggcgccgaggccgcgggcggggggaggagggccgcagccccggagaggggaaaaggcgggccggacggcgccagcagccagcccgaggacgcgagcggcaggtgtgcacagaggttctccactttgttttctgaactcgcggtcaggatggttttctctgtcaggcagtgtggccatgttggcagaactgaagaagttttactgacgttcaagatattccttgtcatcatttgtcttcatgtcgttctggtaacatccctggaagaagatactgataattccagtttgtcaccaccacctgctaaattatctgttgtcagttttgccccctcctccaatggtactccagaggttgaaacaacaagcctcaatgatgttactttaagcttactcccttcaaacgaaacaggcgtcaaaccccagagaaatatctgcaatttgtcatctatttgcaatgactcagcattttttagaggtgagatcatgtttcaatatgataaagaaagcactgttccccagaatcaacatataacgaatggcaccttaactggagtcctgtctctaagtgaattaaaacgctcagagctcaacaaaaccctgcaaaccctaagtgagacttactttataatgtgtgctacagcagaggcccaaagcacattaaattgtacattcacaataaaactgaataatacaatgaatgcatgtgctgcaatagccgctttggaaagagtaaagattcgaccaatggaacactgctgctgttctgtcaggataccctgcccttcctccccagaagagttgggaaagcttcagtgtgacctgcaggatcccattgtctgtcttgctgaccatccacgtggcccaccattttcttccagccaatccatcccagtggtgcctcgggccactgtgctttcccaggtccccaaagctacctcttttgctgagcctccagattattcacctgtgacccacaatgttccctctccaataggggagattcaacccctttcaccccagccttcagctcccatagcttccagccctgccattgacatgcccccacagtctgaaacgatctcttcccctatgccccaaacccatgtctccggcaccccacctcctgtgaaagcctcattttcctctcccaccgtgtctgcccctgcgaatgtcaacactaccagcgcacctcctgtccagacagacatcgtcaacaccagcagtatttctgatcttgagaaccaagtgttgcagatggagaaggctctgtccttgggcagcctggagcctaacctcgcaggagaaatgatcaaccaagtcagcagactccttcattccccgcctgacatgctggcccctctggctcaaagattgctgaaagtagtggatgacattggcctacagctgaacttttcaaacacgactataagtctaacctccccttctttggctctggctgtgatcagagtgaatgccagtagtttcaacacaactacctttgtggcccaagaccctgcaaatcttcaggtttctctggaaacccaagctcctgagaacagtattggcacaattactcttccttcatcgctgatgaataatttaccagctcatgacatggagctagcttccagggttcagttcaatttttttgaaacacctgctttgtttcaggatccttccctggagaacctctctctgatcagctacgtcatatcatcgagtgttgcaaacctgaccgtcaggaacttgacaagaaacgtgacagtcacattaaagcacatcaacccgagccaggatgagttaacagtgagatgtgtattttgggacttgggcagaaatggtggcagaggaggctggtcagacaatggctgctctgtcaaagacaggagattgaatgaaaccatctgtacctgtagccatctaacaagcttcggcgttctgctggacctatctaggacatctgtgctgcctgctcaaatgatggctctgacgttcattacatatattggttgtgggctttcatcaatttttctgtcagtgactcttgtaacctacatagcttttgaaaagatccggagggattacccttccaaaatcctcatccagctgtgtgctgctctgcttctgctgaacctggtcttcctcctggactcgtggattgctctgtataagatgcaaggcctctgcatctcagtggctgtatttcttcattattttctcttggtctcattcacatggatgggcctagaagcattccatatgtacctggcccttgtcaaagtatttaatacttacatccgaaaatacatccttaaattctgcattgtcggttggggggtaccagctgtggttgtgaccatcatcctgactatatccccagataactatgggcttggatcctatgggaaattccccaatggttcaccggatgacttctgctggatcaacaacaatgcagtattctacattacggtggtgggatatttctgtgtgatatttttgctgaacgtcagcatgttcattgtggtcctggttcagctctgtcgaattaaaaagaagaagcaactgggagcccagcgaaaaaccagtattcaagacctcaggagtatcgctggccttacatttttactgggaataacttggggctttgccttctttgcctggggaccagttaacgtgaccttcatgtatctgtttgccatctttaataccttacaaggatttttcatattcatcttttactgtgtggccaaagaaaatgtcaggaagcaatggaggcggtatctttgttgtggaaagttacggctggctgaaaattctgactggagtaaaactgctactaatggtttaaagaagcagactgtaaaccaaggagtgtccagctcttcaaattccttacagtcaagcagtaactccactaactccaccacactgctagtgaataatgattgctcagtacacgcaagcgggaatggaaatgcttctacagagaggaatggggtctcttttagtgttcagaatggagatgtgtgccttcacgatttcactggaaaacagcacatgtttaacgagaaggaagattcctgcaatgggaaaggccgtatggctctcagaaggacttcaaagcggggaagcttacactttattgagcaaatgtgattcctttcttctaaaatcaaagcatgatgcttgacagtgtgaaatgtccaattttaccttttacacaatgtgagatgtatgaaaatcaactcattttattctcggcaacatctggagaagcataagctaattaagggcgatgattattattacaagaagaaaccaagacattacaccatggtttttagacatttctgatttggtttcttatctttcattttataagaaggttggttttaaacaatacactaagaatgactcctataaagaaaacaaaaaaaggtagtgaactttcagctaccttttaaagaggctaagttatctttgataacatcatataaagcaactgttgacttcagcctgttggtgagtttagttgtgcatgcctttgttgtatataagctaaattctagtgacccatgtgtcaaaaatcttacttctacatttttttgtatttattttctactgtgtaaatgtattcctttgtagaatcatggttgttttgtctcacgtgataattcagaaaatccttgctcgttccgcaaatcctaaagctccttttggagatgatataggatgtgaaatacagaaacctcagtgaaatcaagaaataatgatcccagccagactgagaaaatgtaagcagacagtgccacagttagctcatacagtgcctttgagcaagttaggaaaagatgcccccactgggcagacacagccctatgggtcatggtttgacaaacagagtgagagaccatattttagccccactcaccctcttgggtgcacgacctgtacagccaaacacagcatccaatatgaatacccatcccctgaccgcatccccagtagtcagattatagaatctgcaccaagatgtttagctttataccttggccacagagagggatgaactgtcatccagaccatgtgtcaggaaaattgtgaacgtagatgaggtacatacactgccgcttctcaaatccccagagcctttaggaacaggagagtagactaggattccttctcttaaaaaggtacatatatatggaaaaaaatcatattgccgttctttaaaaggcaactgcatggtacattgttgattgttatgactggtacactctggcccagccagagctataattgttttttaaatgtgtcttgaagaatgcacagtgacaaggggagtagctattgggaacagggaactgtcctacactgctattgttgctacatgtatcgagccttgattgctcctagttatatacagggtctatcttgcttcctacctacatctgcttgagcagtgcctcaagtacatccttattaggaacatttcaaaccccttttagttaagtctttcactaaggttctcttgcatatatttcaagtgaatgttggatctcagactaaccatagtaataatacacatttctgtgagtgctgacttgtctttgcaatatttcttttctgatttatttaattttcttgtatttatatgttaaaatcaaaaatgttaaaatcaatgaaataaatttgcagttaaga

SEQ ID NO: 3178 - DNA, 4717 bp, Homo sapiens
cgggagcggcgggggcggcgccgaggccgcgggcggggggaggagggccgcagccccggagaggggaaaaggcgggccggacggcgccagcagccagcccgaggacgcgagcggcaggtgtgcacagaggttctccactttgttttctgaactcgcggtcaggatggttttctctgtcaggcagtgtggccatgttggcagaactgaagaagttttactgacgttcaagatattccttgtcatcatttgtcttcatgtcgttctggtaacatccctggaagaagatactgataattccagtttgtcaccaccacctgaggttgaaacaacaagcctcaatgatgttactttaagcttactcccttcaaacgaaacagaaaaaactaaaatcactatagtaaaaaccttcaatgcttcaggcgtcaaaccccagagaaatatctgcaatttgtcatctatttgcaatgactcagcattttttagaggtgagatcatgtttcaatatgataaagaaagcactgttccccagaatcaacatataacgaatggcaccttaactggagtcctgtctctaagtgaattaaaacgctcagagctcaacaaaaccctgcaaaccctaagtgagacttactttataatgtgtgctacagcagaggcccaaagcacattaaattgtacattcacaataaaactgaataatacaatgaatgcatgtgctgcaatagccgctttggaaagagtaaagattcgaccaatggaacactgctgctgttctgtcaggataccctgcccttcctccccagaagagttgggaaagcttcagtgtgacctgcaggatcccattgtctgtcttgctgaccatccacgtggcccaccattttcttccagccaatccatcccagtggtgcctcgggccactgtgctttcccaggtccccaaagctacctcttttgctgagcctccagattattcacctgtgacccacaatgttccctctccaataggggagattcaacccctttcaccccagccttcagctcccatagcttccagccctgccattgacatgcccccacagtctgaaacgatctcttcccctatgccccaaacccatgtctccggcaccccacctcctgtgaaagcctcattttcctctcccaccgtgtctgcccctgcgaatgtcaacactaccagcgcacctcctgtccagacagacatcgtcaacaccagcagtatttctgatcttgagaaccaagtgttgcagatggagaaggctctgtccttgggcagcctggagcctaacctcgcaggagaaatgatcaaccaagtcagcagactccttcattccccgcctgacatgctggcccctctggctcaaagattgctgaaagtagtggatgacattggcctacagctgaacttttcaaacacgactataagtctaacctccccttctttggctctggctgtgatcagagtgaatgccagtagtttcaacacaactacctttgtggcccaagaccctgcaaatcttcaggtttctctggaaacccaagctcctgagaacagtattggcacaattactcttccttcatcgctgatgaataatttaccagctcatgacatggagctagcttccagggttcagttcaatttttttgaaacacctgctttgtttcaggatccttccctggagaacctctctctgatcagctacgtcatatcatcgagtgttgcaaacctgaccgtcaggaacttgacaagaaacgtgacagtcacattaaagcacatcaacccgagccaggatgagttaacagtgagatgtgtattttgggacttgggcagaaatggtggcagaggaggctggtcagacaatggctgctctgtcaaagacaggagattgaatgaaaccatctgtacctgtagccatctaacaagcttcggcgttctgctggacctatctaggacatctgtgctgcctgctcaaatgatggctctgacgttcattacatatattggttgtgggctttcatcaatttttctgtcagtgactcttgtaacctacatagcttttgaaaagatccggagggattacccttccaaaatcctcatccagctgtgtgctgctctgcttctgctgaacctggtcttcctcctggactcgtggattgctctgtataagatgcaaggcctctgcatctcagtggctgtatttcttcattattttctcttggtctcattcacatggatgggcctagaagcattccatatgtacctggcccttgtcaaagtatttaatacttacatccgaaaatacatccttaaattctgcattgtcggttggggggtaccagctgtggttgtgaccatcatcctgactatatccccagataactatgggcttggatcctatgggaaattccccaatggttcaccggatgacttctgctggatcaacaacaatgcagtattctacattacggtggtgggatatttctgtgtgatatttttgctgaacgtcagcatgttcattgtggtcctggttcagctctgtcgaattaaaaagaagaagcaactgggagcccagcgaaaaaccagtattcaagacctcaggagtatcgctggccttacatttttactgggaataacttggggctttgccttctttgcctggggaccagttaacgtgaccttcatgtatctgtttgccatctttaataccttacaaggatttttcatattcatcttttactgtgtggccaaagaaaatgtcaggaagcaatggaggcggtatctttgttgtggaaagttacggctggctgaaaattctgactggagtaaaactgctactaatggtttaaagaagcagactgtaaaccaaggagtgtccagctcttcaaattccttacagtcaagcagtaactccactaactccaccacactgctagtgaataatgattgctcagtacacgcaagcgggaatggaaatgcttctacagagaggaatggggtctcttttagtgttcagaatggagatgtgtgccttcacgatttcactggaaaacagcacatgtttaacgagaaggaagattcctgcaatgggaaaggccgtatggctctcagaaggacttcaaagcggggaagcttacactttattgagcaaatgtgattcctttcttctaaaatcaaagcatgatgcttgacagtgtgaaatgtccaattttaccttttacacaatgtgagatgtatgaaaatcaactcattttattctcggcaacatctggagaagcataagctaattaagggcgatgattattattacaagaagaaaccaagacattacaccatggtttttagacatttctgatttggtttcttatctttcattttataagaaggttggttttaaacaatacactaagaatgactcctataaagaaaacaaaaaaaggtagtgaactttcagctaccttttaaagaggctaagttatctttgataacatcatataaagcaactgttgacttcagcctgttggtgagtttagttgtgcatgcctttgttgtatataagctaaattctagtgacccatgtgtcaaaaatcttacttctacatttttttgtatttattttctactgtgtaaatgtattcctttgtagaatcatggttgttttgtctcacgtgataattcagaaaatccttgctcgttccgcaaatcctaaagctccttttggagatgatataggatgtgaaatacagaaacctcagtgaaatcaagaaataatgatcccagccagactgagaaaatgtaagcagacagtgccacagttagctcatacagtgcctttgagcaagttaggaaaagatgcccccactgggcagacacagccctatgggtcatggtttgacaaacagagtgagagaccatattttagccccactcaccctcttgggtgcacgacctgtacagccaaacacagcatccaatatgaatacccatcccctgaccgcatccccagtagtcagattatagaatctgcaccaagatgtttagctttataccttggccacagagagggatgaactgtcatccagaccatgtgtcaggaaaattgtgaacgtagatgaggtacatacactgccgcttctcaaatccccagagcctttaggaacaggagagtagactaggattccttctcttaaaaaggtacatatatatggaaaaaaatcatattgccgttctttaaaaggcaactgcatggtacattgttgattgttatgactggtacactctggcccagccagagctataattgttttttaaatgtgtcttgaagaatgcacagtgacaaggggagtagctattgggaacagggaactgtcctacactgctattgttgctacatgtatcgagccttgattgctcctagttatatacagggtctatcttgcttcctacctacatctgcttgagcagtgcctcaagtacatccttattaggaacatttcaaaccccttttagttaagtctttcactaaggttctcttgcatatatttcaagtgaatgttggatctcagactaaccatagtaataatacacatttctgtgagtgctgacttgtctttgcaatatttcttttctgatttatttaattttcttgtatttatatgttaaaatcaaaaatgttaaaatcaatgaaataaatttgcagttaaga

SEQ ID NO: 3179 - DNA, 4693 bp, Homo sapiens
cgggagcggcgggggcggcgccgaggccgcgggcggggggaggagggccgcagccccggagaggggaaaaggcgggccggacggcgccagcagccagcccgaggacgcgagcggcaggtgtgcacagaggttctccactttgttttctgaactcgcggtcaggatggttttctctgtcaggcagtgtggccatgttggcagaactgaagaagttttactgacgttcaagatattccttgtcatcatttgtcttcatgtcgttctggtaacatccctggaagaagatactgataattccagtttgtcaccaccacctgatgttactttaagcttactcccttcaaacgaaacagaaaaaactaaaatcactatagtaaaaaccttcaatgcttcaggcgtcaaaccccagagaaatatctgcaatttgtcatctatttgcaatgactcagcattttttagaggtgagatcatgtttcaatatgataaagaaagcactgttccccagaatcaacatataacgaatggcaccttaactggagtcctgtctctaagtgaattaaaacgctcagagctcaacaaaaccctgcaaaccctaagtgagacttactttataatgtgtgctacagcagaggcccaaagcacattaaattgtacattcacaataaaactgaataatacaatgaatgcatgtgctgcaatagccgctttggaaagagtaaagattcgaccaatggaacactgctgctgttctgtcaggataccctgcccttcctccccagaagagttgggaaagcttcagtgtgacctgcaggatcccattgtctgtcttgctgaccatccacgtggcccaccattttcttccagccaatccatcccagtggtgcctcgggccactgtgctttcccaggtccccaaagctacctcttttgctgagcctccagattattcacctgtgacccacaatgttccctctccaataggggagattcaacccctttcaccccagccttcagctcccatagcttccagccctgccattgacatgcccccacagtctgaaacgatctcttcccctatgccccaaacccatgtctccggcaccccacctcctgtgaaagcctcattttcctctcccaccgtgtctgcccctgcgaatgtcaacactaccagcgcacctcctgtccagacagacatcgtcaacaccagcagtatttctgatcttgagaaccaagtgttgcagatggagaaggctctgtccttgggcagcctggagcctaacctcgcaggagaaatgatcaaccaagtcagcagactccttcattccccgcctgacatgctggcccctctggctcaaagattgctgaaagtagtggatgacattggcctacagctgaacttttcaaacacgactataagtctaacctccccttctttggctctggctgtgatcagagtgaatgccagtagtttcaacacaactacctttgtggcccaagaccctgcaaatcttcaggtttctctggaaacccaagctcctgagaacagtattggcacaattactcttccttcatcgctgatgaataatttaccagctcatgacatggagctagcttccagggttcagttcaatttttttgaaacacctgctttgtttcaggatccttccctggagaacctctctctgatcagctacgtcatatcatcgagtgttgcaaacctgaccgtcaggaacttgacaagaaacgtgacagtcacattaaagcacatcaacccgagccaggatgagttaacagtgagatgtgtattttgggacttgggcagaaatggtggcagaggaggctggtcagacaatggctgctctgtcaaagacaggagattgaatgaaaccatctgtacctgtagccatctaacaagcttcggcgttctgctggacctatctaggacatctgtgctgcctgctcaaatgatggctctgacgttcattacatatattggttgtgggctttcatcaatttttctgtcagtgactcttgtaacctacatagcttttgaaaagatccggagggattacccttccaaaatcctcatccagctgtgtgctgctctgcttctgctgaacctggtcttcctcctggactcgtggattgctctgtataagatgcaaggcctctgcatctcagtggctgtatttcttcattattttctcttggtctcattcacatggatgggcctagaagcattccatatgtacctggcccttgtcaaagtatttaatacttacatccgaaaatacatccttaaattctgcattgtcggttggggggtaccagctgtggttgtgaccatcatcctgactatatccccagataactatgggcttggatcctatgggaaattccccaatggttcaccggatgacttctgctggatcaacaacaatgcagtattctacattacggtggtgggatatttctgtgtgatatttttgctgaacgtcagcatgttcattgtggtcctggttcagctctgtcgaattaaaaagaagaagcaactgggagcccagcgaaaaaccagtattcaagacctcaggagtatcgctggccttacatttttactgggaataacttggggctttgccttctttgcctggggaccagttaacgtgaccttcatgtatctgtttgccatctttaataccttacaaggatttttcatattcatcttttactgtgtggccaaagaaaatgtcaggaagcaatggaggcggtatctttgttgtggaaagttacggctggctgaaaattctgactggagtaaaactgctactaatggtttaaagaagcagactgtaaaccaaggagtgtccagctcttcaaattccttacagtcaagcagtaactccactaactccaccacactgctagtgaataatgattgctcagtacacgcaagcgggaatggaaatgcttctacagagaggaatggggtctcttttagtgttcagaatggagatgtgtgccttcacgatttcactggaaaacagcacatgtttaacgagaaggaagattcctgcaatgggaaaggccgtatggctctcagaaggacttcaaagcggggaagcttacactttattgagcaaatgtgattcctttcttctaaaatcaaagcatgatgcttgacagtgtgaaatgtccaattttaccttttacacaatgtgagatgtatgaaaatcaactcattttattctcggcaacatctggagaagcataagctaattaagggcgatgattattattacaagaagaaaccaagacattacaccatggtttttagacatttctgatttggtttcttatctttcattttataagaaggttggttttaaacaatacactaagaatgactcctataaagaaaacaaaaaaaggtagtgaactttcagctaccttttaaagaggctaagttatctttgataacatcatataaagcaactgttgacttcagcctgttggtgagtttagttgtgcatgcctttgttgtatataagctaaattctagtgacccatgtgtcaaaaatcttacttctacatttttttgtatttattttctactgtgtaaatgtattcctttgtagaatcatggttgttttgtctcacgtgataattcagaaaatccttgctcgttccgcaaatcctaaagctccttttggagatgatataggatgtgaaatacagaaacctcagtgaaatcaagaaataatgatcccagccagactgagaaaatgtaagcagacagtgccacagttagctcatacagtgcctttgagcaagttaggaaaagatgcccccactgggcagacacagccctatgggtcatggtttgacaaacagagtgagagaccatattttagccccactcaccctcttgggtgcacgacctgtacagccaaacacagcatccaatatgaatacccatcccctgaccgcatccccagtagtcagattatagaatctgcaccaagatgtttagctttataccttggccacagagagggatgaactgtcatccagaccatgtgtcaggaaaattgtgaacgtagatgaggtacatacactgccgcttctcaaatccccagagcctttaggaacaggagagtagactaggattccttctcttaaaaaggtacatatatatggaaaaaaatcatattgccgttctttaaaaggcaactgcatggtacattgttgattgttatgactggtacactctggcccagccagagctataattgttttttaaatgtgtcttgaagaatgcacagtgacaaggggagtagctattgggaacagggaactgtcctacactgctattgttgctacatgtatcgagccttgattgctcctagttatatacagggtctatcttgcttcctacctacatctgcttgagcagtgcctcaagtacatccttattaggaacatttcaaaccccttttagttaagtctttcactaaggttctcttgcatatatttcaagtgaatgttggatctcagactaaccatagtaataatacacatttctgtgagtgctgacttgtctttgcaatatttcttttctgatttatttaattttcttgtatttatatgttaaaatcaaaaatgttaaaatcaatgaaataaatttgcagttaaga

SEQ ID NO: 3180 - DNA, 2891 bp, Homo sapiens
gatatacctaatgttaaatgacgagttaacaggtgcagcacaccaacatggcactaacctgcacgttgtgcacatgtaccctaaaacttaaagtataattttaaaaaaaaagaaaaagttgttagattttaaaattattttaggatattttcttataagagaatgcacttatttttctttgagattgcagctattttcgtttgatctagaatcttctcattcttttgatttttaattttattgttagtagattataaagaatgggatattagagatttttctttaaaaatgaacctatatacattttatttatttattttcttaaagatagggtctcactctgttgtccagctggagtgtaatggcagtcatagctcattacagcttcaaattgctgggttccaggggatcctcctacctcagcctcctgagtagctgggattacaggtgcaagccaccacacccagctgattttcaattttttggtagagatggagtctcactatattgcccagactggtctcgaactcctggcctcaagtgatccccattggcttcccaaagtgctaggattacaagcatgagacaggcttcctttttttccttttttttttaaaagcagttatctgatatccatcaccttgtttacttgaccctgcttttaaaaaaataagtatataaaagtaaatacgaattagagatttgttagattggtattcccagtggttttttaaaaacattaattgcaaaattcctgatgcttaccacattttagagccaggagttcttaatctgggctgagtgaactcctgggggaggggggtagtatgttctgaatagatgagccataactttcatcatattctcccagggggccacaagatggaaaaataaagaaccactattttagagcatttggatcaagctatgtaataactcatttgtctgtgttaaaggcatttctcattgcaattgtggtaccagatgttgagacattatgttcctgggcccaaaagagaggatttgaagggtcgtttgaggaactgtgcagaaataaggatgtcaaaaaagctatcctcgaagatatggtgagacttgggaaggattctggtctgaaaccatttgaacaggtcaaaggcatcacattgcaccctgaattattttctatcgacaatggccttctgactccaacaatgaaggcgaaaaggccagagctgcggaactatttcaggtcgcagatagatgacctctattccactatcaaggtttagtgtgaagaagaaagctcagaggaaatggcacagttccacaatctcttctcctgctgatggccttcatgttgttaattttgaatacagcaagtgtagggaaggaagcgttcgtgtttgacttgtccattcggggttcttctcataggaatgctagaggaaacagaacaccgccttacagtcacctcatgttgcagaccatgtttatggtaatacacactttccaaaatgagccttaaaaattgtaaaggggatactataaatgtgctaagttatttgagacttcctcagtttaaaaagtgggttttaaatcttctgtctccctgtttttctaatcaaggggttaggactttgctatctctgagatgtctgctacttgctgcaaattctgcagctgtctgctgctctaaagagtacagtgcactagagggaagtgttccctttaaaaataagaacaactgtcctggctggagaatctcacaagcggaccagagatctttttaaatccctgctactgtcccttctcacaggcattcacagaacccttctgattcgtaagggttacgaaactcatgttcttctccagtcccctgtggtttctgttggagcataaggtttccagtaagcgggagggcagatccaactcagaaccatgcagataaggagcctctggcaaatgggtgctcatcagaacgcgtggattctctttcatggcagaatgctcttggactcggttctccaggcctgattccccgactccatcctttttcaggggttatttaaaaatctgccttagattctatagtgaagacaagcatttcaagaaagagttacctggatcagccatgctcagctgtgacgcctgaataactgtctactttatcttcactgaaccactcactctgtgtaaaggccaacagatttttaatgtggttttcatatcaaaagatcatgttgggattaacttgcctttttccccaaaaaataaactctcaggcaagcatttctttaaagctattaagggagtatatacttgagtacttattgaaatggacagtaataagcaaatgttcttataatgctacctgatttctatgaaatgtgtttgacaagccaaaattctaggatgtagaaatctggaaagttcatttcctgggattcacttctccagggattttttaaagttaatttgggaaattaacagcagttcactttattgtgagtctttgccacatttgactgaattgagctgtcatttgtacatttaaagcagctgttttggggtctgtgagagtacatgtattatatacaagcacaacagggcttgcactaaagaattgtcattgtaataacactacttggtagcctaacttcatatatgtattcttaattgcacaaaaagtcaataatttgtcaccttggggttttgaatgtttgctttaagtgttggctatttctatgttttataaaccaaaacaaaatttccaaaaacaatgaaggaaaccaaaataaatatttctgcatttcaaaaaaaaaaaaaaaaaaaaaaaaaaaaaaaaaaaaaaaaaaaaaaaaaaaaaaaaaaaaaaaaaaaaaaaaaaaaaaaaaaaaaaaaaaaaaaaa

SEQ ID NO: 3181 - DNA, 1385 bp, Homo sapiens
agtgtgaaatcttcagagaagaatttctctttagttctttgcaagaaggtagagataaagacactttttcaaaaatggcaatggtatcagaattcctcaagcaggcctggtttattgaaaatgaagagcaggaatatgttcaaactgtgaagtcatccaaaggtggtcccggatcagcggtgagcccctatcctaccttcaatccatcctcggatgtcgctgccttgcataaggccataatggttaaaggtgtggatgaagcaaccatcattgacattctaactaagcgaaacaatgcacagcgtcaacagatcaaagcagcatatctccaggaaacaggaaagcccctggatgaaacactgaagaaagcccttacaggtcaccttgaggaggttgttttggctctgctaaaaactccagcgcaatttgatgctgatgaacttcgtgctgccatgaagggccttggaactgatgaagatactctaattgagattttggcatcaagaactaacaaagaaatcagagacattaacagggtctacagagaggaactgaagagagatctggccaaagacataacctcagacacatctggagattttcggaacgctttgctttctcttgctaagggtgaccgatctgaggactttggtgtgaatgaagacttggctgattcagatgccagggccttgtatgaagcaggagaaaggagaaaggggacagacgtaaacgtgttcaataccatccttaccaccagaagctatccacaacttcgcagagtgtttcagaaatacaccaagtacagtaagcatgacatgaacaaagttctggacctggagttgaaaggtgacattgagaaatgcctcacagctatcgtgaagtgcgccacaagcaaaccagctttctttgcagagaagcttcatcaagccatgaaaggtgttggaactcgccataaggcattgatcaggattatggtttcccgttctgaaattgacatgaatgatatcaaagcattctatcagaagatgtatggtatctccctttgccaagccatcctggatgaaaccaaaggagattatgagaaaatcctggtggctctttgtggaggaaactaaacattcccttgatggtctcaagctatgatcagaagactttaattatatattttcatcctataagcttaaataggaaagtttcttcaacaggattacagtgtagctacctacatgctgaaaaatatagcctttaaatcatttttatattataactctgtataatagagataagtccattttttaaaaatgttttccccaaaccataaaaccctatacaagttgttctagtaacaatacatgaaaaaaaaaaaaaaaaaaaaaaaaaaaaaa

SEQ ID NO: 3182 - DNA, 1849 bp, Homo sapiens
tgcacccacagcagtctgttgtggatggttgctgagctgcgcattcggcattgggcttgctttgtttcctgccaggcccagcattttcttctaccagatcggcaggcttgtgggcttcttcctaggtccctcccctgcactctgaataggaaagctggaagctgtgctttagagaagctttaagacgccgaaagaaaccagaagagtgagcgccagttgtatgtggcatggaatattcacatgggagagccgcatgaggccgcccaccacgcttcctgaaggatgcccgtgtggaagaattttgacgtgccagtgtcctcgttctacagggtgttccattcttccgcaatctcagaaaaatgggactaaaagaaactattttgtaaaataagaagacttccatttttaatgaccaacatgtattaagatggacacctactctacgaaacacaaagttctatggtctcgaagaagcccgtgcctgtttaaaactgatcctaactaaaaacagacttgagtggatatgagaatgttggttagtggcagaagagtcaaaaaatggcagttaattattcagttatttgctacttgttttttagcgagcctcatgtttttttgggaaccaatcgataatcacattgtgagccatatgaagtcatattcttacagatacctcataaatagctatgactttgtgaatgataccctgtctcttaagcacacctcagcggggcctcgctaccaatacttgattaaccacaaggaaaagtgtcaagctcaagacgtcctccttttactgtttgtaaaaactgctcctgaaaactatgatcgacgttccggaattagaaggacgtggggcaatgaaaattatgttcggtctcagctgaatgccaacatcaaaactctgtttgccttaggaactcctaatccactggagggagaagaactacaaagaaaactggcttgggaagatcaaaggtacaatgatataattcagcaagactttgttgattctttctacaatcttactctgaaattacttatgcagttcagttgggcaaatacctattgtccacatgccaaatttcttatgactgctgatgatgacatatttattcacatgccaaatctgattgagtaccttcaaagtttagaacaaattggtgttcaagacttttggattggtcgtgttcatcgtggtgcccctcccattagagataaaagcagcaaatactacgtgtcctatgaaatgtaccagtggccagcttaccctgactacacagccggagctgcctatgtaatctccggtgatgtagctgccaaagtctatgaggcatcacagacactaaattcaagtctttacatagacgatgtgttcatgggcctctgtgccaataaaatagggatagtaccgcaggaccatgtgtttttttctggagagggtaaaactccttatcatccctgcatctatgaaaaaatgatgacatctcatggacacttagaagatctccaggacctttggaagaatgctacagatcctaaagtaaaaaccatttccaaaggtttttttggtcaaatatactgcagattaatgaagataattctcctttgtaaaattagctatgtggacacatacccttgtagggctgcgtttatctaatagtacttgaatgttgtatgttttcactgtcactgagtcaaacctggatgaaaaaaacctttaaatgttcgtctataccctaagtaaaatgaggacgaaagacaaaaaaaaaaaaaaaaaaaaaaaaaaaaaaaaaaaaaaaaaaaaaaaaaaaaaaaaaaaaaaaaaaaaaaaaaaaaaaaaaaaaaa

SEQ ID NO: 3183 - DNA, 5923 bp, Homo sapiens
gcggccgcttcccaccgtccctctccccttactggcagagcgcgctgcgggcggactcccgggcccggagcagcccaccggccaccccaccgcccacccggctcccggtgtctcctcccggccgctctacccagcaactttccgtgctttgttccccgactggaaatgctttacggaagcgtcttggacagggtctccgccaggcgacaagagctcggtgctgagatgtgttacgttctcatctccccatcaattatggatggaaacaaataaggaagagtcaattttgctgagccccttctccggcaacgagaggcgttctgcagccgggagggagccgccgctcgcgccggcagccgctggcaggggcatggtgaggaggaaggtagctcagtggcatttctgagcaggggccaccctgacttcaccttggcccaccatgagggtcttcctgctttgtgcctacatactgctgctgatggtttcccagttgagggcagtcagctttcctgaagatgatgaaccccttaatactgtcgactatcactattcaaggcaatatccggtttttagaggacgcccttcaggcaatgaatcgcagcacaggctggactttcagctgatgttgaaaattcgagacacactttatattgctggcagggatcaagtttatacagtaaacttaaatgaaatgcccaaaacagaagtaatacccaacaagaaactgacatggcgatcaagacaacaggatcgagaaaactgtgctatgaaaggcaagcataaagatgaatgccacaactttatcaaagtatttgttccaagaaacgatgagatggtttttgtttgtggtaccaatgcattcaatcccatgtgtagatactacaggttgagtaccttagaatatgatggggaagaaattagtggcctggcaagatgcccatttgatgccagacaaaccaatgttgccctctttgctgatgggaagctgtattctgccacagtggctgacttcttggccagcgatgccgttatttatcgaagcatgggtgatggatctgcccttcgcacaataaaatatgattccaaatggataaaagagccacactttcttcatgccatagaatatggaaactatgtctatttcttctttcgagaaatcgctgtcgaacataataatttaggcaaggctgtgtattcccgcgtggcccgcatatgtaaaaacgacatgggtggttcccagcgggtcctggagaaacactggacttcatttctaaaggctcggctgaactgttctgtccctggagattcgtttttctactttgatgttctgcagtctattacagacataatacaaatcaatggcatccccactgtggtcggggtgtttaccacgcagctcaatagcatccctggttctgctgtctgtgcatttagcatggatgacattgaaaaagtattcaaaggacggtttaaggaacagaaaactccagattctgtttggacagcagttcccgaagacaaagtgccaaagccaaggcctggctgttgtgcaaaacacggccttgccgaagcttataaaacctccatcgatttcccggatgaaactctgtcattcatcaaatctcatcccctgatggactctgccgttccacccattgccgatgagccctggttcacaaagactcgggtcaggtacagactgacggccatctcagtggaccattcagccggaccctaccagaactacacagtcatctttgttggctctgaagctggcatggtacttaaagttctggcaaagaccagtcctttctctttgaacgacagcgtattactggaagagattgaagcctacaaccatgcaaagtgcagtgctgagaatgaggaagacaaaaaggtcatctcattacagttggataaagatcaccacgctttatatgtggcgttctctagctgcattatccgcatccccctcagtcgctgtgagcgttatggatcatgtaaaaagtcttgtattgcatctcgtgacccgtattgtggctggttaagccagggatcctgtggtagagtgaccccagggatgctgctgttaaccgaagacttctttgctttccataaccacagtgctgaaggatatgaacaagacacagaattcggcaacacagctcatctaggggactgccatggtgtacgatgggaagtccagtctggagagtccaaccagatggtccacatgaatgtcctcatcacctgtgtctttgctgcttttgttttgggggcattcattgcaggtgtggcagtatactgctatcgagacatgtttgttcggaaaaacagaaagatccataaagatgcagagtccgcccagtcatgcacagactccagtggaagttttgccaaactgaatggtctctttgacagccctgtcaaggaataccaacagaatattgattctcctaaactgtatagtaacctgctaaccagtcggaaagagctaccacccaatggagatactaaatccatggtaatggaccatcgagggcaacctccagagttggctgctcttcctactcctgagtctacacccgtgcttcaccagaagaccctgcaggccatgaagagccactcagaaaaggcccatggccatggagcttcaaggaaagaaacccctcagttttttccgtctagtccgccacctcattccccattaagtcatgggcatatccccagtgccattgttcttccaaatgctacccatgactacaacacgtctttctcaaactccaatgctcacaaagctgaaaagaagcttcaaaacattgatcaccctctcacaaagtcatccagtaagagagatcaccggcgttctgttgattccagaaataccctcaatgatctcctgaagcatctgaatgacccaaatagtaaccccaaagccatcatgggagacatccagatggcacaccagaacttaatgctggatcccatgggatcgatgtctgaggtcccacctaaagtccctaaccgggaggcatcgctatactcccctccttcaactctccccagaaatagcccaaccaagcgagtggatgtccccaccactcctggagtcccaatgacttctctggaaagacaaagaggttatcacaaaaattcctcccagaggcactctatatctgctatgcctaaaaacttaaactcaccaaatggtgttttgttatccagacagcctagtatgaaccgtggaggatatatgcccacccccactggggcgaaggtggactatattcagggaacaccagtgagtgttcatctgcagccttccctctccagacagagcagctacaccagtaatggcactcttcctaggacgggactaaagaggacgccgtccttaaaacctgacgtgccaccaaagccttcctttgttcctcaaaccccatctgtcagaccactgaacaaatacacatactaggcctcaagtgtgctattcccatgtggctttatcctgtccgtgttgttgagaggatgatgttgtaagggtaccttaaaacaagagactcgcttgtattttaagagaaccaagtggccaaagaaactctttctaactttggcaacatcagaacttgccacatgtagctactgcagcaaggcttctgtgtacttgcctgaaaacaaaggaaggtgctggtcattccatttcttttgtttgaagctaaagagatgtgtagctcacaggggctaccttaccagtataaagagctgataacagtactcagaagaatctgtgaacaaatacttgaaaatgggttcaatgtagactgccattatgtgtggtcttcccattaaatgtgaacattttaatatgtatgcattcaccttgcctcttgcacaaatgtcaaaaaaaagatggtaatatctcaaagaaatgaacttgtagattaccaagcagtttgctaaaaattcaatctttgacccaagctgtagcatttttttttcatgtgtggcatctttttcatgccaccaacaaacttgttgtgtgtgtgcgtgtgtgtgtgtgtgtgtgtgtgtgtgtgtgtgttctgtacccactaggatttgtttaggtgcccattgcatctttttgtgctatggagttgtttacattaagcatgaccgaacgagagacaatactatttcccacaggagtccattgggttcagctttgaaagaggaatagaatcgaggctcctttgaccatcaaaatgatgaactttacttatgtggtacccaatgccagaatgtaagagttgcaagtgattttgtgctgctattcattaaaacttgtattccagtcttgccagcttaaggagatcaagatattaagaggtatccttgatttattttccagtattcagtagtaaaattttcctgtccactgtgaatcaaagcctgagtcactctatttaaccttggacacactaataaggttttattttgattgtgttcgtttccccccccccaatagtaaaatttctcctcctttaactcctcctaccccccaaggtaagaaacaaaaaacaaacaaacaaacaaaaatagaagacaaaagaaagacatatgaaaggaattgtaattggcttaacagaaacagtctgtaaaaacctaacagtggtgcaatcatgttgtctgtgttgtgttatgtgagaattttctcctaagtcatgcaggtaatgacaatatactgtaaataccacatgtgagtttacctgaatctgtgcattttgtgccttattcatgagaatgatagaagtactaaaatctgtcaagtgttttcagtatagcacattatttactgagtgccagttgtaaatgtttttcaaccagcacctaaaaagactcttttcaaaaaatcacagaaacaacctaggacaattatttgttacataatccgacctcatagcagcattacattctttgccgtgataaacattccactcctgctttcctaaggatgaaacagtgataatgtgaactcaaatgaggtttcctgggtaatgtgacacctgcagaaactatagagcgtcatttatacgtagtttggcagaaaccacttacggctgatgatgcgcaaccctgctgactgtttcagttaatatgctgcacaccacacacttgtttagtgaaccaaatctagaaagtaccaaggcagaggtatgctcctgctgtaatcaggcaaatgagttcaactggatttcttttgacaatactgttggtacctattacttgggggaggacatgttgcagaagaccagatcatttttatacagaatgtgaaatactgatacagttattcttttttttaaagaacattgttttataaagaacgtgatttccagtgatctctggaagcgctaaagctaaaatttctgttcttgaaacacttcagctttgcaactaaaatattacagattaataataaattaaaccaaccaatgataaacactactcagtccaccaacaacaaacgtgtttgaattcaccttaccaatattaatcccagcgtgtgtaaaacagaacagtaactctatgtgaccccagataacattttgtaacattgtgcttccttgtagtttgtaatgtgagttcaatcagtatttatgttgaaatttctaacattaaatctagtctctatcctgttaatttaatttttaaatgctttatccatttgtgcaaaggtaaacgcagattgtatcttttttaatggtacggcataaaaagtaaccctcaagtgaagtgtctctatactgttttatagagtactttaacatgaatagataccttgtaaacttgtattgtggatgtgtaaataatatgtactttgggtttttaacaccgcatgtaaagtcaaaataaaatatacaaatcattataaaaaaaaaaa

SEQ ID NO: 3184 - DNA, 2290 bp, Homo sapiens; identical to SEQ ID NO: 129

SEQ ID NO: 3185 - DNA, 5884 bp, Homo sapiens
gcggccgcttcccaccgtccctctccccttactggcagagcgcgctgcgggcggactcccgggcccggagcagcccaccggccaccccaccgcccacccggctcccggtgtctcctcccggccgctctacccagcaactttccgtgctttgttccccgactggaaatgctttacggaagcgtcttggacagggtctccgccaggcgacaagagctcggtgctgagatgtgttacgttctcatctccccatcaattatggatggaaacaaataaggaagagtcaattttgctgagccccttctccggcaacgagaggcgttctgcagccgggagggagccgccgctcgcgccggcagccgctggcaggggcatggtgaggaggaaggtagctcagtggcatttctgagcaggggccaccctgacttcaccttggcccaccatgagggtcttcctgctttgtgcctacatactgctgctgatggtttcccagttgagggcagtcagctttcctgaagatgatgaaccccttaatactgtcgactatcactattcaaggcaatatccggtttttagaggacgcccttcaggcaatgaatcgcagcacaggctggactttcagctgatgttgaaaattcgagacacactttatattgctggcagggatcaagtttatacagtaaacttaaatgaaatgcccaaaacagaagtaatacccaacaagaaactgacatggcgatcaagacaacaggatcgagaaaactgtgctatgaaaggcaagcataaagatgaatgccacaactttatcaaagtatttgttccaagaaacgatgagatggtttttgtttgtggtaccaatgcattcaatcccatgtgtagatactacaggttgagtaccttagaatatgatggggaagaaattagtggcctggcaagatgcccatttgatgccagacaaaccaatgttgccctctttgctgatgggaagctgtattctgccacagtggctgacttcttggccagcgatgccgttatttatcgaagcatgggtgatggatctgcccttcgcacaataaaatatgattccaaatggataaaagagccacactttcttcatgccatagaatatggaaactatgtctatttcttctttcgagaaatcgctgtcgaacataataatttaggcaaggctgtgtattcccgcgtggcccgcatatgtaaaaacgacatgggtggttcccagcgggtcctggagaaacactggacttcatttctaaaggctcggctgaactgttctgtccctggagattcgtttttctactttgatgttctgcagtctattacagacataatacaaatcaatggcatccccactgtggtcggggtgtttaccacgcagctcaatagcatccctggttctgctgtctgtgcatttagcatggatgacattgaaaaagtattcaaaggacggtttaaggaacagaaaactccagattctgtttggacagcagttcccgaagacaaagtgccaaagccaaggcctggctgttgtgcaaaacacggccttgccgaagcttataaaacctccatcgatttcccggatgaaactctgtcattcatcaaatctcatcccctgatggactctgccgttccacccattgccgatgagccctggttcacaaagactcgggtcaggtacagactgacggccatctcagtggaccattcagccggaccctaccagaactacacagtcatctttgttggctctgaagctggcatggtacttaaagttctggcaaagaccagtcctttctctttgaacgacagcgtattactggaagagattgaagcctacaaccatgcaaagtgcagtgctgagaatgaggaagacaaaaaggtcatctcattacagttggataaagatcaccacgctttatatgtggcgttctctagctgcattatccgcatccccctcagtcgctgtgagcgttatggatcatgtaaaaagtcttgtattgcatctcgtgacccgtattgtggctggttaagccagggatcctgtggtagagtgaccccagggatgcttgctgaaggatatgaacaagacacagaattcggcaacacagctcatctaggggactgccatggtgtacgatgggaagtccagtctggagagtccaaccagatggtccacatgaatgtcctcatcacctgtgtctttgctgcttttgttttgggggcattcattgcaggtgtggcagtatactgctatcgagacatgtttgttcggaaaaacagaaagatccataaagatgcagagtccgcccagtcatgcacagactccagtggaagttttgccaaactgaatggtctctttgacagccctgtcaaggaataccaacagaatattgattctcctaaactgtatagtaacctgctaaccagtcggaaagagctaccacccaatggagatactaaatccatggtaatggaccatcgagggcaacctccagagttggctgctcttcctactcctgagtctacacccgtgcttcaccagaagaccctgcaggccatgaagagccactcagaaaaggcccatggccatggagcttcaaggaaagaaacccctcagttttttccgtctagtccgccacctcattccccattaagtcatgggcatatccccagtgccattgttcttccaaatgctacccatgactacaacacgtctttctcaaactccaatgctcacaaagctgaaaagaagcttcaaaacattgatcaccctctcacaaagtcatccagtaagagagatcaccggcgttctgttgattccagaaataccctcaatgatctcctgaagcatctgaatgacccaaatagtaaccccaaagccatcatgggagacatccagatggcacaccagaacttaatgctggatcccatgggatcgatgtctgaggtcccacctaaagtccctaaccgggaggcatcgctatactcccctccttcaactctccccagaaatagcccaaccaagcgagtggatgtccccaccactcctggagtcccaatgacttctctggaaagacaaagaggttatcacaaaaattcctcccagaggcactctatatctgctatgcctaaaaacttaaactcaccaaatggtgttttgttatccagacagcctagtatgaaccgtggaggatatatgcccacccccactggggcgaaggtggactatattcagggaacaccagtgagtgttcatctgcagccttccctctccagacagagcagctacaccagtaatggcactcttcctaggacgggactaaagaggacgccgtccttaaaacctgacgtgccaccaaagccttcctttgttcctcaaaccccatctgtcagaccactgaacaaatacacatactaggcctcaagtgtgctattcccatgtggctttatcctgtccgtgttgttgagaggatgatgttgtaagggtaccttaaaacaagagactcgcttgtattttaagagaaccaagtggccaaagaaactctttctaactttggcaacatcagaacttgccacatgtagctactgcagcaaggcttctgtgtacttgcctgaaaacaaaggaaggtgctggtcattccatttcttttgtttgaagctaaagagatgtgtagctcacaggggctaccttaccagtataaagagctgataacagtactcagaagaatctgtgaacaaatacttgaaaatgggttcaatgtagactgccattatgtgtggtcttcccattaaatgtgaacattttaatatgtatgcattcaccttgcctcttgcacaaatgtcaaaaaaaagatggtaatatctcaaagaaatgaacttgtagattaccaagcagtttgctaaaaattcaatctttgacccaagctgtagcatttttttttcatgtgtggcatctttttcatgccaccaacaaacttgttgtgtgtgtgcgtgtgtgtgtgtgtgtgtgtgtgtgtgtgtgtgttctgtacccactaggatttgtttaggtgcccattgcatctttttgtgctatggagttgtttacattaagcatgaccgaacgagagacaatactatttcccacaggagtccattgggttcagctttgaaagaggaatagaatcgaggctcctttgaccatcaaaatgatgaactttacttatgtggtacccaatgccagaatgtaagagttgcaagtgattttgtgctgctattcattaaaacttgtattccagtcttgccagcttaaggagatcaagatattaagaggtatccttgatttattttccagtattcagtagtaaaattttcctgtccactgtgaatcaaagcctgagtcactctatttaaccttggacacactaataaggttttattttgattgtgttcgtttccccccccccaatagtaaaatttctcctcctttaactcctcctaccccccaaggtaagaaacaaaaaacaaacaaacaaacaaaaatagaagacaaaagaaagacatatgaaaggaattgtaattggcttaacagaaacagtctgtaaaaacctaacagtggtgcaatcatgttgtctgtgttgtgttatgtgagaattttctcctaagtcatgcaggtaatgacaatatactgtaaataccacatgtgagtttacctgaatctgtgcattttgtgccttattcatgagaatgatagaagtactaaaatctgtcaagtgttttcagtatagcacattatttactgagtgccagttgtaaatgtttttcaaccagcacctaaaaagactcttttcaaaaaatcacagaaacaacctaggacaattatttgttacataatccgacctcatagcagcattacattctttgccgtgataaacattccactcctgctttcctaaggatgaaacagtgataatgtgaactcaaatgaggtttcctgggtaatgtgacacctgcagaaactatagagcgtcatttatacgtagtttggcagaaaccacttacggctgatgatgcgcaaccctgctgactgtttcagttaatatgctgcacaccacacacttgtttagtgaaccaaatctagaaagtaccaaggcagaggtatgctcctgctgtaatcaggcaaatgagttcaactggatttcttttgacaatactgttggtacctattacttgggggaggacatgttgcagaagaccagatcatttttatacagaatgtgaaatactgatacagttattcttttttttaaagaacattgttttataaagaacgtgatttccagtgatctctggaagcgctaaagctaaaatttctgttcttgaaacacttcagctttgcaactaaaatattacagattaataataaattaaaccaaccaatgataaacactactcagtccaccaacaacaaacgtgtttgaattcaccttaccaatattaatcccagcgtgtgtaaaacagaacagtaactctatgtgaccccagataacattttgtaacattgtgcttccttgtagtttgtaatgtgagttcaatcagtatttatgttgaaatttctaacattaaatctagtctctatcctgttaatttaatttttaaatgctttatccatttgtgcaaaggtaaacgcagattgtatcttttttaatggtacggcataaaaagtaaccctcaagtgaagtgtctctatactgttttatagagtactttaacatgaatagataccttgtaaacttgtattgtggatgtgtaaataatatgtactttgggtttttaacaccgcatgtaaagtcaaaataaaatatacaaatcattataaaaaaaaaaa

SEQ ID NO: 3186 - DNA, 5941 bp, Homo sapiens
gcggccgcttcccaccgtccctctccccttactggcagagcgcgctgcgggcggactcccgggcccggagcagcccaccggccaccccaccgcccacccggctcccggtgtctcctcccggccgctctacccagcaactttccgtgctttgttccccgactggaaatgctttacggaagcgtcttggacagggtctccgccaggcgacaagagctcggtgctgagatgtgttacgttctcatctccccatcaattatggatggaaacaaataaggaagagtcaattttgctgagccccttctccggcaacgagaggcgttctgcagccgggagggagccgccgctcgcgccggcagccgctggcaggggcatggtgaggaggaaggtagctcagtggcatttctgagcaggggccaccctgacttcaccttggcccaccatgagggtcttcctgctttgtgcctacatactgctgctgatggtttcccagttgagggcagtcagctttcctgaagatgatgaaccccttaatactgtcgactatcactattcaaggcaatatccggtttttagaggacgcccttcaggcaatgaatcgcagcacaggctggactttcagctgatgttgaaaattcgagacacactttatattgctggcagggatcaagtttatacagtaaacttaaatgaaatgcccaaaacagaagtaatacccaacaagaaactgacatggcgatcaagacaacaggatcgagaaaactgtgctatgaaaggcaagcataaagatgaatgccacaactttatcaaagtatttgttccaagaaacgatgagatggtttttgtttgtggtaccaatgcattcaatcccatgtgtagatactacaggttgagtaccttagaatatgatggggaagaaattagtggcctggcaagatgcccatttgatgccagacaaaccaatgttgccctctttgctgatgggaagctgtattctgccacagtggctgacttcttggccagcgatgccgttatttatcgaagcatgggtgatggatctgcccttcgcacaataaaatatgattccaaatggataaaagagccacactttcttcatgccatagaatatggaaactatgtctatttcttctttcgagaaatcgctgtcgaacataataatttaggcaaggctgtgtattcccgcgtggcccgcatatgtaaaaacgacatgggtggttcccagcgggtcctggagaaacactggacttcatttctaaaggctcggctgaactgttctgtccctggagattcgtttttctactttgatgttctgcagtctattacagacataatacaaatcaatggcatccccactgtggtcggggtgtttaccacgcagctcaatagcatccctggttctgctgtctgtgcatttagcatggatgacattgaaaaagtattcaaaggacggtttaaggaacagaaaactccagattctgtttggacagcagttcccgaagacaaagtgccaaagccaaggcctggctgttgtgcaaaacacggccttgccgaagcttataaaacctccatcgatttcccggatgaaactctgtcattcatcaaatctcatcccctgatggactctgccgttccacccattgccgatgagccctggttcacaaagactcgggtcaggtacagactgacggccatctcagtggaccattcagccggaccctaccagaactacacagtcatctttgttggctctgaagctggcatggtacttaaagttctggcaaagaccagtcctttctctttgaacgacagcgtattactggaagagattgaagcctacaaccatgcaaagtgcagtgctgagaatgaggaagacaaaaaggtcatctcattacagttggataaagatcaccacgctttatatgtggcgttctctagctgcattatccgcatccccctcagtcgctgtgagcgttatggatcatgtaaaaagtcttgtattgcatctcgtgacccgtattgtggctggttaagccagggatcctgtggtagagtgaccccagggatgcttgctgaaggatatgaacaagacacagaattcggcaacacagctcatctaggggactgccatgaaattttgcctacttcaactacaccagattacaaaatatttggcggtccaacatctggtgtacgatgggaagtccagtctggagagtccaaccagatggtccacatgaatgtcctcatcacctgtgtctttgctgcttttgttttgggggcattcattgcaggtgtggcagtatactgctatcgagacatgtttgttcggaaaaacagaaagatccataaagatgcagagtccgcccagtcatgcacagactccagtggaagttttgccaaactgaatggtctctttgacagccctgtcaaggaataccaacagaatattgattctcctaaactgtatagtaacctgctaaccagtcggaaagagctaccacccaatggagatactaaatccatggtaatggaccatcgagggcaacctccagagttggctgctcttcctactcctgagtctacacccgtgcttcaccagaagaccctgcaggccatgaagagccactcagaaaaggcccatggccatggagcttcaaggaaagaaacccctcagttttttccgtctagtccgccacctcattccccattaagtcatgggcatatccccagtgccattgttcttccaaatgctacccatgactacaacacgtctttctcaaactccaatgctcacaaagctgaaaagaagcttcaaaacattgatcaccctctcacaaagtcatccagtaagagagatcaccggcgttctgttgattccagaaataccctcaatgatctcctgaagcatctgaatgacccaaatagtaaccccaaagccatcatgggagacatccagatggcacaccagaacttaatgctggatcccatgggatcgatgtctgaggtcccacctaaagtccctaaccgggaggcatcgctatactcccctccttcaactctccccagaaatagcccaaccaagcgagtggatgtccccaccactcctggagtcccaatgacttctctggaaagacaaagaggttatcacaaaaattcctcccagaggcactctatatctgctatgcctaaaaacttaaactcaccaaatggtgttttgttatccagacagcctagtatgaaccgtggaggatatatgcccacccccactggggcgaaggtggactatattcagggaacaccagtgagtgttcatctgcagccttccctctccagacagagcagctacaccagtaatggcactcttcctaggacgggactaaagaggacgccgtccttaaaacctgacgtgccaccaaagccttcctttgttcctcaaaccccatctgtcagaccactgaacaaatacacatactaggcctcaagtgtgctattcccatgtggctttatcctgtccgtgttgttgagaggatgatgttgtaagggtaccttaaaacaagagactcgcttgtattttaagagaaccaagtggccaaagaaactctttctaactttggcaacatcagaacttgccacatgtagctactgcagcaaggcttctgtgtacttgcctgaaaacaaaggaaggtgctggtcattccatttcttttgtttgaagctaaagagatgtgtagctcacaggggctaccttaccagtataaagagctgataacagtactcagaagaatctgtgaacaaatacttgaaaatgggttcaatgtagactgccattatgtgtggtcttcccattaaatgtgaacattttaatatgtatgcattcaccttgcctcttgcacaaatgtcaaaaaaaagatggtaatatctcaaagaaatgaacttgtagattaccaagcagtttgctaaaaattcaatctttgacccaagctgtagcatttttttttcatgtgtggcatctttttcatgccaccaacaaacttgttgtgtgtgtgcgtgtgtgtgtgtgtgtgtgtgtgtgtgtgtgtgttctgtacccactaggatttgtttaggtgcccattgcatctttttgtgctatggagttgtttacattaagcatgaccgaacgagagacaatactatttcccacaggagtccattgggttcagctttgaaagaggaatagaatcgaggctcctttgaccatcaaaatgatgaactttacttatgtggtacccaatgccagaatgtaagagttgcaagtgattttgtgctgctattcattaaaacttgtattccagtcttgccagcttaaggagatcaagatattaagaggtatccttgatttattttccagtattcagtagtaaaattttcctgtccactgtgaatcaaagcctgagtcactctatttaaccttggacacactaataaggttttattttgattgtgttcgtttccccccccccaatagtaaaatttctcctcctttaactcctcctaccccccaaggtaagaaacaaaaaacaaacaaacaaacaaaaatagaagacaaaagaaagacatatgaaaggaattgtaattggcttaacagaaacagtctgtaaaaacctaacagtggtgcaatcatgttgtctgtgttgtgttatgtgagaattttctcctaagtcatgcaggtaatgacaatatactgtaaataccacatgtgagtttacctgaatctgtgcattttgtgccttattcatgagaatgatagaagtactaaaatctgtcaagtgttttcagtatagcacattatttactgagtgccagttgtaaatgtttttcaaccagcacctaaaaagactcttttcaaaaaatcacagaaacaacctaggacaattatttgttacataatccgacctcatagcagcattacattctttgccgtgataaacattccactcctgctttcctaaggatgaaacagtgataatgtgaactcaaatgaggtttcctgggtaatgtgacacctgcagaaactatagagcgtcatttatacgtagtttggcagaaaccacttacggctgatgatgcgcaaccctgctgactgtttcagttaatatgctgcacaccacacacttgtttagtgaaccaaatctagaaagtaccaaggcagaggtatgctcctgctgtaatcaggcaaatgagttcaactggatttcttttgacaatactgttggtacctattacttgggggaggacatgttgcagaagaccagatcatttttatacagaatgtgaaatactgatacagttattcttttttttaaagaacattgttttataaagaacgtgatttccagtgatctctggaagcgctaaagctaaaatttctgttcttgaaacacttcagctttgcaactaaaatattacagattaataataaattaaaccaaccaatgataaacactactcagtccaccaacaacaaacgtgtttgaattcaccttaccaatattaatcccagcgtgtgtaaaacagaacagtaactctatgtgaccccagataacattttgtaacattgtgcttccttgtagtttgtaatgtgagttcaatcagtatttatgttgaaatttctaacattaaatctagtctctatcctgttaatttaatttttaaatgctttatccatttgtgcaaaggtaaacgcagattgtatcttttttaatggtacggcataaaaagtaaccctcaagtgaagtgtctctatactgttttatagagtactttaacatgaatagataccttgtaaacttgtattgtggatgtgtaaataatatgtactttgggtttttaacaccgcatgtaaagtcaaaataaaatatacaaatcattataaaaaaaaaaa

SEQ ID NO: 3187 - DNA, 6109 bp, Homo sapiens
gcggccgcttcccaccgtccctctccccttactggcagagcgcgctgcgggcggactcccgggcccggagcagcccaccggccaccccaccgcccacccggctcccggtgtctcctcccggccgctctacccagcaactttccgtgctttgttccccgactggaaatgctttacggaagcgtcttggacagggtctccgccaggcgacaagagctcggtgctgagatgtgttacgttctcatctccccatcaattatggatggaaacaaataaggaagagtcaattttgctgagccccttctccggcaacgagaggcgttctgcagccgggagggagccgccgctcgcgccggcagccgctggcaggggcatggtgaggaggaaggtagctcagtggcatttctgagcaggggccaccctgacttcaccttggcccaccatgagggtcttcctgctttgtgcctacatactgctgctgatggtttcccagttgagggcagtcagctttcctgaagatgatgaaccccttaatactgtcgactatcactattcaaggcaatatccggtttttagaggacgcccttcaggcaatgaatcgcagcacaggctggactttcagctgatgttgaaaattcgagacacactttatattgctggcagggatcaagtttatacagtaaacttaaatgaaatgcccaaaacagaagtaatacccaacaagaaactgacatggcgatcaagacaacaggatcgagaaaactgtgctatgaaaggcaagcataaagatgaatgccacaactttatcaaagtatttgttccaagaaacgatgagatggtttttgtttgtggtaccaatgcattcaatcccatgtgtagatactacaggttgagtaccttagaatatgatggggaagaaattagtggcctggcaagatgcccatttgatgccagacaaaccaatgttgccctctttgctgatgggaagctgtattctgccacagtggctgacttcttggccagcgatgccgttatttatcgaagcatgggtgatggatctgcccttcgcacaataaaatatgattccaaatggataaaagagccacactttcttcatgccatagaatatggaaactatgtctatttcttctttcgagaaatcgctgtcgaacataataatttaggcaaggctgtgtattcccgcgtggcccgcatatgtaaaaacgacatgggtggttcccagcgggtcctggagaaacactggacttcatttctaaaggctcggctgaactgttctgtccctggagattcgtttttctactttgatgttctgcagtctattacagacataatacaaatcaatggcatccccactgtggtcggggtgtttaccacgcagctcaatagcatccctggttctgctgtctgtgcatttagcatggatgacattgaaaaagtattcaaaggacggtttaaggaacagaaaactccagattctgtttggacagcagttcccgaagacaaagtgccaaagccaaggcctggctgttgtgcaaaacacggccttgccgaagcttataaaacctccatcgatttcccggatgaaactctgtcattcatcaaatctcatcccctgatggactctgccgttccacccattgccgatgagccctggttcacaaagactcgggtcaggtacagactgacggccatctcagtggaccattcagccggaccctaccagaactacacagtcatctttgttggctctgaagctggcatggtacttaaagttctggcaaagaccagtcctttctctttgaacgacagcgtattactggaagagattgaagcctacaaccatgcaaagtgcagtgctgagaatgaggaagacaaaaaggtcatctcattacagttggataaagatcaccacgctttatatgtggcgttctctagctgcattatccgcatccccctcagtcgctgtgagcgttatggatcatgtaaaaagtcttgtattgcatctcgtgacccgtattgtggctggttaagccagggatcctgtggtagagtgaccccagggatgcttgctgaaggatatgaacaagacacagaattcggcaacacagctcatctaggggactgccatgaaattttgcctacttcaactacaccagattacaaaatatttggcggtccaacatctgacatggaggtatcttcatcttctgttaccacaatggcaagtatcccagaaatcacacctaaagtgattgatacctggagacctaaactgacaagctctcggaaatttgtagttcaagatgatccaaacacttctgattttactgatcctttatcgggtatcccaaagggtgtacgatgggaagtccagtctggagagtccaaccagatggtccacatgaatgtcctcatcacctgtgtctttgctgcttttgttttgggggcattcattgcaggtgtggcagtatactgctatcgagacatgtttgttcggaaaaacagaaagatccataaagatgcagagtccgcccagtcatgcacagactccagtggaagttttgccaaactgaatggtctctttgacagccctgtcaaggaataccaacagaatattgattctcctaaactgtatagtaacctgctaaccagtcggaaagagctaccacccaatggagatactaaatccatggtaatggaccatcgagggcaacctccagagttggctgctcttcctactcctgagtctacacccgtgcttcaccagaagaccctgcaggccatgaagagccactcagaaaaggcccatggccatggagcttcaaggaaagaaacccctcagttttttccgtctagtccgccacctcattccccattaagtcatgggcatatccccagtgccattgttcttccaaatgctacccatgactacaacacgtctttctcaaactccaatgctcacaaagctgaaaagaagcttcaaaacattgatcaccctctcacaaagtcatccagtaagagagatcaccggcgttctgttgattccagaaataccctcaatgatctcctgaagcatctgaatgacccaaatagtaaccccaaagccatcatgggagacatccagatggcacaccagaacttaatgctggatcccatgggatcgatgtctgaggtcccacctaaagtccctaaccgggaggcatcgctatactcccctccttcaactctccccagaaatagcccaaccaagcgagtggatgtccccaccactcctggagtcccaatgacttctctggaaagacaaagaggttatcacaaaaattcctcccagaggcactctatatctgctatgcctaaaaacttaaactcaccaaatggtgttttgttatccagacagcctagtatgaaccgtggaggatatatgcccacccccactggggcgaaggtggactatattcagggaacaccagtgagtgttcatctgcagccttccctctccagacagagcagctacaccagtaatggcactcttcctaggacgggactaaagaggacgccgtccttaaaacctgacgtgccaccaaagccttcctttgttcctcaaaccccatctgtcagaccactgaacaaatacacatactaggcctcaagtgtgctattcccatgtggctttatcctgtccgtgttgttgagaggatgatgttgtaagggtaccttaaaacaagagactcgcttgtattttaagagaaccaagtggccaaagaaactctttctaactttggcaacatcagaacttgccacatgtagctactgcagcaaggcttctgtgtacttgcctgaaaacaaaggaaggtgctggtcattccatttcttttgtttgaagctaaagagatgtgtagctcacaggggctaccttaccagtataaagagctgataacagtactcagaagaatctgtgaacaaatacttgaaaatgggttcaatgtagactgccattatgtgtggtcttcccattaaatgtgaacattttaatatgtatgcattcaccttgcctcttgcacaaatgtcaaaaaaaagatggtaatatctcaaagaaatgaacttgtagattaccaagcagtttgctaaaaattcaatctttgacccaagctgtagcatttttttttcatgtgtggcatctttttcatgccaccaacaaacttgttgtgtgtgtgcgtgtgtgtgtgtgtgtgtgtgtgtgtgtgtgtgttctgtacccactaggatttgtttaggtgcccattgcatctttttgtgctatggagttgtttacattaagcatgaccgaacgagagacaatactatttcccacaggagtccattgggttcagctttgaaagaggaatagaatcgaggctcctttgaccatcaaaatgatgaactttacttatgtggtacccaatgccagaatgtaagagttgcaagtgattttgtgctgctattcattaaaacttgtattccagtcttgccagcttaaggagatcaagatattaagaggtatccttgatttattttccagtattcagtagtaaaattttcctgtccactgtgaatcaaagcctgagtcactctatttaaccttggacacactaataaggttttattttgattgtgttcgtttccccccccccaatagtaaaatttctcctcctttaactcctcctaccccccaaggtaagaaacaaaaaacaaacaaacaaacaaaaatagaagacaaaagaaagacatatgaaaggaattgtaattggcttaacagaaacagtctgtaaaaacctaacagtggtgcaatcatgttgtctgtgttgtgttatgtgagaattttctcctaagtcatgcaggtaatgacaatatactgtaaataccacatgtgagtttacctgaatctgtgcattttgtgccttattcatgagaatgatagaagtactaaaatctgtcaagtgttttcagtatagcacattatttactgagtgccagttgtaaatgtttttcaaccagcacctaaaaagactcttttcaaaaaatcacagaaacaacctaggacaattatttgttacataatccgacctcatagcagcattacattctttgccgtgataaacattccactcctgctttcctaaggatgaaacagtgataatgtgaactcaaatgaggtttcctgggtaatgtgacacctgcagaaactatagagcgtcatttatacgtagtttggcagaaaccacttacggctgatgatgcgcaaccctgctgactgtttcagttaatatgctgcacaccacacacttgtttagtgaaccaaatctagaaagtaccaaggcagaggtatgctcctgctgtaatcaggcaaatgagttcaactggatttcttttgacaatactgttggtacctattacttgggggaggacatgttgcagaagaccagatcatttttatacagaatgtgaaatactgatacagttattcttttttttaaagaacattgttttataaagaacgtgatttccagtgatctctggaagcgctaaagctaaaatttctgttcttgaaacacttcagctttgcaactaaaatattacagattaataataaattaaaccaaccaatgataaacactactcagtccaccaacaacaaacgtgtttgaattcaccttaccaatattaatcccagcgtgtgtaaaacagaacagtaactctatgtgaccccagataacattttgtaacattgtgcttccttgtagtttgtaatgtgagttcaatcagtatttatgttgaaatttctaacattaaatctagtctctatcctgttaatttaatttttaaatgctttatccatttgtgcaaaggtaaacgcagattgtatcttttttaatggtacggcataaaaagtaaccctcaagtgaagtgtctctatactgttttatagagtactttaacatgaatagataccttgtaaacttgtattgtggatgtgtaaataatatgtactttgggtttttaacaccgcatgtaaagtcaaaataaaatatacaaatcattataaaaaaaaaaa

SEQ ID NO: 3188 - DNA, 5919 bp, Homo sapiens
gcggccgcttcccaccgtccctctccccttactggcagagcgcgctgcgggcggactcccgggcccggagcagcccaccggccaccccaccgcccacccggctcccggtgtctcctcccggccgctctacccagcaactttccgtgctttgttccccgactggaaatgctttacggaagcgtcttggacagggtctccgccaggcgacaagagctcggtgctgagatgtgttacgttctcatctccccatcaattatggatggaaacaaataaggaagagtcaattttgctgagccccttctccggcaacgagaggcgttctgcagccgggagggagccgccgctcgcgccggcagccgctggcaggggcatggtgaggaggaaggtagctcagtggcatttctgagcaggggccaccctgacttcaccttggcccaccatgagggtcttcctgctttgtgcctacatactgctgctgatggtttcccagttgagggcagtcagctttcctgaagatgatgaaccccttaatactgtcgactatcactattcaaggcaatatccggtttttagaggacgcccttcaggcaatgaatcgcagcacaggctggactttcagctgatgttgaaaattcgagacacactttatattgctggcagggatcaagtttatacagtaaacttaaatgaaatgcccaaaacagaagtaatacccaacaagaaactgacatggcgatcaagacaacaggatcgagaaaactgtgctatgaaaggcaagcataaagatgaatgccacaactttatcaaagtatttgttccaagaaacgatgagatggtttttgtttgtggtaccaatgcattcaatcccatgtgtagatactacaggttgagtaccttagaatatgatggggaagaaattagtggcctggcaagatgcccatttgatgccagacaaaccaatgttgccctctttgctgatgggaagctgtattctgccacagtggctgacttcttggccagcgatgccgttatttatcgaagcatgggtgatggatctgcccttcgcacaataaaatatgattccaaatggataaaagagccacactttcttcatgccatagaatatggaaactatgtctatttcttctttcgagaaatcgctgtcgaacataataatttaggcaaggctgtgtattcccgcgtggcccgcatatgtaaaaacgacatgggtggttcccagcgggtcctggagaaacactggacttcatttctaaaggctcggctgaactgttctgtccctggagattcgtttttctactttgatgttctgcagtctattacagacataatacaaatcaatggcatccccactgtggtcggggtgtttaccacgcagctcaatagcatccctggttctgctgtctgtgcatttagcatggatgacattgaaaaagtattcaaaggacggtttaaggaacagaaaactccagattctgtttggacagcagttcccgaagacaaagtgccaaagccaaggcctggctgttgtgcaaaacacggccttgccgaagcttataaaacctccatcgatttcccggatgaaactctgtcattcatcaaatctcatcccctgatggactctgccgttccacccattgccgatgagccctggttcacaaagactcgggtcaggtacagactgacggccatctcagtggaccattcagccggaccctaccagaactacacagtcatctttgttggctctgaagctggcatggtacttaaagttctggcaaagaccagtcctttctctttgaacgacagcgtattactggaagagattgaagcctacaaccatgcaaagtgcagtgctgagaatgaggaagacaaaaaggtcatctcattacagttggataaagatcaccacgctttatatgtggcgttctctagctgcattatccgcatccccctcagtcgctgtgagcgttatggatcatgtaaaaagtcttgtattgcatctcgtgacccgtattgtggctggttaagccagggatcctgtggtagagtgaccccagggatgcttgctgaaggatatgaacaagacacagaattcggcaacacagctcatctaggggactgccatgacatggaggtatcttcatcttctgttaccacaatggtgtacgatgggaagtccagtctggagagtccaaccagatggtccacatgaatgtcctcatcacctgtgtctttgctgcttttgttttgggggcattcattgcaggtgtggcagtatactgctatcgagacatgtttgttcggaaaaacagaaagatccataaagatgcagagtccgcccagtcatgcacagactccagtggaagttttgccaaactgaatggtctctttgacagccctgtcaaggaataccaacagaatattgattctcctaaactgtatagtaacctgctaaccagtcggaaagagctaccacccaatggagatactaaatccatggtaatggaccatcgagggcaacctccagagttggctgctcttcctactcctgagtctacacccgtgcttcaccagaagaccctgcaggccatgaagagccactcagaaaaggcccatggccatggagcttcaaggaaagaaacccctcagttttttccgtctagtccgccacctcattccccattaagtcatgggcatatccccagtgccattgttcttccaaatgctacccatgactacaacacgtctttctcaaactccaatgctcacaaagctgaaaagaagcttcaaaacattgatcaccctctcacaaagtcatccagtaagagagatcaccggcgttctgttgattccagaaataccctcaatgatctcctgaagcatctgaatgacccaaatagtaaccccaaagccatcatgggagacatccagatggcacaccagaacttaatgctggatcccatgggatcgatgtctgaggtcccacctaaagtccctaaccgggaggcatcgctatactcccctccttcaactctccccagaaatagcccaaccaagcgagtggatgtccccaccactcctggagtcccaatgacttctctggaaagacaaagaggttatcacaaaaattcctcccagaggcactctatatctgctatgcctaaaaacttaaactcaccaaatggtgttttgttatccagacagcctagtatgaaccgtggaggatatatgcccacccccactggggcgaaggtggactatattcagggaacaccagtgagtgttcatctgcagccttccctctccagacagagcagctacaccagtaatggcactcttcctaggacgggactaaagaggacgccgtccttaaaacctgacgtgccaccaaagccttcctttgttcctcaaaccccatctgtcagaccactgaacaaatacacatactaggcctcaagtgtgctattcccatgtggctttatcctgtccgtgttgttgagaggatgatgttgtaagggtaccttaaaacaagagactcgcttgtattttaagagaaccaagtggccaaagaaactctttctaactttggcaacatcagaacttgccacatgtagctactgcagcaaggcttctgtgtacttgcctgaaaacaaaggaaggtgctggtcattccatttcttttgtttgaagctaaagagatgtgtagctcacaggggctaccttaccagtataaagagctgataacagtactcagaagaatctgtgaacaaatacttgaaaatgggttcaatgtagactgccattatgtgtggtcttcccattaaatgtgaacattttaatatgtatgcattcaccttgcctcttgcacaaatgtcaaaaaaaagatggtaatatctcaaagaaatgaacttgtagattaccaagcagtttgctaaaaattcaatctttgacccaagctgtagcatttttttttcatgtgtggcatctttttcatgccaccaacaaacttgttgtgtgtgtgcgtgtgtgtgtgtgtgtgtgtgtgtgtgtgtgtgttctgtacccactaggatttgtttaggtgcccattgcatctttttgtgctatggagttgtttacattaagcatgaccgaacgagagacaatactatttcccacaggagtccattgggttcagctttgaaagaggaatagaatcgaggctcctttgaccatcaaaatgatgaactttacttatgtggtacccaatgccagaatgtaagagttgcaagtgattttgtgctgctattcattaaaacttgtattccagtcttgccagcttaaggagatcaagatattaagaggtatccttgatttattttccagtattcagtagtaaaattttcctgtccactgtgaatcaaagcctgagtcactctatttaaccttggacacactaataaggttttattttgattgtgttcgtttccccccccccaatagtaaaatttctcctcctttaactcctcctaccccccaaggtaagaaacaaaaaacaaacaaacaaacaaaaatagaagacaaaagaaagacatatgaaaggaattgtaattggcttaacagaaacagtctgtaaaaacctaacagtggtgcaatcatgttgtctgtgttgtgttatgtgagaattttctcctaagtcatgcaggtaatgacaatatactgtaaataccacatgtgagtttacctgaatctgtgcattttgtgccttattcatgagaatgatagaagtactaaaatctgtcaagtgttttcagtatagcacattatttactgagtgccagttgtaaatgtttttcaaccagcacctaaaaagactcttttcaaaaaatcacagaaacaacctaggacaattatttgttacataatccgacctcatagcagcattacattctttgccgtgataaacattccactcctgctttcctaaggatgaaacagtgataatgtgaactcaaatgaggtttcctgggtaatgtgacacctgcagaaactatagagcgtcatttatacgtagtttggcagaaaccacttacggctgatgatgcgcaaccctgctgactgtttcagttaatatgctgcacaccacacacttgtttagtgaaccaaatctagaaagtaccaaggcagaggtatgctcctgctgtaatcaggcaaatgagttcaactggatttcttttgacaatactgttggtacctattacttgggggaggacatgttgcagaagaccagatcatttttatacagaatgtgaaatactgatacagttattcttttttttaaagaacattgttttataaagaacgtgatttccagtgatctctggaagcgctaaagctaaaatttctgttcttgaaacacttcagctttgcaactaaaatattacagattaataataaattaaaccaaccaatgataaacactactcagtccaccaacaacaaacgtgtttgaattcaccttaccaatattaatcccagcgtgtgtaaaacagaacagtaactctatgtgaccccagataacattttgtaacattgtgcttccttgtagtttgtaatgtgagttcaatcagtatttatgttgaaatttctaacattaaatctagtctctatcctgttaatttaatttttaaatgctttatccatttgtgcaaaggtaaacgcagattgtatcttttttaatggtacggcataaaaagtaaccctcaagtgaagtgtctctatactgttttatagagtactttaacatgaatagataccttgtaaacttgtattgtggatgtgtaaataatatgtactttgggtttttaacaccgcatgtaaagtcaaaataaaatatacaaatcattataaaaaaaaaaa

SEQ ID NO: 3189 - DNA, 3784 bp, Homo sapiens; identical to SEQ ID NO: 711

SEQ ID NO: 3190 - DNA, 2554 bp, Homo sapiens
ccacgcgtccggccaagcatacatctctaattttattattttggtcttttcgttggattttccctttcttctttttttcgggttatcgctcagttttgagcagaggtttacattttttaaaaatttgctttccagcccgccttgatcttctaagtgcgagttcatcgtctgagaaaaaaaaaaatctctggttggcgtttttgtttcttttcttttctttcttttctttccttttttttttttttttaatttttttcaagggggaggagattttccacaagaaaaggttgttttcatgtttgggattcaggaaagcatccaacggagtggaagcagcatgaaggaagagccgctgggcagcggcatgaacgcggtgcggacgtggatgcagggcgccggggtgctggacgccaacacggcggcgcagagcggggtgggtctggcccgggctcactttgagaagcagccgccttccaatctgcggaaatccaacttcttccacttcgtcctggccctctacgacagacagggccagcccgtggagatcgagaggacagcgtttgtggggttcgtggagaaggaaaaagaagccaacagcgaaaagaccaataacggaattcactaccggcttcagcttctctacagcaatgggataaggacggagcaggatttctacgtgcgcctcattgactccatgacaaaacaagccatagtgtatgaaggccaagacaagaacccagaaatgtgccgagtcttgctcacacatgagatcatgtgcagccgctgttgtgacaagaaaagctgtggcaaccgaaatgagactccctcagatccagtgataattgacaggttcttcttgaaatttttcctcaaatgtaaccaaaattgcctaaagaatgcgggaaacccacgtgacatgcggagattccaggtcgtggtgtctacgacagtcaatgtggatggccatgtcctggcagtctctgataacatgtttgtccataataattccaagcatgggcggagggctcggaggcttgacccctcggaaggtacgccctcttatctggaacatgctactccctgtatcaaagccatcagcccgagtgaaggatggacgacgggaggtgcgactgtgatcatcataggggacaatttctttgatgggttacaggtcatattcggtaccatgctggtctggagtgagttgatcactcctcatgccatccgtgtgcagacccctcctcggcacatccctggtgttgtggaagtcacactgtcctacaaatctaagcagttctgcaaaggaacaccaggcagattcatttatacagcgctcaacgaacccaccatcgattatggtttccagaggttacagaaggtcattcctcggcaccctggtgaccctgagcgtttgccaaaggaagtaatactcaaaagggctgcggatctggtagaagcactgtatgggatgccacacaacaaccaggaaatcattctgaagagagcggccgacattgccgaggccctgtacagtgttccccgcaaccacaaccaactcccggcccttgctaacacctcggtccacgcagggatgatgggcgtgaattcgttcagtggacaactggccgtgaatgtctccgaggcatcacaagccaccaatcagggtttcacccgcaactcaagcagcgtatcaccacacgggtacgtgccgagcaccactccccagcagaccaactataactccgtcaccacgagcatgaacggatacggctctgccgcaatgtccaatttgggcggctcccccaccttcctcaacggctcagctgccaactccccctatgccatagtgccatccagccccaccatggcctcctccacaagcctcccctccaactgcagcagctcctcgggcatcttctccttctcaccagccaacatggtctcagccgtgaaacagaagagtgctttcgcaccagtcgtcagaccccagacctccccacctcccacctgcaccagcaccaacgggaacagcctgcaagcgatatctggcatgattgttcctcctatgtgaaagaattgccttgaagaattgtattaatgaagaggttggattctgctacagagagtaatctgatacaagtcccagagtggaacttttaactcaggcctttttaagaggaatcacaataactgcagatttttaaacaaacaaaatcaccgaccttgcaaatactgaaattggaagagggatctgcaagtgcagggtgttggttaaagttgtacctcccaagtatttgggggatatatttattctgtattgacaaaagcaaatccactttttctttttcttttttttttttaagcttaattctgcaatcatttgtcttttataaaccgtaaagctctatacaagggacactataaataagactccatgttttaatttatgatgtttttaaagctgtgtaaaggaagaatgaagtggtgatatttacaaaaaaaaaaaaaaaaaaaaaaaaaaaaaaaaaaaaaaaaaaaaaaaaaaaaaaaaaaa

SEQ ID NO: 3191 - DNA, 2815 bp, Homo sapiens
gaggaaagcctgttagcagagcacggaccagtgtctccggagaatgctattctcctacatttccgaacaggttatcaacgcacagatcgatcactgcctctgtcccatcgctccctgaagtagctctgactccggttccttgaaaggggcgtgtacagaagtaaagatggagcctgcaggggagcgctttcccgaacaaaggcaagtcctgattctccttcttttactggaagtgactctggcaggctgggaaccccgtcgctattctgtgatggaggaaacagagagaggttcttttgtagccaacctggccaatgacctagggctgggagtgggggagctagccgagcggggagcccgggtagtttctgaggataacgaacaaggcttgcagcttgatctgcagaccgggcagttgatattaaatgagaagctggaccgggagaagctgtgtggccctactgagccctgtataatgcatttccaagtgttactgaaaaaacctttggaagtatttcgagctgaactactagtgacagacataaacgatcattctcctgagtttcctgaaagagaaatgaccctgaaaatcccagaaactagctcccttgggactgtgtttcctctgaaaaaagctcgggacttggacgtgggcagcaataatgttcaaaactacaatatttctcccaattctcatttccatgtttccactcgcacccgaggggatggcaggaaatacccagagctggtgctggacacagaactggatcgcgaggagcaggccgagctcagattaaccttgacagcggtggacggtggctctccaccccgatctggcaccgtccagatcctcatcttggtcttggacgccaatgacaatgccccggagtttgtgcaggcgctctacgaggtgcaggtcccagagaacagcccagtaggctccctagttgtcaaggtctctgctagggatttagacactgggacaaatggagagatatcatactccctttattacagctctcaggagatagacaaaccttttgagctaagcagcctttcaggagaaattcgactaattaaaaaactagattttgagacaatgtcttcgtatgatctagatatagaggcatctgatggcgggggactttctggaaaatgctctgtctctgttaaggtgctggatgttaacgataacttcccggaactaagtatttcatcacttaccagccctattcccgagaattctccagagacagaagtggccctgtttaggattagagaccgagactctggggaaaatggaaaaatgatttgctcaattcaggatgatgttccttttaagctaaaaccttctgttgagaatttctacaggctggtaacagaaggggcgctggacagagagaccagagccgagtacaacatcaccatcaccatcacagacttggggactccaaggctgaaaaccgagcagagcataaccgtgctggtgtcggacgtcaatgacaacgcccccgccttcacccaaacctcctacaccctgttcgtccgcgagaacaacagccccgccctgcacatcggcagtgtccgcgcaacagacagagactcgggcaccaacgcccaggtcacctactcgctgctgccgccccaggacccgcacctgcccctcacctccctggtctccattaacacggacaacggccacctgttcgctctccagtcgctggactacgaggccctgcaggctttcgagttccgcgtgggcgccacagaccgcggcttcccggcgctgagcagcgaggcgctggtgcgagtgctggtgctggacgccaacgacaactcgcccttcgtgctgtacccgctgcagaacggctccgcgccctgcaccgagctggtgccccgggcggccgagccgggctacctggtgaccaaggtggtggcggtggacggcgactcgggccagaacgcctggctgtcgtaccagctgctcaaggccacggagcccgggctgttcggcgtgtgggcgcacaatggcgaggtgcgcaccgccaggctgctgagcgagcgcgacgtggccaagcacaggctagtggtgctggtcaaggacaatggcgagcctccgcgctcggccaccgccacgctgcaagtgctcctggtggacggcttctctcagccctacctgccgctcccagaggcggccccggcccaagcccaggccgactcgcttaccgtctacctggtggtggcattggcctcggtgtcttcgctcttcctcttctcggtgttcctgttcgtggcagtgcggctgtgcaggaggagcagggcggcctcagtgggtcgctgctcggtgcccgagggcccctttccagggcatctggtggacgtgagcggcaccgggaccctttcccagagctaccagtacgaggtgtgtctgacgggaggctctgaaagtaatgatttcaagttcttgaagcctatattcccaaatattgtaagccaggactctaggaggaaatcagaatttctagaataatgtaggtatctgtagctttccgaccgtctgttaattttgtcttcctcacttttcaccttagttttttttaaccctttagtaatcttgaattctacttttttttaaatttctactgttgtctttagtaatgttactcatttcctttgtctgattgttagttttcaaattattgtattattataaatattttatatcaggaaagttcatatttctgaataaattaatagtattcaaaaaaaaaaaaaaaaaaaaaaaaaaaaaaaaaaaaaaaaaaaaaaaaaaaaa
